(19) United States
(12) Patent Application Publication
(10) Pub. No.: US 2020/0157537 A1
(43) Pub. Date: May 21, 2020

(54) Modulating RNA Interactions with Polycomb Repressive Complex 1 (PRC1)

(71) Applicant: The General Hospital Corporation, Boston, MA (US)

(72) Inventors: Jeannie T. Lee, Boston, MA (US); Michael Rosenberg, Brookline, MA (US); Roy Blum, Boston, MA (US)

(21) Appl. No.: 16/664,527

(22) Filed: Oct. 25, 2019

Related U.S. Application Data
(60) Provisional application No. 62/750,503, filed on Oct. 25, 2018.

(51) Int. Cl. C12N 15/113; A61P 37/06

(52) U.S. Cl. CPC C12N 15/113; C12N 2310/3233; C12N 2310/122; C12N 2310/11; C12N 2310/14; C12N 2310/3231; C12N 2310/321; C12N 2310/322; C12N 2310/3181; C12N 2310/315; C12N 2310/316; C12N 2310/313; C12N 2310/314; C12N 2310/311; A61P 37/06

(57) ABSTRACT

This invention relates to polycomb-associated RNAs, libraries and fragments of those RNAs, inhibitory nucleic acids and methods and compositions for targeting RNAs, and methods of use thereof.

### CLAIM OF PRIORITY

[0001] This application claims the benefit of U.S. Provisional Patent Application Ser. No. 62/750,503, filed on Oct. 25, 2018. The entire contents of the foregoing are hereby incorporated by reference.

### FEDERALLY SPONSORED RESEARCH OR DEVELOPMENT

[0002] This invention was made with Government support under Grant No. GM090278 awarded by the National Institutes of Health. The Government has certain rights in the invention.

### SEQUENCE LISTING

[0003] The instant application contains a Sequence Listing which has been submitted electronically in ASCII format and is hereby incorporated by reference in its entirety. Said ASCII copy, created on Oct. 25, 2019, is named SequenceListing.txt and is 67.2 MB in size.

### TECHNICAL FIELD

[0004] This invention relates to methods of modulating RNA interactions with Polycomb Repressive Complex 1 (PRC1) using inhibitory nucleic acids that bind RNAs and inhibit the PRC1-RNA interaction, to modulate gene expression.

### BACKGROUND

[0005] Polycomb group proteins play critically important roles in stem cell biology and mammalian development (Simon and Kingston, 2013). Polycomb proteins exist in at least two multi-subunit complexes, including Polycomb repressive complex 1 (PRC1) and Polycomb repressive complex 2 (PRC2). While PRC2 trimethylates histone H3 at lysine 27 (H3K27me3), PRC1 ubiquitylates histone H2A on lysine 119 (H2AK119Ub) through its RING-finger catalytic subunit, RING1a/1b, and compacts chromatin. Unlike PRC2, PRC1 has a heterogeneous composition in mammals. The “canonical” form of PRC1 is defined by inclusion of the chromobox homolog protein, CBX, which binds the H3K27me3 mark and is thereby partially dependent on PRC2 for chromatin binding. Canonical PRC1 has been associated with chromatin compaction through the CBX subunit (Grau et al., 2011). By contrast, the “noncanonical” form contains RING1 and YY1 Binding Protein (RYBP) and is associated predominantly with ubiquitylation of H2AK119 through the RING1 subunit. Noncanonical PRC1 binds chromatin independently of PRC2 and possibly helps direct PRC2 to chromatin through its H2AK119Ub mark (Aranda et al., 2015). In addition, PRC1 contains several other subunits, including Polycomb group RING finger protein 4 (PCGF4) (BMI1)/PCGF2 (MEL18); it also includes the polyhomeotic homolog (PHC) in the canonical (CBX) form, and PCGF1,2,4,5, and 6 in the non-canonical (RYBP) form. Together, PRC1 and PRC2 bind and regulate expression from thousands of genes in mammals (Blackledge et al., 2015).

### SUMMARY

[0006] The studies described herein demonstrated that PRC1 binds both noncoding RNA and coding RNA at identifieable sequence motifs, and that these motifs can be targeted to alter gene expression. The PRC1-interacting transcriptome includes antisense, intergenic, and promoter-associated transcripts, as well as many unannotated RNAs. A large number of transcripts occur within imprinted regions, oncogene and tumor suppressor loci, and stem-cell-related bivalent domains. Further evidence is provided that inhibitory oligonucleotides that specifically bind to these PRC1-interacting RNAs can successfully modulate gene expression in a variety of separate and independent examples, presumably by inhibiting PRC1-associated effects. PRC1 binding sites can be classified into several groups, including (i) 3′ untranslated region [3′ UTR], (ii) promoter-associated, (iii) gene body, (iv) antisense, and (v) intergenic. Inhibiting the PRC1-RNA interactions can lead to either activation or repression, depending on context.

[0007] In another aspect the invention features an inhibitory nucleic acid that specifically binds to, or is complementary to a region of an RNA comprising a motif as described herein that is known to bind to Polycomb repressive complex 1 (PRC1), wherein the sequence of the region is selected from the group consisting of SEQ ID NOs:1 to 5893 (human), 5894 to 17415 (human), and 17416 to 36368 (mouse), which are identical to those as set forth in Tables 1-3 of WO 2016/149455. Without being bound by a theory of invention, these inhibitory nucleic acids are able to interfere with the binding of and function of PRC1, by preventing recruitment of PRC1 to a specific chromosomal locus. For example, data herein shows that a single administration of inhibitory nucleic acids designed to specifically bind a RNA can alter expression of a gene associated with the RNA. Data provided herein also indicate that putative ncRNA binding sites for PRC1 show no conserved primary sequence motif, making it possible to design specific inhibitory nucleic acids that will interfere with PRC1 interaction with a single ncRNA, without generally disrupting PRC1 interactions with other ncRNAs. Further, data provided herein support that RNA can recruit PRC1 in a cis fashion, repressing gene expression at or near the specific chromosomal locus from which the RNA was transcribed, thus making it possible to design inhibitory nucleic acids that inhibit the function of PRC1 and increase the expression of a specific target gene.

[0008] In some embodiments, the inhibitory nucleic acid is provided for use in a method of modulating expression of a “gene targeted by the PRC1-binding RNA” (e.g., an intersecting or nearby gene, as set forth in Tables 1-3 of WO 2016/149455), meaning a gene whose expression is regulated by the PRC1-binding RNA. The term “PRC1-binding RNA” or “RNA that binds PRC1” is used interchangeably with “PRC1-associated RNA” and “PRC1-interacting RNA”, and refers to an RNA transcript or a region thereof (e.g., a Peak as described below) that binds the PRC1 complex, directly or indirectly. Such binding may be determined by dCLIP-SEQ techniques described herein using a component of the PRC1 complex, e.g., PRC1 itself. SEQ ID NOs: 1 to 5893 represent human RNA sequences containing portions that have been experimentally determined to bind PRC1 using the dCLIP-seq method described in WO 2016/149455; SEQ ID NOs: 17416 to 36368 represent murine RNA sequences containing portions that have been experimentally determined to bind PRC1 using the dCLIP-seq method; and SEQ ID NOs: 5894 to 17415 represent or human RNA sequences corresponding to the murine RNA sequences.

[0009] Such methods of modulating gene expression may be carried out in vitro, ex vivo, or in vivo. Tables 1-3 display genes targeted by the PRC1-binding RNA; the SEQ ID NOS: of the PRC1-associated RNA are set forth in the same row as the gene name. In some embodiments, the inhibitory nucleic acid is provided for use in a method of treating disease, e.g. a disease category as described herein. The treatment may involve modulating expression (either up or down) of a gene targeted by the PRC1-binding RNA, preferably upregulating gene expression. The inhibitory nucleic acid may be formulated as a sterile composition for parenteral administration. It is understood that any reference to uses of compounds throughout the description contemplates use of the compound in preparation of a pharmaceutical composition or medicament for use in the treatment of a disease. Thus, as one nonlimiting example, this aspect of the invention includes use of such inhibitory nucleic acids in the preparation of a medicament for use in the treatment of disease, wherein the treatment involves upregulating expression of a gene targeted by the PRC1-binding RNA.

[0010] Diseases, disorders or conditions that may be treated according to the invention include cardiovascular, metabolic, inflammatory, bone, neurological or neurodegenerative, pulmonary, hepatic, kidney, urogenital, bone, cancer, and/or protein deficiency disorders.

[0011] In a related aspect, the invention features a process of preparing an inhibitory nucleic acid that modulates gene expression, the process comprising the step of synthesizing an inhibitory nucleic acid of between 5 and 40 bases in length, or about 8 to 40, or about 5 to 50 bases in length, optionally single stranded, that specifically binds, or is complementary to, a motif as described herein within an RNA sequence that has been identified as binding to PRC1, optionally an RNA of any of Tables 1-3 of WO 2016/149455 or any one of SEQ ID NOs: 1 to 5893, or 5894 to 17415, or 17416 to 36368. This aspect of the invention may further comprise the step of identifying the RNA sequence as binding to PRC1, optionally through the dCLIP-seq method described herein.

[0012] In a further aspect of the present invention a process of preparing an inhibitory nucleic acid that specifically binds to an RNA that binds to Polycomb repressive complex 1 (PRC1) is provided, the process comprising the step of designing and/or synthesizing an inhibitory nucleic acid of between 5 and 40 bases in length, or about 8 to 40, or about 5 to 50 bases in length, optionally single stranded, that specifically binds to a motif within an RNA sequence that binds to PRC1, optionally an RNA of any of Tables 1-3 of WO 2016/149455 or any one of SEQ ID NOs: 1 to 5893, or 5894 to 17415, or 17416 to 36368.

[0013] In some embodiments prior to synthesizing the inhibitory nucleic acid the process further comprises identifying an RNA that binds to PRC1.

[0014] In some embodiments the RNA has been identified by a method involving identifying an RNA that binds to PRC1.

[0015] In some embodiments the inhibitory nucleic acid is at least 80% complementary to a contiguous sequence of between 5 and 40 bases, or about 8 to 40, or about 5 to 50 bases comprising said motif in said RNA sequence that binds to PRC1. In some embodiments the sequence of the designed and/or synthesized inhibitory nucleic acid is based on a said motif in an RNA sequence that binds to PRC1, or a portion thereof, said portion having a length of from 5 to 40 contiguous base pairs, or about 8 to 40 bases, or about 5 to 50 bases.

[0016] In some embodiments the sequence of the designed and/or synthesized inhibitory nucleic acid is based on a nucleic acid sequence that is complementary to said motif in an RNA sequence that binds to PRC1, or is complementary to a portion thereof, said portion having a length of from 5 to 40 contiguous base pairs, or about 8 to 40 base pairs, or about 5 to 50 base pairs.

[0017] The designed and/or synthesized inhibitory nucleic acid may be at least 80% complementary to (optionally one of at least 90%, 95%, 96%, 97%, 98%, 99% or 100% complementary to) the portion of the RNA sequence to which it binds or targets, or is intended to bind or target. In some embodiments it may contain 1, 2 or 3 base mismatches compared to the portion of the target RNA sequence or its complement respectively. In some embodiments it may have up to 3 mismatches over 15 bases, or up to 2 mismatches over 10 bases.

[0018] The inhibitory nucleic acid or portion of RNA sequence that binds to PRC1 may have a length of one of at least 8 to 40, or 10 to 50, or 5 to 50, or 5 to 40 bases, e.g., 5, 6, 7, 8, 9, 10, 11, 12, 13, 14, 15, 16, 17, 18, 19, 20, 21, 22, 23, 24, 25, 26, 27, 28, 29, 30, 31, 32, 33, 34, 35, 36, 37, 38, 39, 40, 41, 42, 43, 44, 45, 46, 47, 48, 49, or 50 bases. Where the inhibitory nucleic acid is based on an RNA motif sequence that binds to a PRC1, a nucleic acid sequence that is complementary to said RNA motif sequence that binds to PRC1 or a portion of such a sequence, it may be based on information about that sequence, e.g. sequence information available in written or electronic form, which may include sequence information contained in publicly available scientific publications or sequence databases.

[0019] In some embodiments, the isolated single stranded oligonucleotide is of 5 to 40 nucleotides in length and has a region of complementarity that is complementary with at least 5, 6, 7, 8, 9, or 10 contiguous nucleotides of a motif within the PRC1-binding RNA that inhibits expression of the target gene, e.g., as described in WO 2016/149455, wherein the oligonucleotide is complementary to and binds specifically within a motif in a PRC1-binding region of the PRC1-binding RNA and interferes with binding of PRC1 to the PRC1-binding region without inducing degradation of the PRC1-binding RNA (e.g., wherein the PRC1-binding region has a nucleotide sequence identified as a motif as described herein), and without interfering with binding of PRC2 to a PRC2-binding region of the RNA (as described in WO 2012/087983 or WO 2012/065143, wherein the PRC2-binding region has a nucleotide sequence protected from nucleases during an RNA immunoprecipitation procedure using an antibody directed against PRC2), optionally wherein the PRC1-binding RNA is transcribed from a sequence of the chromosomal locus of the target gene, and optionally wherein a decrease in recruitment of PRC1 to the target gene in the cell following delivery of the single stranded oligonucleotide to the cell, compared with an appropriate control cell to which the single stranded oligonucleotide has not been delivered, indicates effectiveness of the single stranded oligonucleotide.

[0020] Where the design and/or synthesis involves design and/or synthesis of a sequence that is complementary to a nucleic acid described by such sequence information the skilled person is readily able to determine the complementary sequence, e.g. through understanding of Watson-Crick base pairing rules which form part of the common general knowledge in the field.

[0021] In the methods described above the RNA that binds to PRC1 may be, or have been, identified, or obtained, by a method that involves identifying RNA that binds to PRC1, e.g., as described herein or in WO 2016/149455.

[0022] In one embodiment the method involves the dCLIP-Seq method described herein and in of WO 2016/149455.

[0023] In accordance with the above, in some embodiments the RNA that binds to PRC1 may be one that is known to bind PRC1, e.g. information about the sequence of the RNA and/or its ability to bind PRC1 is available to the public in written or electronic form allowing the design and/or synthesis of the inhibitory nucleic acid to be based on that information. As such, an RNA that binds to PRC1 may be selected from known sequence information and used to inform the design and/or synthesis of the inhibitory nucleic acid.

[0024] In other embodiments the RNA that binds to PRC1 may be identified as one that binds PRC1 as part of the method of design and/or synthesis.

[0025] In preferred embodiments design and/or synthesis of an inhibitory nucleic acid involves manufacture of a nucleic acid from starting materials by techniques known to those of skill in the art, where the synthesis may be based on a sequence of an RNA (or portion thereof) that has been selected as known to bind to Polycomb repressive complex 2.

[0026] Methods of design and/or synthesis of an inhibitory nucleic acid may involve one or more of the steps of:

[0027] Identifying and/or selecting a portion of an RNA sequence that binds to PRC1 (e.g., as shown in Tables 1-3 of WO 2016/149455 or as set forth in SEQ ID NOs:1 to 5893 (human), 5894 to 17415 (human), and 17416 to 36368 (mouse));

[0028] Designing a nucleic acid sequence having a desired degree of sequence identity or complementarity to a sequenc comprising a motif within an RNA sequence that binds to PRC1 or a portion thereof;

[0029] Synthesizing a nucleic acid to the designed sequence;

[0030] Mixing the synthesized nucleic acid with at least one pharmaceutically acceptable diluent, carrier or excipient to form a pharmaceutical composition or medicament.

[0031] Inhibitory nucleic acids so designed and/or synthesized may be useful in method of modulating gene expression as described herein.

[0032] As such, the process of preparing an inhibitory nucleic acid may be a process that is for use in the manufacture of a pharmaceutical composition or medicament for use in the treatment of disease, optionally wherein the treatment involves modulating expression of a gene targeted by the RNA binds to PRC1.

[0033] Methods for isolating RNA sequences that interact with a selected protein, e.g., with chromatin complexes, in a cell are further described in WO 2016/149455.

[0034] In yet another aspect, the invention features methods for increasing expression of a tumor suppressor in a mammal, e.g. human, in need thereof. The methods include administering to said mammal an inhibitory nucleic acid that specifically binds, or is complementary, to a sequence comprising a motif within a human PRC1-interacting RNA corresponding to a tumor suppressor locus of any of Tables 1-3 of WO 2016/149455or a human RNA corresponding to an imprinted gene of any of Tables 1-3 of WO 2016/149455 or as set forth in SEQ ID NOs:1 to 5893 (human), 5894 to 17415 (human), and 17416 to 36368 (mouse), or a related naturally occurring RNA that is othologous or at least 90%, (e.g., 91%, 92%, 93%, 94%, 95%, 96%, 97%, 98%%, or 100%) identical over at least 15 (e.g., at least 20, 21, 25, 30, 100) nucoleobases thereof, in an amount effective to increase expression of the tumor suppressor or growth suppressing gene. It is understood that one method of determining human orthologous RNA that corresponds to murine RNA is to identify a corresponding human sequence at least 90% identical (e.g., 91%, 92%, 93%, 94%, 95%, 96%, 97%, 98%, 99%, or 100% identical) to at least 15 nucleobases of the murine sequence (or at least 20, 21, 25, 30, 40, 50, 60, 70, 80, 90 or 100 nucleobases).

[0035] In an additional aspect, the invention provides methods for inhibiting or suppressing tumor growth in a mammal, e.g. human, with cancer, comprising administering to said mammal an inhibitory nucleic acid that specifically binds, or is complementary, to a sequence comorising a motif within a human PRC1-interacting RNA corresponding to a tumor suppressor locus of any of Tables 1-3 of WO 2016/149455, or a human RNA corresponding to an imprinted gene of any of Tables 1-3 of WO 2016/149455 or as set forth in SEQ ID NOs:1 to 5893 (human), 5894 to 17415 (human), and 17416 to 36368 (mouse), or a related naturally-occurring RNA that is orthologous or at least 90%, (e.g., 91%, 92%, 93%, 94%, 95%, 96%, 97%, 98%, 99% or 100%) identical over at least 15 (e.g., at least 20, 21, 25, 30, 50, 70, 100) nucleobases thereof, in an amount effective to suppress or inhibit tumor growth.

[0036] In another aspect, the invention features methods for treating a mammal, e.g., a human, with cancer comprising administering to said mammal an inhibitory nucleic acid that specifically binds, or is complementary, to a sequence comprising a motif within a human RNA corresponding to a tumor suppressor locus of any of Tables 1-3 of WO 2016/149455, or a human RNA corresponding to an imprinted gene of Tables 1-3 of WO 2016/149455, or as set forth in SEQ ID NOs:1 to 5893 (human), 5894 to 17415 (human), and 17416 to 36368 (mouse), or a related naturally occurring RNA that is orthologous or at least 90% (e.g.,91%, 92%, 93%, 94%, 95%, 96%, 97%, 98%, 99%, or 100%) identical over at least 15 (e.g., at least 20, 21, 25, 30, 50, 70, 100) nucleobases thereof, in a therapeutically effective amount.

[0037] Also provided herein are inhibitory nucleic acids that specifically bind, or are complementary to, a region of an RNA that is known to bind to Polycomb repressive complex 1 (PRC1) comprising a motif as described herein, wherein the sequence of the region is selected from the group consisting of SEQ ID NOs:1 to 5893 (human), 5894 to 17415 (human), and 17416 to 36368 (mouse), for use in the treatment of disease, wherein the treatment involves modulating expression of a gene targeted by the RNA, wherein the inhibitory nucleic acid is between 5 and 40 bases in length, and wherein the inhibitory nucleic acid is formulated as a sterile composition.

[0038] Further described herein are processs for preparing an inhibitory nucleic acid that specifically binds, or is complementary to, a sequence comprising a motif as described herein within an RNA that is known to bind to Polycomb repressive complex 1 (PRC1), selected from the group consisting of SEQ ID NOs:1 to 5893 (human), 5894 to 17415 (human), and 17416 to 36368 (mouse); the processes include the step of designing and/or synthesizing an inhibitory nucleic acid of between 5 and 40 bases in length, optionally single stranded, that specifically binds to a region of the RNA that binds PRC1.

[0039] In some embodiments, the sequence of the designed and/or synthesized inhibitory nucleic acid is a nucleic acid sequence that is complementary to said RNA sequence that binds to PRC1, or is complementary to a portion thereof, said portion having a length of from 5 to 40 contiguous base pairs.

[0040] In some embodiments, the inhibitory nucleic acid is for use in the manufacture of a pharmaceutical composition or medicament for use in the treatment of disease, optionally wherein the treatment involves modulating expression of a gene targeted by the RNA binds to PRC1.

[0041] In some embodiments, the modulation is increasing expression of a gene and the region of the RNA that binds PRC1 can be in intergenic space mapping to a noncoding RNA, antisense to the coding gene, or in the promoter, 3′UTR, 5′UTR, exons, and introns of a coding gene.

[0042] In some embodiments, the modulation is decreasing expression of a gene and the region of the RNA that binds PRC1 can be in intergenic space mapping to a noncoding RNA, antisense to the coding gene, or in the promoter, 3′UTR, 5′UTR, exons, and introns of a coding gene.

[0043] In some embodiments,the modulation is to influence gene expression by altering splicing of a gene and the region of the RNA that binds PRC1 can be in intergenic space mapping to a noncoding RNA, antisense to the coding gene, or in the promoter, 3′UTR, 5′UTR, exons, and introns of a coding gene.

[0044] Also provided herein are sterile compositions comprising an inhibitory nucleic acid that specifically binds, or is complementary to, a sequence comprising a motif as described herein within an RNA sequence of any one of SEQ ID NOs:1 to 5893 (human), 5894 to 17415 (human), and 17416 to 36368 (mouse) and is capable of modulating expression of a gene targeted by the RNA as set forth in Tables 1-3 of WO 2016/149455. In some embodiments, the composition is for parenteral administration. In some embodiments, the RNA sequence is in the 3′UTR of a gene, and the inhibitory nucleic acid is capable of upregulating or downregulating expression of a gene targeted by the RNA.

[0045] Also provided herein is an inhibitory nucleic acid for use in the treatment of disease, wherein said inhibitory nucleic acid specifically binds, or is complementary to, a sequence comprising a motif as described herein within an RNA sequence of any one of SEQ ID NOs:1 to 5893 (human) or 5894 to 17415 (human), and wherein the treatment involves modulating expression of a gene targeted by the RNA according to Tables 1-3 of WO 2016/149455.

[0046] The present disclosure also provides methods for modulating gene expression in a cell or a mammal comprising administering to the cell or the mammal an inhibitory nucleic acid that specifically binds, or is complementary to, a sequence comprising a motif as described herein within an RNA sequence of any one of SEQ ID NOs:1 to 5893 (human) or 5894 to 17415 (human) or 17416 to 36368 (mouse), in an amount effective for modulating expression of a gene targeted by the RNA according to Tables 1-3 of WO 2016/149455.

[0047] In addition, provided herein are inhibitory nucleic acids of about 5 to 50 bases in length that specifically bind, or are complementary to, at least 5, 6, 7, 8, 9 or 10 consecutive bases within a sequence comprising a motif as described herein within any of SEQ ID NOs:1 to 5893 (human) or 5894 to 17415 (human) or 17416 to 36368 (mouse), optionally for use in the treatment of disease, wherein the treatment involves modulating expression of a gene targeted by the RNA.

[0048] In addition, provided are methods for modulating expression of a gene comprising administering to a mammal an inhibitory nucleic acid as described herein in an amount effective for modulating expression of a gene targeted by the RNA as set forth in Tables 1-3 of WO 2016/149455.

[0049] In some embodiments, the modulation is upregulating gene expression, optionally wherein the gene targeted by the RNA is selected from the group set forth in Tables 1-3 of WO 2016/149455, and wherein the RNA sequence is listed in the same row as the gene.

[0050] In some embodiments, the inhibitory nucleic acid is 5 to 40 bases in length (optionally 12-30, 12-28, or 12-25 bases in length), and optionally the sequence that binds to the motif is centered in the nucleic acid.

[0051] In some embodiments, the inhibitory nucleic acid is 10 to 50 bases in length.

[0052] In some embodiments, the inhibitory nucleic acid comprises a base sequence at least 90% complementary to at least 10 bases of the RNA sequence.

[0053] In some embodiments, the inhibitory nucleic acid comprises a sequence of bases at least 80% or 90% complementary to, e.g., at least 5-30, 10-30, 15-30, 20-30, 25-30 or 5-40, 10-40, 15-40, 20-40, 25-40, or 30-40 bases of the RNA sequence.

[0054] In some embodiments, the inhibitory nucleic acid comprises a sequence of bases with up to 3 mismatches (e.g., up to 1, or up to 2 mismatches) in complementary base pairing over 10, 15, 20, 25 or 30 bases of the RNA sequence. In some embodiments, the mismatches are not in the motif-binding region

[0055] In some embodiments, the inhibitory nucleic acid comprises a sequence of bases at least 80% complementary to at least 10 bases of the RNA sequence.

[0056] In some embodiments,the inhibitory nucleic acid comprises a sequence of bases with up to 3 mismatches over 15 bases of the RNA sequence.

[0057] In some embodiments, the inhibitory nucleic acid is single stranded.

[0058] In some embodiments, the inhibitory nucleic acid is double stranded.

[0059] In some embodiments, the inhibitory nucleic acid comprises one or more modifications comprising: a modified sugar moiety, a modified internucleoside linkage, a modified nucleotide and/or combinations thereof.

[0060] In some embodiments, the inhibitory nucleic acid is an antisense oligonucleotide, LNA molecule, PNA molecule, ribozyme or siRNA.

[0061] In some embodiments, the inhibitory nucleic acid is double stranded and comprises an overhang (optionally 2-6 bases in length) at one or both termini.

[0062] In some embodiments, the inhibitory nucleic acid is selected from the group consisting of antisense oligonucleotides, ribozymes, external guide sequence (EGS) oligonucleotides, siRNA compounds, micro RNAs (miRNAs); small, temporal RNAs (stRNA), and single- or double-stranded RNA interference (RNAi) compounds.

[0063] In some embodiments, the RNAi compound is selected from the group consisting of short interfering RNA (siRNA); or a short, hairpin RNA (shRNA); small RNA-induced gene activation (RNAa); and small activating RNAs (saRNAs).

[0064] In some embodiments, the antisense oligonucleotide is selected from the group consisting of antisense RNAs, antisense DNAs, and chimeric antisense oligonucleotides.

[0065] In some embodiments, the modified internucleoside linkage comprises at least one of: alkylphosphonate, phosphorothioate, phosphorodithioate, alkylphosphonothioate, phosphoramidate, carbamate, carbonate, phosphate triester, acetamidate, carboxymethyl ester, or combinations thereof.

[0066] In some embodiments, the modified sugar moiety comprises a 2′-O-methoxyethyl modified sugar moiety, a 2′-methoxy modified sugar moiety, a 2′-O-alkyl modified sugar moiety, or a bicyclic sugar moiety. In some embodiments, the inhibitory nucleic acids include 2′-OMe, 2′-F, LNA, PNA, FANA, ENA or morpholino modifications.

[0067] Further provided are sterile compositions comprising an isolated nucleic acid as described herein.

[0068] Further, provided herein are methods of inducing expression of a target gene in a cell, the method comprising delivering to the cell a single stranded oligonucleotide of 5 to 40 nucleotides in length having a region of complementarity that is complementary with at least 5, 6, 7, 8, 9, or 10 contiguous nucleotides including a motif as described herein within a PRC1-binding RNA that inhibits expression of the target gene, wherein the oligonucleotide is complementary to and binds specifically to the PRC1-binding RNA, and wherein the PRC1-binding RNA is transcribed from a sequence of the chromosomal locus of the target gene.

[0069] In some embodiments, the RNA is a non-codingRNA.

[0070] In some embodiments, the methods include detecting expression of the PRC1-binding RNA in the cell, wherein expression of the PRC1-binding RNA in the cell indicates that the single stranded oligonucleotide is suitable for increasing expression of the target gene in the cell.

[0071] In some embodiments, the methods include detecting a change in expression of the target gene following delivery of the single stranded oligonucleotide to the cell, wherein an increase in expression of the target gene compared with an appropriate control cell indicates effectiveness of the single stranded oligonucleotide.

[0072] In some embodiments, the methods include detecting a change in recruitment of PRC1 to the target gene in the cell following delivery of the single stranded oligonucleotide to the cell, wherein a decrease in recruitment compared with an appropriate control cell indicates effectiveness of the single stranded oligonucleotide.

[0073] In some embodiments, the cell is in vitro.

[0074] In some embodiments, the cell is in vivo.

[0075] In some embodiments, at least one nucleotide of the oligonucleotide is a modified nucleotide.

[0076] In some embodiments, the PRC1-binding RNA is transcribed from the same strand as the target gene in a genomic region containing the target gene.

[0077] In some embodiments, the oligonucleotide has complementarity to a region of the PRC1-binding RNA comprising a motif as described herein and transcribed from a portion of the target gene corresponding to an exon.

[0078] In some embodiments, the oligonucleotide has complementarity to a region of the PRC1-binding RNA comprising a motif as described herein and transcribed from the same strand as the target gene within a chromosomal region within −2.0 kb to +0.001 kb of the transcription start site of the target gene.

[0079] In some embodiments, the oligonucleotide has complementarity to a region of the PRC1-binding RNA comprising a motif as described herein and transcribed from the opposite strand of the target gene within a chromosomal region within −0.5 to +0.1 kb of the transcription start site of the target gene.

[0080] In some embodiments, the oligonucleotide has complementarity to the PRC1-binding RNA in a region of the PRC1-binding RNA comprising a motif as described herein, that optionally forms a stem-loop structure.

[0081] In some embodiments, at least one nucleotide of the oligonucleotide is an RNA or DNA nucleotide.

[0082] In some embodiments, at least one nucleotide of the oligonucleotide is a ribonucleic acid analogue comprising a ribose ring having a bridge between its 2′-oxygen and 4′-carbon.

[0083] In some embodiments, the ribonucleic acid analogue comprises a methylene bridge between the 2′-oxygen and the 4′-carbon.

[0084] In some embodiments, at least one nucleotide of the oligonucleotide comprises a modified sugar moiety.

[0085] In some embodiments, the modified sugar moiety comprises a 2′-O-methoxyethyl modified sugar moiety, a 2′-methoxy modified sugar moiety, a 2′-O-alkyl modified sugar moiety, or a bicyclic sugar moiety.

[0086] In some embodiments, the oligonucleotide comprises at least one modified internucleoside linkage.

[0087] In some embodiments, the at least one modified internucleoside linkage is selected from phosphorothioate, phosphorodithioate, alkylphosphonothioate, phosphoramidate, carbamate, carbonate, phosphate triester, acetamidate, carboxymethyl ester, and combinations thereof.

[0088] In some embodiments, the oligonucleotide is configured such that hybridization of the single stranded oligonucleotide to the PRC1-binding RNA does not activate an RNAse H pathway in the cell.

[0089] In some embodiments, the oligonucleotide is configured such that hybridization of the single stranded oligonucleotide to the PRC1-binding RNA does not induce substantial cleavage or degradation of the PRC1-binding RNA in the cell.

[0090] In some embodiments, the oligonucleotide is configured such that hybridization of the single stranded oligonucleotide to the PRC1-binding RNA interferes with interaction of the RNA with PRC1 in the cell.

[0091] In some embodiments, the target gene is a protein-coding gene.

[0092] In some embodiments, the chromosomal locus of the target gene is an endogenous gene of an autosomal chromosome.

[0093] In some embodiments, the cell is a cell of a male subject.

[0094] In some embodiments, the oligonucleotide has complementarity to a region of the PRC1-binding RNA transcribed from a portion of the target gene corresponding to an intron-exon junction or an intron.

[0095] In some embodiments, the oligonucleotide has complementarity to a region of the PRC1-binding RNA transcribed from a portion of the target gene corresponding to a translation initiation region or a translation termination region.

[0096] In some embodiments, the oligonucleotide has complementarity to a region of the PRC1-binding RNA transcribed from a portion of the target gene corresponding to a promoter.

[0097] In some embodiments, the oligonucleotide has complementarity to a region of the PRC1-binding RNA transcribed from a portion of the target gene corresponding to a 5′-UTR.

[0098] In some embodiments, the oligonucleotide has complementarity to a region of the PRC1-binding RNA transcribed from a portion of the target gene corresponding to a 3′-UTR.

[0099] In some or any embodiments, the inhibitory nucleic acid is an oligomeric base compound or oligonucleotide mimetic that hybridizes to at least a portion of the target nucleic acid and modulates its function. In some or any embodiments, the inhibitory nucleic acid is single stranded or double stranded. A variety of exemplary inhibitory nucleic acids are known and described in the art. In some examples, the inhibitory nucleic acid is an antisense oligonucleotide, locked nucleic acid (LNA) molecule, peptide nucleic acid (PNA) molecule, ribozyme, siRNA, antagomirs, external guide sequence (EGS) oligonucleotide, microRNA (miRNA), small, temporal RNA (stRNA), or single- or double-stranded RNA interference (RNAi) compounds. It is understood that the term “LNA molecule” refers to a molecule that comprises at least one LNA modification; thus LNA molecules may have one or more locked nucleotides (conformationally constrained) and one or more non-locked nucleotides. It is also understood that the term “LNA” includes a nucleotide that comprises any constrained sugar that retains the desired properties of high affinity binding to complementary RNA, nuclease resistance, lack of immune stimulation, and rapid kinetics. Exemplary constrained sugars include those listed below. Similarly, it is understood that the term “PNA molecule” refers to a molecule that comprises at least one PNA modification and that such molecules may include unmodified nucleotides or internucleoside linkages.

[0100] In some or any embodiments, the inhibitory nucleic acid comprises at least one nucleotide and/or nucleoside modification (e.g., modified bases or with modified sugar moieties), modified internucleoside linkages, and/or combinations thereof. Thus, inhibitory nucleic acids can comprise natural as well as modified nucleosides and linkages. Examples of such chimeric inhibitory nucleic acids, including hybrids or gapmers, are described below.

[0101] In some embodiments, the inhibitory nucleic acid comprises one or more modifications comprising: a modified sugar moiety, and/or a modified internucleoside linkage, and/or a modified nucleotide and/or combinations thereof. In some embodiments, the modified internucleoside linkage comprises at least one of: alkylphosphonate, phosphorothioate, phosphorodithioate, alkylphosphonothioate, phosphoramidate, carbamate, carbonate, phosphate triester, acetamidate, carboxymethyl ester, or combinations thereof. In some embodiments, the modified sugar moiety comprises a 2′-O-methoxyethyl modified sugar moiety, a 2′-methoxy modified sugar moiety, a 2′-O-alkyl modified sugar moiety, or a bicyclic sugar moiety. Other examples of modifications include locked nucleic acid (LNA), peptide nucleic acid (PNA), arabinonucleic acid (ANA), optionally with 2′-F modification, 2′-fluoro-D-Arabinonucleic acid (FANA), phosphorodiamidate morpholino oligomer (PMO), ethylene-bridged nucleic acid (ENA), optionally with 2′-O,4′-C-ethylene bridge, and bicyclic nucleic acid (BNA). Yet other examples are described below and/or are known in the art.

[0102] In some embodiments, the inhibitory nucleic acid is 5-40 bases in length (e.g., 12-30, 12-28, 12-25). The inhibitory nucleic acid may also be 10-50, or 5-50 bases length. For example, the inhibitory nucleic acid may be one of any of 5, 6, 7, 8, 9, 10, 11, 12, 13, 14, 15, 16, 17, 18, 19, 20, 21, 22, 23, 24, 25, 26, 27, 28, 29, 30, 31, 32, 33, 34, 35, 36, 37, 38, 39, 40, 41, 42, 43, 44, 45, 46, 47, 48, 49, or 50 bases in length. In some embodiments, the inhibitory nucleic acid is double stranded and comprises an overhang (optionally 2-6 bases in length) at one or both termini. In other embodiments, the inhibitory nucleic acid is double stranded and blunt-ended. In some embodiments, the inhibitory nucleic acid comprises or consists of a sequence of bases at least 80% or 90% complementary to, e.g., at least 5, 10, 15, 20, 25 or 30 bases of, or up to 30 or 40 bases of, the target RNA, or comprises a sequence of bases with up to 3 mismatches (e.g., up to 1, or up to 2 mismatches) over 10, 15, 20, 25 or 30 bases of the target RNA.

[0103] Thus, the inhibitory nucleic acid can comprise or consist of a sequence of bases at least 80% complementary to at least 10 contiguous bases of the target RNA comprising a motif as described herein, or at least 80% complementary to at least 15, or 15-30, or 15-40 contiguous bases of the target RNA comprising a motif as described herein, or at least 80% complementary to at least 20, or 20-30, or 20-40 contiguous bases of the target RNA comprising a motif as described herein, or at least 80% complementary to at least 25, or 25-30, or 25-40 contiguous bases of the target RNA comprising a motif as described herein, or at least 80% complementary to at least 30, or 30-40 contiguous bases of the target RNA comprising a motif as described herein, or at least 80% complementary to at least 40 contiguous bases of the target RNA comprising a motif as described herein. Moreover, the inhibitory nucleic acid can comprise or consist of a sequence of bases at least 90% complementary to at least 10 contiguous bases of the target RNA comprising a motif as described herein, or at least 90%complementary to at least 15, or 15-30, or 15-40 contiguous bases of the target RNA comprising a motif as described herein, or at least 90% complementary to at least 20, or 20-30, or 20-40 contiguous bases of the target RNA comprising a motif as described herein, or at least 90% complementary to at least 25, or 25-30, or 25-40 contiguous bases of the target RNA comprising a motif as described herein, or at least 90% complementary to at least 30, or 30-40 contiguous bases of the target RNA comprising a motif as described herein, or at least 90% complementary to at least 40 contiguous bases of the target RNA comprising a motif as described herein. Similarly, the inhibitory nucleic acid can comprise or consist of a sequence of bases fully complementary to at least 5, 10, or 15 contiguous bases of the target RNA comprising a motif as described herein.

[0104] In some or any embodiments, the inhibitory nucleic acid is 5 to 40, or 8 to 40, or 10 to 50 bases in length (e.g., 12-30, 12-28, 12-25, 5-25, or 10-25, bases in length), and comprises a sequence of bases with up to 3 mismatches in complementary base pairing over 15 bases of , or up to 2 mismatches over 10 bases.

[0105] In an additional aspect, the invention provides methods for enhancing pluripotency of a stem cell. The methods include contacting the cell with an inhibitory nucleic acid that specifically binds, or is complementary, to a nucleic acid sequence that is at least about 90%, 91%, 92%, 93%, 94%, 95%, 96%, 97%, 98% or 99% homologous to a sequence comprising a motif as described herein within a PRC1-binding RNA, as referred to in Tables 1-3 of WO 2016/149455. PRC1-binding fragments of murine or orthologous RNAs, including human RNAs, are contemplated in the aforementioned method.

[0106] In a further aspect, the invention features methods for enhancing differentiation of a stem cell, the method comprising contacting the cell with an inhibitory nucleic acid that specifically binds, or is complementary, to a PRC1-binding RNA sequence as set forth in SEQ ID NOS. 17416 to 36368 [mouse Peaks] or 1 to 5893 [human Peaks] or 5894 to 17416 [human Peaks identified by LiftOver].

[0107] In some embodiments, the stem cell is an embryonic stem cell. In some embodiments, the stem cell is an iPS cell or an adult stem cell.

[0108] In an additional aspect, the invention provides sterile compositions including an inhibitory nucleic acid as described herein. In some embodiments, the inhibitory nucleic acid is selected from the group consisting of antisense oligonucleotides, ribozymes, external guide sequence (EGS) oligonucleotides, siRNA compounds, micro RNAs (miRNAs); small, temporal RNAs (stRNA), and single- or double-stranded RNA interference (RNAi) compounds. In some embodiments, the RNAi compound is selected from the group consisting of short interfering RNA (siRNA); or a short, hairpin RNA (shRNA); small RNA-induced gene activation (RNAa); and small activating RNAs (saRNAs).

[0109] In some embodiments, the antisense oligonucleotide is selected from the group consisting of antisense RNAs, antisense DNAs, chimeric antisense oligonucleotides, and antisense oligonucleotides.

[0110] In some embodiments, the inhibitory nucleic acid comprises one or more modifications comprising: a modified sugar moiety, a modified internucleoside linkage, a modified nucleotide and/or combinations thereof. In some embodiments, the modified internucleoside linkage comprises at least one of: alkylphosphonate, phosphorothioate, phosphorodithioate, alkylphosphonothioate, phosphoramidate, carbamate, carbonate, phosphate triester, acetamidate, carboxymethyl ester, or combinations thereof. In some embodiments, the modified sugar moiety comprises a 2′-O-methoxyethyl modified sugar moiety, a 2′-methoxy modified sugar moiety, a 2′-O-alkyl modified sugar moiety, or a bicyclic sugar moiety. Other examples of modifications include locked nucleic acid (LNA), peptide nucleic acid (PNA), arabinonucleic acid (ANA), optionally with 2′-F modification, 2′-fluoro-D-Arabinonucleic acid (FANA), phosphorodiamidate morpholino oligomer (PMO), ethylene-bridged nucleic acid (ENA), optionally with 2′-O,4′-C-ethylene bridge, and bicyclic nucleic acid (BNA). Yet other examples are described below and/or are known in the art.

[0111] Inhibitory nucleic acids that specifically bind to a sequence comprising a motif as described herein within any of the RNA peaks set forth in any one of SEQ ID NOs: 1 to 5893, 5894 to 17415, or 17416 to 36368, are also contemplated. In particular, the invention features uses of these inhibitory nucleic acids to upregulate expression of any of the genes set forth in Tables 1-3 of WO 2016/149455, for use in treating a disease, disorder, condition or association known in the art (whether in the “opposite strand” column or the “same strand”); upregulations of a set of genes grouped together in any one of the categories is contemplated. In some embodiments it is contemplated that expression may be increased by at least about 15-fold, 20-fold, 30-fold, 40-fold, 50-fold or 100-fold, or any range between any of the foregoing numbers. In other experiments, increased mRNA expression has been shown to correlate to increased protein expression.

[0112] Thus, in various aspects, the invention features inhibitory nucleic acids that specifically bind to motifs as described herien within any of the RNA sequences as set forth in SEQ ID NOs:1 to 5893 (human), 5894 to 17415 (human), and 17416 to 36368 (mouse) or of any of Tables 1-3 of WO 2016/149455, for use in modulating expression of a group of reference genes that fall within any one or more of the categories set forth in the tables, and for treating corresponding diseases, disorders or conditions.

[0113] In another aspect, the invention also features inhibitory nucleic acids that specifically bind, or are complementary, to motifs as described herien within any of the RNA sequences of SEQ ID NOS: 17416 to 36368 [mouse Peaks] or 1 to 5893 [human Peaks] or 5894 to 17416 [human Peaks identified by LiftOver], whether in the “opposite strand” column or the “same strand” column of Tables 1-3 of WO 2016/149455. In some embodiments, the inhibitory nucleic acid is provided for use in a method of modulating expression of a gene targeted by the PRC1-binding RNA (e.g., an intersecting or nearby gene, as set forth in any of Tables 1-4 of WO 2016/149455). Such methods may be carried out in vitro, ex vivo, or in vivo. In some embodiments, the inhibitory nucleic acid is provided for use in methods of treating disease, e.g. as described below. The treatments may involve modulating expression (either up or down) of a gene targeted by the PRC1-binding RNA, preferably upregulating gene expression. In some embodiments, the inhibitory nucleic acid is formulated as a sterile composition for parenteral administration. Thus, in one aspect the invention describes a group of inhibitory nucleic acids that specifically bind, or are complementary to, sequences comprising motifs as described herien within a group of RNA sequences, i.e., Peaks, in any one of Tables 1, 2, or 3 of WO 2016/149455. In particular, the invention features uses of such inhibitory nucleic acids to upregulate expression of any of the reference genes set forth in SEQ ID NOs:1 to 5893 (human), 5894 to 17415 (human), and 17416 to 36368 (mouse) or in Tables 1-3 of WO 2016/149455, for use in treating a disease, disorder, or condition.

[0114] It is understood that inhibitory nucleic acids of the invention may be complementary to, or specifically bind to, motifs within Peaks, or regions adjacent to (within 100, 200, 300, 400, or 500 nts of) Peaks, as shown in SEQ ID NOs:1 to 5893 (human), 5894 to 17415 (human), and 17416 to 36368 (mouse) or in Tables 1-3 of WO 2016/149455.

[0115] Also provided herein are methods for treating a subject with MECP2 Duplication Syndrome. The methods include administering a therapeutically effective amount of an inhibitory nucleic acid targeting a motif within a PRC1-binding region on Mecp2 RNA, e.g., an inhibitory nucleic acid targeting a motif within a sequence within the 3′UTR of Mecp2. In some embodiments, the inhibitory nucleic acid comprises a sequence shown herein, and/or does not comprise any of SEQ ID NOs:36399 to 36404.

[0116] Further provided herein are methods for treating a subject with systemic lupus erythematosus. The methods include administering a therapeutically effective amount of an inhibitory nucleic acid targeting a motif within a PRC1-binding region on IRAK1 RNA, e.g., an inhibitory nucleci acid targeting a sequence a motif within within the 3′UTR of IRAK1. In some embodiments, the inhibitory nucleic acid comprises a sequence shown herein, and/or does not comprise any of SEQ ID NOs:36396 to 36398.

[0117] In some embodiments, the inhibitory nucleic acid comprises at least one locked nucleotide.

[0118] Also provided herein are inhibitory nucleic acids targeting a motif within a PRC1-binding region on Mecp2 RNA, preferably wherein the PRC1 binding region comprises SEQ ID NO:5876 or 5877, and/or preferably an inhibitory nucleic acid targeting a sequence comprising a motif within the 3′UTR of Mecp2, for use in treating a subject with MECP2 Duplication Syndrome. In some embodiments, the inhibitory nucleic acid comprises a sequence shown herein, and/or does not comprise any of SEQ ID NOs:36399 to 36404.

[0119] In addition, provided herein are inhibitory nucleic acids targeting a motif within a PRC1-binding region on IRAK1 RNA, preferably wherein the PRC1 binding region comprises SEQ ID NO:5874 or 5875, and/or preferably an inhibitory nucleic acid targeting a sequence comprising a motif within the 3′UTR of IRAK1, for use in treating a subject with systemic lupus erythematosus. In some embodiments, the inhibitory nucleic acid comprises a sequence shown herein, and/or does not comprise any of SEQ ID NOs:36396 to 36398.

[0120] In some or any embodiments, the inhibitory nucleic acids are, e.g., about 5 to 40, about 8 to 40, or 10 to 50 bases, or 5 to 50 bases in length. In some embodiments, the inhibitory nucleic acid comprises or consists of a sequence of bases at least 80% or 90% complementary to, e.g., at least 5, 10, 15, 20, 25 or 30 bases of, or up to 30 or 40 bases of, the target RNA (e.g., any one of SEQ ID NOs: 1 to 36,368), or comprises a sequence of bases with up to 3 mismatches (e.g., up to 1, or up to 2 mismatches) over 10, 15, 20, 25 or 30 bases of the target RNA comprising a motif as described herein.

[0121] Thus, as noted above, the inhibitory nucleic acid can comprise or consist of a sequence of bases at least 80% complementary to at least 10, or 10-30 or 10-40 contiguous bases of the target RNA comprising a motif as described herein, or at least 80% complementary to at least 15, or 15-30, or 15-40 contiguous bases of the target RNA comprising a motif as described herein, or at least 80% complementary to at least 20, or 20-30, or 20-40 contiguous bases of the target RNA comprising a motif as described herein, or at least 80% complementary to at least 25, or 25-30, or 25-40 contiguous bases of the target RNA comprising a motif as described herein, or at least 80% complementary to at least 30, or 30-40 contiguous bases of the target RNA comprising a motif as described herein, or at least 80% complementary to at least 40 contiguous bases of the target RNA comprising a motif as described herein. Moreover, the inhibitory nucleic acid can comprise or consist of a sequence of bases at least 90% complementary to at least 5, or 5-30 or 5-40 or 8-40 contiguous bases of the target RNA comprising a motif as described herein, or at least 90% complementary to at least 10, or 10-30, or 10-40 contiguous bases of the target RNA comprising a motif as described herein, or at least 90%complementary to at least 15, or 15-30, or 15-40 contiguous bases of the target RNA comprising a motif as described herein, or at least 90% complementary to at least 20, or 20-30, or 20-40 contiguous bases of the target

[0122] RNA comprising a motif as described herein, or at least 90% complementary to at least 25, or 25-30, or 25-40 contiguous bases of the target RNA comprising a motif as described herein, or at least 90% complementary to at least 30, or 30-40 contiguous bases of the target RNA comprising a motif as described herein, or at least 90% complementary to at least 40 contiguous bases of the target RNA comprising a motif as described herein. Similarly, the inhibitory nucleic acid can comprise or consist of a sequence of bases fully complementary to at least 5, 10, or 15 contiguous bases of the target RNA comprising a motif as described herein. It is understood that some additional non-complementary bases may be included. It is understood that inhibitory nucleic acids that comprise such sequences of bases as described may also comprise other non-complementary bases. For example, an inhibitory nucleic acid can be 20 bases in total length but comprise a 15 base portion that is fully complementary to 15 bases of the target RNA comprising a motif as described herein. Similarly, an inhibitory nucleic acid can be 20 bases in total length but comprise a 15 base portion that is at least 80% complementary to 15 bases of the target RNA comprising a motif as described herein. Preferably the portion that is complementary to the motif sequence is 100% complementary.

[0123] Complementarity can also be referenced in terms of the number of mismatches in complementary base pairing, as noted above. Thus, the inhibitory nucleic acid can comprise or consist of a sequence of bases with up to 3 mismatches over 10 contiguous bases of the target RNA, or up to 3 mismatches over 15 contiguous bases of the target RNA, or up to 3 mismatches over 20 contiguous bases of the target RNA, or up to 3 mismatches over 25 contiguous bases of the target RNA, or up to 3 mismatches over 30 contiguous bases of the target RNA. Similarly, the inhibitory nucleic acid can comprise or consist of a sequence of bases with up to 2 mismatches over 10 contiguous bases of the target RNA, or up to 2 mismatches over 15 contiguous bases of the target RNA, or up to 2 mismatches over 20 contiguous bases of the target RNA, or up to 2 mismatches over 25 contiguous bases of the target RNA, or up to 2 mismatches over 30 contiguous bases of the target RNA. Similarly, the the inhibitory nucleic acid can comprise or consist of a sequence of bases with one mismatch over 10, 15, 20, 25 or 30 contiguous bases of the target RNA.

[0124] In some or any of the embodiments of inhibitory nucleic acids described herein (e.g. in the summary, detailed description, or examples of embodiments) or the processes for designing or synthesizing them, the inhibitory nucleic acids may optionally exclude (a) any LNA that disrupts binding of PRC2 to an RNA, e.g., as describe in WO 2012/087983 or WO 2012/065143; (b) any one or more of the specific inhibitory nucleic acids made or actually disclosed (i.e. specific chemistry, single or double-stranded, specific modifications, and specific base sequence), set forth in WO 2012/065143 or WO 2012/087983; and/or the general base sequence of any one or more of the inhibitory nucleic acids of (b); and/or (c) the group of inhibitory nucleic acids that specifically bind or are complementary to the same specific portion of RNA (a stretch of contiguous bases) as any one or more of the inhibitory nucleic acids of (a); as disclosed in any one or more of the following publications: as targeting ANRIL RNA (as described in Yap et al., Mol Cell. 2010 Jun. 11; 38(5):662-74) HOTAIR RNA (Rinn et al., 2007), Tsix, RepA, or Xist RNAs ((Zhao et al., 2008) [SEQ ID NOs: 936166-936170 of WO 2012/087983], or (Sarma et al., 2010) [SEQ ID NOs: 936177-936186 of WO 2012/087983] or (Zhao et al., 2010) [SEQ ID NOs: 936187-936188 of WO 2012/087983] or (Prasnath et al., 2005) [SEQ ID NOs: 936173-936176 of WO 2012/087983] or (Shamovsky et al., 2006) [SEQ ID NO: 936172 of WO 2012/087983] or (Mariner et al., 2008) [SEQ ID NO: 936171 of WO 2012/087983] or (Sunwoo et al., 2008) or (Bernard et al., 2010) [SEQ ID NO: 936189 of WO 2012/087983]; or as targeting short RNAs of 50-200 nt that are identified as candidate PRC2 regulators (Kanhere et al., 2010); or (Kuwabara et al., US 2005/0226848) [SEQ ID NOs: 936190-936191 of WO 2012/087983] or (Li et al., US 2010/0210707) [SEQ ID NOs: 936192-936227 of WO 2012/087983] or (Corey et al., U.S. Pat. No. 7,709,456) [SEQ ID NOs: 936228-936245] or (Mattick et al., WO 2009/124341), or (Corey et al., US 2010/0273863) [SEQ ID NOs: 936246-936265 of WO 2012/087983], or (Wahlstedt et al., US 2009/0258925) [SEQ ID NOs: 935060-935126 of WO 2012/087983], or BACE: US 2009/0258925 [SEQ ID NOs: 935060-935126 of WO 2012/087983]; ApoA1: US 2010/0105760/EP235283 [SEQ ID NOs: 935127-935299 of WO 2012/087983], P73, p53, PTEN, WO 2010/065787 A2/EP2370582 [SEQ ID NOs: 935300-935345 of WO 2012/087983]; SIRT1: WO 2010/065662 A2/EP09831068 [SEQ ID NOs: : 935346-935392 of WO 2012/087983]; VEGF: WO 2010/065671 A2/EP2370581 [SEQ ID NOs: 935393-935403 of WO 2012/087983]; EPO: WO 2010/065792 A2/EP09831152 [SEQ ID NOs: 935404-935412 of WO 2012/087983]; BDNF: WO2010/093904 [SEQ ID NOs: 935413-935423 of WO 2012/087983], DLK1: WO 2010/107740 [SEQ ID NOs: 935424-935430 of WO 2012/087983]; NRF2/NFE2L2: WO 2010/107733 [SEQ ID NOs: 935431-935438 of WO 2012/087983]; GDNF: WO 2010/093906 [SEQ ID NOs: 935439-935476 of WO 2012/087983]; SOX2, KLF4, Oct3A/B, “reprogramming factors: WO 2010/135329 [SEQ ID NOs: 935477-935493 of WO 2012/087983]; Dystrophin: WO 2010/129861 [SEQ ID NOs: 935494-935525 of WO 2012/087983]; ABCA1, LCAT, LRP1, ApoE, LDLR, ApoA1: WO 2010/129799 [SEQ ID NOs: 935526-935804 of WO 2012/087983]; HgF: WO 2010/127195 [SEQ ID NOs: 935805-935809 of WO 2012/087983]; TTP/Zfp36: WO 2010/129746[SEQ ID NOs: 935810-935824 of WO 2012/087983]; TFE3, IRS2: WO 2010/135695 [SEQ ID NOs: 935825-935839 of WO 2012/087983]; RIG1, MDA5, IFNA1: WO 2010/138806 [SEQ ID NOs: 935840-935878 of WO 2012/087983]; PON1: WO 2010/148065 [SEQ ID NOs: 935879-935885 of WO 2012/087983]; Collagen: WO/2010/148050 [SEQ ID NOs: 935886-935918 of WO 2012/087983]; Dyrk1A, Dscr1, “Down Syndrome Gene”: WO/2010/151674 [SEQ ID NOs: 935919-935942 of WO 2012/087983]; TNFR2: WO/2010/151671 [SEQ ID NOs: 935943-935951 of WO 2012/087983]; Insulin: WO/2011/017516 [SEQ ID NOs: 935952-935963 of WO 2012/087983]; ADIPOQ: WO/2011/019815 [SEQ ID NOs: 935964-935992 of WO 2012/087983]; CHIP: WO/2011/022606 [SEQ ID NOs: 935993-936004 of WO 2012/087983]; ABCB1: WO/2011/025862 [SEQ ID NOs: 936005-936014 of WO 2012/087983]; NEUROD1, EUROD1, HNF4A, MAFA, PDX, KX6, “Pancreatic development gene”: WO/2011/085066 [SEQ ID NOs: 936015-936054 of WO 2012/087983]; MBTPS1: WO/2011/084455 [SEQ ID NOs: 936055-936059 of WO 2012/087983]; SHBG: WO/2011/085347 [SEQ ID NOs: 936060-936075 of WO 2012/087983]; IRF8: WO/2011/082409 [SEQ ID NOs: 936076-936080 of WO 2012/087983]; UCP2: WO/2011/079263 [SEQ ID NOs: 936081-936093 of WO 2012/087983]; HGF: WO/2011/079261 [SEQ ID NOs: 936094-936104 of WO 2012/087983]; GH: WO/2011/038205 [SEQ ID NOs: 936105-936110 of WO 2012/087983]; IQGAP: WO/2011/031482 [SEQ ID NOs: 936111-936116 of WO 2012/087983]; NRF1: WO/2011/090740 [SEQ ID NOs: 936117-936123 of WO 2012/087983]; P63: WO/2011/090741 [SEQ ID NOs: 936124-936128 of WO 2012/087983]; RNAseH1: WO/2011/091390 [SEQ ID NOs: 936129-936140 of WO 2012/087983]; ALOX12B: WO/2011/097582 [SEQ ID NOs: 936141-936146 of WO 2012/087983]; PYCR1: WO/2011/103528 [SEQ ID NOs: 936147-936151 of WO 2012/087983]; CSF3: WO/2011/123745 [SEQ ID NOs: 936152-936157 of WO 2012/087983]; FGF21: WO/2011/127337 [SEQ ID NOs: 936158-936165 of WO 2012/087983]; SIRTUIN (SIRT): WO2011/139387 [SEQ ID NOs: 936266-936369 and 936408-936425 of WO 2012/087983]; PAR4: WO2011/143640 [SEQ ID NOs: 936370-936376 and 936426 of WO 2012/087983]; LHX2: WO2011/146675 [SEQ ID NOs: 936377-936388 and 936427-936429 of WO 2012/087983]; BCL2L11: WO2011/146674 [SEQ ID NO: 936389-936398 and 936430-936431 of WO 2012/087983]; MSRA: WO2011/150007 [SEQ ID NOs: 936399-936405 and 936432 of WO 2012/087983]; ATOH1: WO2011/150005 [SEQ ID NOs: 936406-936407 and 936433 of WO 2012/087983] of which each of the foregoing is incorporated by reference in its entirety herein. In some or any of the embodiments, optionally excluded from the invention are of inhibitory nucleic acids that specifically bind to, or are complementary to, any one or more of the following regions: Nucleotides 1-932 of SEQ ID NO: 935128 of WO 2012/087983; Nucleotides 1-1675 of SEQ ID NO: 935306 of WO 2012/087983; Nucleotides 1-518 of SEQ ID NO: 935307 of WO 2012/087983; Nucleotides 1-759 of SEQ ID NO: 935308 of WO 2012/087983; Nucleotides 1-25892 of SEQ ID NO: 935309 of WO 2012/087983; Nucleotides 1-279 of SEQ ID NO: 935310 of WO 2012/087983; Nucleotides 1-1982 of SEQ ID NO: 935311 of WO 2012/087983; Nucleotides 1-789 of SEQ ID NO: 935312 of WO 2012/087983; Nucleotides 1-467 of SEQ ID NO: 935313 of WO 2012/087983; Nucleotides 1-1028 of SEQ ID NO: 935347 of WO 2012/087983; Nucleotides 1-429 of SEQ ID NO: 935348 of WO 2012/087983; Nucleotides 1-156 of SEQ ID NO: 935349 of WO 2012/087983; Nucleotides 1-593 of SEQ ID NO:935350 of WO 2012/087983; Nucleotides 1-643 of SEQ ID NO: 935395 of WO 2012/087983; Nucleotides 1-513 of SEQ ID NO: 935396 of WO 2012/087983; Nucleotides 1-156 of SEQ ID NO: 935406 of WO 2012/087983; Nucleotides 1-3175 of SEQ ID NO: 935414 of WO 2012/087983; Nucleotides 1-1347 of SEQ ID NO: 935426 of WO 2012/087983; Nucleotides 1-5808 of SEQ ID NO: 935433 of WO 2012/087983; Nucleotides 1-237 of SEQ ID NO: 935440 of WO 2012/087983; Nucleotides 1-1246 of SEQ ID NO: 935441 of WO 2012/087983; Nucleotides 1-684 of SEQ ID NO: 935442 of WO 2012/087983; Nucleotides 1-400 of SEQ ID NO: 935473 of WO 2012/087983; Nucleotides 1-619 of SEQ ID NO: 935474 of WO 2012/087983;Nucleotides 1-813 of SEQ ID NO: 935475 of WO 2012/087983; Nucleotides 1-993 of SEQ ID NO: 935480 of WO 2012/087983; Nucleotides 1-401 of SEQ ID NO: 935480 of WO 2012/087983; Nucleotides 1-493 of SEQ ID NO: 935481 of WO 2012/087983; Nucleotides 1-418 of SEQ ID NO: 935482 of WO 2012/087983; Nucleotides 1-378 of SEQ ID NO: 935496 of WO 2012/087983; Nucleotides 1-294 of SEQ ID NO: 935497 of WO 2012/087983; Nucleotides 1-686 of SEQ ID NO: 935498 of WO 2012/087983; Nucleotides 1-480 of SEQ ID NO: 935499 of WO 2012/087983; Nucleotides 1-501 of SEQ ID NO: 935500 of WO 2012/087983; Nucleotides 1-1299 of SEQ ID NO: 935533 of WO 2012/087983; Nucleotides 1-918 of SEQ ID NO: 935534 of WO 2012/087983; Nucleotides 1-1550 of SEQ ID NO: 935535 of WO 2012/087983; Nucleotides 1-329 of SEQ ID NO: 935536 of WO 2012/087983; Nucleotides 1-1826 of SEQ ID NO: 935537 of WO 2012/087983; Nucleotides 1-536 of SEQ ID NO: 935538 of WO 2012/087983; Nucleotides 1-551 of SEQ ID NO: 935539 of WO 2012/087983; Nucleotides 1-672 of SEQ ID NO: 935540 of WO 2012/087983; Nucleotides 1-616 of SEQ ID NO: 935541 of WO 2012/087983; Nucleotides 1-471 of SEQ ID NO: 935542 of WO 2012/087983; Nucleotides 1-707 of SEQ ID NO: 935543 of WO 2012/087983; Nucleotides 1-741 of SEQ ID NO: 935544 of WO 2012/087983; Nucleotides 1-346 of SEQ ID NO: 935545 of WO 2012/087983; Nucleotides 1-867 of SEQ ID NO: 935546 of WO 2012/087983; Nucleotides 1-563 of SEQ ID NO: 935547 of WO 2012/087983; Nucleotides 1-970 of SEQ ID NO: 935812 of WO 2012/087983; Nucleotides 1-1117 of SEQ ID NO: 935913 of WO 2012/087983; Nucleotides 1-297 of SEQ ID NO: 935814 of WO 2012/087983; Nucleotides 1-497 of SEQ ID NO: 935827 of WO 2012/087983; Nucleotides 1-1267 of SEQ ID NO: 935843 of WO 2012/087983; Nucleotides 1-586 of SEQ ID NO: 935844 of WO 2012/087983; Nucleotides 1-741 of SEQ ID NO: 935845 of WO 2012/087983; Nucleotides 1-251 of SEQ ID NO: 935846 of WO 2012/087983; Nucleotides 1-681 of SEQ ID NO: 935847 of WO 2012/087983; Nucleotides 1-580 of SEQ ID NO: 935848 of WO 2012/087983; Nucleotides 1-534 of SEQ ID NO: 935880 of WO 2012/087983; Nucleotides 1-387 of SEQ ID NO: 935889 of WO 2012/087983; Nucleotides 1-561 of SEQ ID NO: 935890 of WO 2012/087983; Nucleotides 1-335 of SEQ ID NO: 935891 of WO 2012/087983; Nucleotides 1-613 of SEQ ID NO: 935892 of WO 2012/087983; Nucleotides 1-177 of SEQ ID NO: 935893 of WO 2012/087983; Nucleotides 1-285 of SEQ ID NO: 935894 of WO 2012/087983; Nucleotides 1-3814 of SEQ ID NO: 935921 of WO 2012/087983; Nucleotides 1-633 of SEQ ID NO: 935922 of WO 2012/087983; Nucleotides 1-497 of SEQ ID NO: 935923 Nucleotides 1-545 of SEQ ID NO: 935924 of WO 2012/087983; Nucleotides 1-413 of SEQ ID NO: 935950 of WO 2012/087983; Nucleotides 1-413 of SEQ ID NO: 935951 of WO 2012/087983; Nucleotides 1-334 of SEQ ID NO: 935962 of WO 2012/087983; Nucleotides 1-582 of SEQ ID NO: 935963 of WO 2012/087983; Nucleotides 1-416 of SEQ ID NO: 935964 of WO 2012/087983; Nucleotides 1-3591 of SEQ ID NO: 935990 of WO 2012/087983; Nucleotides 1-875 of SEQ ID NO: 935991 of WO 2012/087983; Nucleotides 1-194 of SEQ ID NO: 935992 of WO 2012/087983; Nucleotides 1-2074 of SEQ ID NO: 936003 of WO 2012/087983; Nucleotides 1-1237 of SEQ ID NO: 936004 of WO 2012/087983; Nucleotides 1-4050 of SEQ ID NO: 936013 of WO 2012/087983; Nucleotides 1-1334 of SEQ ID NO: 936014 of WO 2012/087983; Nucleotides 1-1235 of SEQ ID NO: 936048 of WO 2012/087983; Nucleotides 1-17,964 of SEQ ID NO: 936049 of WO 2012/087983; Nucleotides 1-50,003 of SEQ ID NO: 936050 of WO 2012/087983; Nucleotides 1-486 of SEQ ID NO: 936051 of WO 2012/087983; Nucleotides 1-494 of SEQ ID NO: 936052 of WO 2012/087983; Nucleotides 1-1992 of SEQ ID NO: 936053 of WO 2012/087983; Nucleotides 1-1767 of SEQ ID NO: 936054 of WO 2012/087983; Nucleotides 1-1240 of SEQ ID NO: 936059 of WO 2012/087983; Nucleotides 1-3016 of SEQ ID NO: 936074 of WO 2012/087983; Nucleotides 1-1609 of SEQ ID NO: 936075 of WO 2012/087983; Nucleotides 1-312 of SEQ ID NO: 936080 of WO 2012/087983; Nucleotides 1-243 of SEQ ID NO: 936092 of WO 2012/087983; Nucleotides 1-802 of SEQ ID NO: 936093 of WO 2012/087983; Nucleotides 1-514 of SEQ ID NO: 936102 of WO 2012/087983; Nucleotides 1-936 of SEQ ID NO: 936103 of WO 2012/087983; Nucleotides 1-1075 of SEQ ID NO: 936104 of WO 2012/087983; Nucleotides 1-823 of SEQ ID NO: 936110 of WO 2012/087983; Nucleotides 1-979 of SEQ ID NO: 936116 of WO 2012/087983; Nucleotides 1-979 of SEQ ID NO: 936123 of WO 2012/087983; Nucleotides 1-288 of SEQ ID NO: 936128 of WO 2012/087983; Nucleotides 1-437 of SEQ ID NO: 936137 of WO 2012/087983; Nucleotides 1-278 of SEQ ID NO: 936138 of WO 2012/087983; Nucleotides 1-436 of SEQ ID NO: 936139 of WO 2012/087983; Nucleotides 1-1140 of SEQ ID NO: 936140 of WO 2012/087983; Nucleotides 1-2082 of SEQ ID NO: 936146 of WO 2012/087983; Nucleotides 1-380 of SEQ ID NO: 936151 of WO 2012/087983; Nucleotides 1-742 of SEQ ID NO: 936157 of WO 2012/087983; Nucleotides 1-4246 of SEQ ID NO: 936165 of WO 2012/087983; Nucleotides 1-1028 of SEQ ID NO: 936408 of WO 2012/087983; Nucleotides 1-429 of SEQ ID NO: 936409 of WO 2012/087983; Nucleotides 1-508 of SEQ ID NO: 936410 of WO 2012/087983; Nucleotides 1-593 of SEQ ID NO: 936411 of WO 2012/087983; Nucleotides 1-373 of SEQ ID NO: 936412 of WO 2012/087983; Nucleotides 1-1713 of SEQ ID NO: 936413 of WO 2012/087983; Nucleotides 1-660 of SEQ ID NO:936414 of WO 2012/087983; Nucleotides 1-589 of SEQ ID NO: 936415 of WO 2012/087983; Nucleotides 1-726 of SEQ ID NO: 936416 of WO 2012/087983; Nucletides 1-320 of SEQ ID NO: 936417 of WO 2012/087983; Nucletides 1-616 of SEQ ID NO: 936418 of WO 2012/087983; Nucletides 1-492 of SEQ ID NO: 936419 to of WO 2012/087983; Nucletides 1-428 of SEQ ID NO: 936420 of WO 2012/087983; Nucletides 1-4041 of SEQ ID NO: 936421 of WO 2012/087983; Nucletides 1-705 of SEQ ID NO: 936422 of WO 2012/087983; Nucletides 1-2714 of SEQ ID NO: 936423 of WO 2012/087983; Nucletides 1-1757 of SEQ ID NO: 936424 of WO 2012/087983; Nucletides 1-3647 of SEQ ID NO: 936425 of WO 2012/087983; Nucleotides 1-354 of SEQ ID NO: 936426 of WO 2012/087983; Nucleotides 1-2145 of SEQ ID NO: 936427, Nucleotides 1-606 of SEQ ID NO: 936428 of WO 2012/087983; Nucleotides 1-480 of SEQ ID NO: 936429 of WO 2012/087983; Nucleotides 1-3026 of SEQ ID NO: 936430 of WO 2012/087983; Nucleotides 1-1512 of SEQ ID NO: 936431 of WO 2012/087983; Nucleotides 1-3774 of SEQ ID NO: 936432 of WO 2012/087983; Nucleotides 1-589 of SEQ ID NO: 936433.

[0125] In some of the embodiments of inhibitory nucleic acids described herein, or processes for designing or synthesizing them, the inhibitory nucleic acids will upregulate gene expression and may specifically bind or specifically hybridize or be complementary to a sequence comprising a motif as described herien within the PRC1-binding RNA that is transcribed from the same strand as a protein coding reference gene. The inhibitory nucleic acid may bind to a region of the PRC1-binding RNA, that originates within or overlaps an intron, exon, intron-exon junction, 5′ UTR, 3′ UTR, a translation initiation region, or a translation termination region of a protein-coding sense-strand of a reference gene (refGene).

[0126] In some or any of the embodiments of inhibitory nucleic acids described herein, or processes for designing or syntheisizing them, the inhibitory nucleic acids will upregulate gene expression and may specifically bind or specifically hybridize or be complementary to a sequence comprising a motif as described herien within a PRC1 binding RNA that transcribed from the opposite strand (the antisense-strand) of a protein-coding reference gene.

[0127] The inhibitory nucleic acids described herein may be modified, e.g. comprise a modified sugar moiety, a modified internucleoside linkage, a modified nucleotide and/or combinations thereof. In addition, the inhibitory nucleic acids can exhibit one or more of the following properties: do not induce substantial cleavage or degradation of the target RNA; do not cause substantially complete cleavage or degradation of the target RNA; do not activate the RNAse H pathway; do not activate RISC; do not recruit any Argonaute family protein; are not cleaved by Dicer; do not mediate alternative splicing; are not immune stimulatory; are nuclease resistant; have improved cell uptake compared to unmodified oligonucleotides; are not toxic to cells or mammals; may have improved endosomal exit; do interfere with interaction of ncRNA with PRC1, preferably the Ezh2 subunit but optionally the Suz12, Eed, RbAp46/48 subunits or accessory factors such as Jarid2; do decrease histone H3-lysine27 methylation and/or do upregulate gene expression.

[0128] In some or any of the embodiments of inhibitory nucleic acids described herein, or processes for designing or synthesizing them, the inhibitory nucleic acids may optionally exclude those that bind DNA of a promoter region, as described in Kuwabara et al., US 2005/0226848 or Li et al., US 2010/0210707 or Corey et al., U.S. Pat. No. 7,709,456 or Mattick et al., WO 2009/124341, or those that bind DNA of a 3′ UTR region, as described in Corey et al., US 2010/0273863.

[0129] Inhibitory nucleic acids that are designed to interact with RNA to modulate gene expression are a distinct subset of base sequences from those that are designed to bind a DNA target (e.g., are complementary to the underlying genomic DNA sequence from which the RNA is transcribed).

[0130] This application incorporates by reference the entire disclosures of U.S. provisional No. 61/425,174 filed on Dec. 20, 2010, and 61/512,754 filed on Jul. 28, 2011, and International Patent Appliation Nos. PCT/US2011/060493, filed Nov. 12, 2011, and PCT/US2011/065939, filed on Dec. 19, 2011.

[0131] In some embodiments, the motif as described herein is a motif as shown in FIG. 2B, FIG. 7D, and/or Table 1.

[0132] Unless otherwise defined, all technical and scientific terms used herein have the same meaning as commonly understood by one of ordinary skill in the art to which this invention belongs. Methods and materials are described herein for use in the present invention; other, suitable methods and materials known in the art can also be used. The materials, methods, and examples are illustrative only and not intended to be limiting. All publications, patent applications, patents, sequences, database entries, and other references mentioned herein are incorporated by reference in their entirety. In case of conflict, the present specification, including definitions, will control.

[0133] Other features and advantages of the invention will be apparent from the following detailed description and figures, and from the claims.

### DESCRIPTION OF DRAWINGS

[0134] The patent or application file contains at least one drawing executed in color. Copies of this patent or patent application publication with color drawing(s) will be provided by the Office upon request and payment of the necessary fee.

[0135] FIGS. 1A-F. Denaturing CLIP of CBX7 in ES cells. See also FIG. 8-13.

[0136] (Panel A) Schematic workflow for dCLIP assay.

[0137] (Panel B) Representative dCLIP experiment. Left panel, autoradiography of dCLIP experiment. Right panel, Western blot with anti-CBX7 antibody for streptavidin pull-down samples. Lanes which contained input samples have been omitted for clarity. Red arrows, Biotagged-CBX7 signal. 3E and 6F are two clonal cell lines expressing physiological levels of Biotagged-CBX7. 3E and 6F are used as biological replicates for CBX7 dCLIP-seq libraries.

[0138] (Panel C) Representative CBX7 dCLIP and ChIP profiles for selected genes. DHS, DNAseI-hypersensitive sites from Vierstra et al (Vierstra et al., 2014). Orange boxes, LNA ASO cocktails. Red stars, primer pairs for ChIP-qPCR. Green hexagons, primer pairs for FAIRE-qPCR.

[0139] (Panel D) Strand-specific enriched peaks (called by “PeakRanger”) from three individual CLIP libraries were pooled and overlapped peaks were merged into longer regions in a strand-specific manner. Length distribution frequency of the enriched CLIP peaks, as well as mean, median, and standard deviation were calculated.

[0140] (Panel E) Comparison of metagene profiles for CBX7 dCLIP-seq peaks and CBX7 ChIP-seq peaks. TSS, transcriptional start site. TTS, transcriptional termination site.

[0141] (Panel F) Correlation between gene expression levels and CLIP signal. Black, expressed RefSeq genes with reproducible dCLIP signal. Green, genes with a highest CLIP signals. Red, expressed genes with no reproducible CLIP signals.

[0142] FIGS. 2A-D. Identification and characterization of binding motifs for CBX7.

[0143] (Panel A) Bioinformatics pipeline: Schematic workflow of search algorithm for CBX7 biding motifs.

[0144] (Panel B) Families of binding motifs identified for CBX7 dCLIP. Groups of motifs arranged into families according to similarity.

[0145] (Panel C) Abundance of motif families across different transcript features.

[0146] (Panel D) Box plot for FAM-occupancy ratios between number of CBX7 binding sites predicted by motif analysis and confirmed by a dCLIP data to a total number of putative binding sites predicted by motif analysis. Occupancy ratio of 1 indicates that all putative binding sites in a specific gene's genomic feature were validated as CBX7-binding sites based on CLIP-seq analysis. Black line depicts median. CDs, coding DNA sequences (coding exons).

[0147] FIGS. 3A-D. Spatial arrangement of binding motifs on target transcripts

[0148] (Panel A) “Nearest neighbor” analysis for motif families. Note the strong tendency for FAM1 motifs to congregate next to each other.

[0149] (Panel B) Distance distribution between motif pairs. While certain motif pairs such as FAM3-FAM3 and FAM4-FAM4 occurred in a very close proximity, other motif pairs such as FAM4-FAM2 exhibited much broader spectra of inter-motif distances.

[0150] (Panel C) Histogram plotting the number of CBX7 footprints (dCLIP fibers) with indicated adjacent FAM motifs in the same footprint. Note a tendency of motifs to congregate.

[0151] (Panel D) The FAM occupancy ratio on CBX7 footprints with a single FAM (upper graph) versus those with clustered FAMs (lower graph). Congregation of motifs in the 3′UTR regions is positively correlated with higher occupancy ratios, suggesting the possibility of cooperative binding.

[0152] FIGS. 4A-B. Secondary structure probing and relationship of CBX7 motif to known motifs. See also FIG. 14.

[0153] (Panel A) CBX7 binding motifs bear a significant similarity to the binding motifs of known RNA binding proteins. hPDI motifs were adopted from Xie et al (Xie et al., 2010). RNAcompete motifs were adopted from Ray et al (Ray et al., 2013).

[0154] (Panel B) Effect of RNA secondary structure probed in vivo and in vitro on CBX7 RNA binding. IcSHAPE profiles centered on the genomic sequences predicted as carrying CBX7 binding motifs. IcSHAPE analysis was adopted from Spitale et al (Spitale et al., 2015). Purified RNA molecules were subjected to treatment with icSHAPE reagent in vitro or isolated from cells exposed to icSHAPE reagent in cell culture (in vivo). Extent of RNA folding in particular region is determined by its accessibility to modification by icSHAPE reagent with higher icSHAPE signal representing more open structure. RealFAM—depicting sequences predicted by motif analysis and confirmed as actual CBX7 binding sites by dCLIP. PredictedFAM—depicting sequences predicted by motif analysis but lacking a dCLIP signal. Note that despite a marked similarity of the curves between binding and non-binding FAM sequences, average icSHAPE signal in actual binding sequences is significantly higher than in non-binding FAM sequences, reflecting more open overall structures.

[0155] FIGS. 5A-G. Validation of CBX7 interactions with transcripts identified by dCLIP

[0156] (Panel A) Validation of CBX7 dCLIP data for selected transcripts by nRIP-qPCR. Average fold-enrichment over IgG control is plotted, with standard devations (error bars). U1 small nuclear RNA, negative control.

[0157] (Panel B) RNA-EMSAs with purified CBX7 (5.6 μM) and in vitro transcribed RNAs demonstrate direct RNA-protein interactions. Concentrations of RNA: 26.5 nM for Dcaf12l1, 62 nM for Dusp9, 37.9 nM for Calm2. Green arrows, unbound RNA probes. Red asterisks, bound and shifted RNA-protein complexes. Blue arrows, LNA-shifted probes. Red arrowheads, supershifted complexes after gene-specific LNA addition.

[0158] (Panel C) Representative EMSA showing titration of CBX7 protein against fixed concentration (40 nM) of the 3′UTR fragment of Dcaf12l1. Red arrows, unbound probe. Black arrows, shifted CBX7-RNA complexes of different mobilities.

[0159] (Panel D) Competition assay: Shift of 40 nM Dcaf12l1 3′UTR probe by 2.8 uM of CBX7 is competed away by excess cold Dcaf12l1. Red arrows, unbound probe. Black arrows, shifted CBX7-RNA complexes of different mobilities.

[0160] (Panel E) Binding curves for CBX7-3′UTR interactions for selected transcripts. Kd's and Hill coefficients determined by fitting datapoints to sigmoidal plots by non-linear regression (STAR Methods).

[0161] (Panel F) RNA-EMSAs with purified CBX7 (5.6 μM) and 100 nM of in vitro-transcribed wildtype oligos bearing a single FAM motif versus their mutated versions. Green arrows, unbound RNA probes. Red arrows, bound and shifted RNA-protein complexes.

[0162] (Panel G) FAM3 competition EMSA using 2.8 uM CBX7 and 100 nM labelled Nuck1-FAM3 RNA probe. Increasing concentrations of Nucks1-FAM3 cold competitor were added, as indicated. Green arrows, unbound RNA probes. Red arrows, bound and shifted RNA-protein complexes.

[0163] FIGS. 6A-I. Modulation of CBX7-3′UTR interactions results in gene upregulation. See also FIG. 15

[0164] (Panel A) LNA administration resulted in gene upregulation, as shown by RT-qPCR. LNA cocktails are used for each transcript (see FIG. 2 and FIG. 12 for map). Expression values are fold-changes in expression compared to cells treated with scrambled LNA. P values determined by t-test from 3 biological replicates.

[0165] (Panel B) ChIP-qPCR for CBX7 localization H2AK119Ub levels after LNA administration as indicated. IgG for control ChIP pulldown. Data presented is average+/−S.D of at least three biological replicates.

[0166] (Panel C) FAIRE-qPCR analysis of chromatin compaction in the promoter regions (DNAse-sensitive regions) versus regions corresponding to CBX7 ChIP peaks (DNAse-resistant regions) following LNA treatment. Values were normalized to the β-actin locus (constant). Average+/−S.D of at least three biological replicates shown.

[0167] (Panel D) RT-qPCR to determine effect of LNA administration on nascent transcripts (intronic primer pairs) compared to total mRNA (inter-exonic primer pairs) levels. Expression levels are relative to those of cells treated with scrambled LNA. P values determined by t-test from 3 biological replicates.

[0168] (Panel E) Dcaf12l1 upregulation after LNA treatment depends on CBX7. Relative Dcaf12l1 expression in Cbx7−/− versus wildtype ES cells. RT-pPCR of nascent (intronic primer pairs) versus processed mRNA (inter-exonic primer pairs) is shown. P values determined by t-test from 3 biological replicates.

[0169] (Panel F). Probability density functions for CBX7-bound versus unbound transcripts. Relative FPKM values are determined from RNA-seq of the ES cells in which dCLIP was performed. Note that bound transcripts have a tendency towards higher expression.

[0170] (Panel G) Western immunoblot for DCAF12L1 and loading control CTCF protein. Western analysis is quantitative and showed linear response between 2.5-20.0 ul of extract for both proteins. Standard curve for the Western analysis displayed Squared correlation coefficients (R²) of approximately 1.0, suggesting an excellent fit of the curve to observed values.

[0171] (Panel H) One example of quantitative Western blot analysis for expression of DCAF12L1 protein following treatment with LNA oligomers. Densitometric analysis was performed and values are normalized to control-LNA-treated samples. Western immunoblots appearing in panels G and H, which were part of images generated by Chemidoc MP Imaging System (as described under STAR Methods) were cropped from their original context and recomposed into separate panels for presentation purposes.

[0172] (Panel I) Average of three biological replicates of quantitative Western blot analysis for DCAF12L1 protein. Values are fold-changes in protein signal compared to cells treated with scrambled LNA. P values determined by t-test from 3 biological replicates.

[0173] FIGS. 7A-F. Identification and characterization of binding motifs for human CBX7 by dCLIP. See also FIG. 16.

[0174] (Panel A) Length distribution frequency of the enriched hCBX7 dCLIP peaks, as well as mean, median, and standard deviation.

[0175] (Panel B) Metagene profiles for hCBX7 dCLIP-seq peaks shows enrichment at the 3′ end of mRNAs. TSS, transcriptional start site. TTS, transcriptional termination site.

[0176] (Panel C) Representative hCBX7 dCLIP profile. BMI1 analysis was performed on previous GRIP dataset (Ray et al., 2016).

[0177] (Panel D) Similarity analysis for families of binding motifs identified for hCBX7 and mCBX7 dCLIP. Groups of motifs arranged according to similarity. Note partial clustering of human and mouse motifs.

[0178] (Panel E) Validation of CBX7 dCLIP data for selected transcripts by dCLIP-qPCR. Average fold-enrichment over GFP control is plotted, with standard deviations (error bars). PES1 served as a negative control that did not exhibit significant binding to CBX7. P values were determined by t-test from 3 biological replicates.

[0179] (Panel F) hCBX7 motifs bear significant similarity to motifs of known RNA binding proteins. hPDI motifs were adopted from Xie et. al. (Xie et al., 2010). RNAcompete motifs were adopted from Ray et al (Ray et al., 2013).

[0180] FIGS. 8A-B—Related to FIG. 1. Conventional CLIP of CBX7 and RYBP in ES cells

[0181] (Panel A) Representative autoradiography of CLIP experiment using specific antibodies against CBX7 and RYBP. Rabbit IgG and anti-Sox2 antibodies were used as a control. Expected sizes of CBX7 and RYBP proteins were marked by red and green arrowheads respectively. Note a strong background around 40 kDa, which were observed for both CBX7 and RYBP proteins and was not removable up to 1M salt washes as outlined in STAR Methods.

[0182] (Panel B) Representative autoradiography of CLIP experiment with anti-HA tag antibody, 6C and 12D are two clonal cell lines expressing physiological levels of HA-tagged-CBX7. Red arrowhead—HA-CBX7 related signal. Note the presence of strong background with anti-HA antibody similar to anti-CBX7 and anti-RYBP CLIP in (A).

[0183] FIGS. 9A-C—Related to FIG. 1. Denaturing CLIP of CBX7 and RYBP in ES cells

[0184] (Panel A) Representative dCLIP experiment for RYBP protein. Left panel, autoradiography of dCLIP experiment. Right panel, Western blot with anti-RYBP antibody. Red arrows, Biotagged-RYBP signal. 1A and 3H are two clonal cell lines expressing physiological levels of Biotagged-RYBP.

[0185] (Panel B) Representative dCLIP experiment performed simultaneously for CBX7 and RYBP proteins. Note a much weaker signal for RYBP (green asterisk) compared to CBX7 (red asterisk).

[0186] (Panel C) Radioactively labeled RNA from dCLIP experiment was extracted out of nitrocellulose membrane and subjected to DNAse or RNAse treatment. Subsequently, denaturing PAGE electrophoresis was performed and resulting gel exposed to phosphoimaging screen. Note that radioactive signal was specifically eliminated by RNAse treatment, with DNAse treatment having no visible effect.

[0187] FIGS. 10A-B—Related to FIG. 1. Comparison between beads elution and membrane elution dCLIP methods.

[0188] Dusp9 RNA dCLIP profile in (Panel A) and Nucks1 RNA dCLIP profile in (Panel B) were examined to assess differences between two RNA extraction methods—elution directly from beads vs. SDS-PAGE purification, nitrocellulose membrane transfer, with elution of RNA from membrane. Note that in both cases, RYBP presented a weaker signal compared to CBX7.

[0189] FIGS. 11A-C—Related to FIG. 1. Correlation plots between individual CBX7 dCLIP replicates and overall gene expression.

[0190] (Panel A) A scatter plot of gene expression values derived from RNA-seq data of two control lines and two Biotag-CBX7 expressing lines. Note the lack of significant change in overall gene expression. Average FPKM values for endogenous CBX7 expression are 44.38 for control cells versus 46.03 for Biotag-CBX7 cells.

[0191] (Panel B) A genome-wide pairwise comparisons of enriched dCLIP peaks over 1 kb bins per three biological replicates (see STAR Methods for details). Note a positive correlation between individual replicates.

[0192] (Panel C) Probability density functions for CBX7-bound versus the bulk of expressed transcripts. Relative FPKM values are determined from RNA-seq of the ES cells in which dCLIP was performed. Note that bound transcripts have a tendency towards higher expression.

[0193] FIG. 12—Related to FIG. 1. CBX7 binding to target transcripts in mouse ES cells is selective towards a subset of expressed genes

[0194] Calm2 (Top Panel) mRNAs represents high binders (green, FIG. 1F). Tug1 (Middle Panel) represents an lncRNA. Notably, while mRNAs prefer to bind CBX7 via the 3′UTR, lncRNAs can bind anywhere within the transcript. Note absent dCLIP signals for Myl6 (Bottom Panel) transcript (negative control), in spite of having comparable expression levels as Calm2.

[0195] FIGS. 13A-D—Related to FIG. 1. CEAS analysis for CBX7 dCLIP-seq and ChIP-seq Peaks.

[0196] (Panel A) CEAS analysis for CBX7 dCLIP-seq peaks (right pie) with enrichment for each genomic feature shown relative to the overall ES transcriptome profile (left pie).

[0197] (Panel B) CEAS analysis for CBX7 ChIP-seq peaks (right pie) with enrichment for each genomic feature shown relative to the overall ES genomic profile (left pie).

[0198] (Panel C) Comparison between CBX7 enrichment in distinct genomic features in for CBX7 dCLIP-seq vs CBX7 ChIP-seq.

[0199] (Panel D) To assess the relationship between CBX7 binding to RNA vs. DNA, we determined the number of CBX7-bound loci and the number of CBX7-bound transcripts in ES cells. Among the 1,333 transcripts with CBX7 binding sites, only 12% were associated with a CBX7 ChIP peak in the same RefSeq locus, inclusive of promoter region. For bulk expressed transcripts in ES cells, the percentage was significantly greater. To compare the 1,333 transcripts to bulk transcripts, we performed 1,000 rounds of random sampling in each cohort. CBX7 binding to target transcripts is inversely correlated with recruitment of CBX7 to chromatin.

[0200] FIG. 14—Related to FIG. 4. Effect of Motif Clustering on RNA secondary structure profile probed in vivo and in vitro on CBX7 RNA binding.

[0201] IcSHAPE profiles centered on the genomic sequences predicted as carrying CBX7 binding motifs. IcSHAPE analysis was adopted from Spitale et al (Spitale et al., 2015). Purified RNA molecules were subjected to treatment with icSHAPE reagent in vitro or isolated from cells exposed to icSHAPE reagent in cell culture (in vivo). Extent of RNA folding in particular region is determined by its accessibility to modification by icSHAPE reagent with higher icSHAPE signal representing more open structure. FAM_Sing—depicting single motif per a dCLIP fiber. FAM Mult—depicting multiple motifs per a dCLIP fiber. Note that despite a marked similarity of the curves between single and multiple FAM sequences, average icSHAPE signal in FAM1 and FAM4 is significantly higher than in clustered motif sequences, reflecting more open overall structures.

[0202] FIGS. 15A-B—Related to FIG. 6. Gene expression in Cbx7−/− knockout mouse ES cells.

[0203] (Panel A) Western blotting with specific CBX7 antibody to confirm the absence of CBX7 protein in the knockout line. Beta-tubulin served as loading control.

[0204] (Panel B) Gene expression analysis Cbx7 knockout cells. RT-qPCR experiments with fold-change expression values in Cbx7−/− cells compared to expression in Cbx7+/+ cells. While 5′ region of Cbx7 mRNA was still expressed, the 3′ region was absent, consistent with the knockout scheme described previously (Cheng et al., 2014). Cbx8 is a positive control. Notably, it is known that CBX8 is upregulated in ES cells when CBX7 is depleted, in order to maintain stem cell self-renewal (Morey et al., 2012; O'Loghlen et al., 2012) (FIG. 15B). The functional compensation by CBX8 is consistent with the lack of Dcaf12l1 (Dusp9, Calm2) downregulation in Cbx7−/− cells. Interestingly, however, the gene upregulation effect by the LNA was specific to CBX7. Taken together with FIG. 6E, these data indicate that the mRNA upregulation observed with the gene-specific LNA requires both CBX7 and the gene-specific LNA.

[0205] FIGS. 16A-D—Related to FIG. 7. Comparison between Human and Mouse CBX7 isoforms.

[0206] (Panel A) Schematic domain structure of CBX7 protein. CD depicted chromodomain, which is involved in binding to methylated lysines and RNA. Note addition of 58aa between CD and PC-box domains in human isoform.

[0207] (Panel B) Clustal Omega protein sequence alignment between mouse and human CBX7 isoforms. Note that besides addition of 58aa to human CBX7 in the course of evolution, a very high degree of similarity in CD and PC-box domains still persisted.

[0208] (Panel C, Panel D) CEAS analysis for CBX7 CLIP-seq peaks (right pie) with enrichment for each genomic feature shown relative to the overall ES transcriptome profile (left pie).

[0209] Table 1—Matrix of FBPs presented in FIGS. 2B and 7D.

### DETAILED DESCRIPTION

[0210] While it is now established that many chromatin-modifying complexes interact with RNA (Magistri et al., 2012), a major obstacle in understanding the regulation and function of such interactions has been the difficulty of identifying specific RNA motifs. For instance, interactions between RNA and Polycomb repressive complexes have served as a leading model in our understanding of RNA-protein interactions at the chromatin interface (Khalil et al., 2009; Zhao et al., 2010), but definitive RNA motifs have yet to be identified. Such motifs could exist in the primary RNA sequence or as specific 3D structures. At present, proposed motifs have come from either in vitro binding studies and have yet to be validated in vivo (Wang et al., 2017), or have been deduced from in vivo binding data that yielded whole transcripts or very large footprints of >1 kb (Beltran et al., 2016; Hendrickson et al., 2016; Kaneko et al., 2014a; Kaneko et al., 2014b; Kaneko et al., 2013).

[0211] Revealing binding motifs would require a high-fidelity method of generating RNA-binding footprints at a transcriptome-wide level—footprints that represent the protein-binding site on the RNA. While current methodologies have been excellent for highly abundant proteins, including cytoplasmic RNA-binding proteins (Marchese et al., 2016), nuclear epigenetic complexes have presented a greater challenge because of their chromatin association and (hence) a less soluble nature, Such proteins also tend to exist in multi-subunit complexes, with the potential to have several points of contact within a long transcript. New, highly stringent methods that complement existing techniques are therefore much needed in order to obtain a well-rounded view of specific RNA-protein networks.

[0212] A major limitation of most existing methodologies is the reliance on antibodies for specific purification of protein-RNA complexes. The relatively low nanomolar affinities of antibody-antigen methods have direct consequences for antibody-based CLIP methods, as they constrain the stringency of washes during the purification step. Because washes must not disrupt the antibody-antigen interaction, nonspecific RNAs cannot be removed efficiently prior to elution. To solve this problem, here we develop “dCLIP” (denaturing CLIP) and provide proof-of-concept in two systems. We show that dCLIP can be applied to both mouse and human CBX7 protein to reveal specific RNA footprints, from which consensus motifs and functionally relevant binding sites can be deduced. We chose the CBX7 subunit of canonical PRC1 for its biological importance. CBX7 is highly expressed in embryonic stem (ES) cells and plays an essential role in maintaining stem cell pluripotency (Morey et al., 2012; O'Loghlen et al., 2012). Existing studies have hinted that CBX7's RNA-binding activity may be critical to its epigenomic function. It is known that CBX7 localization to chromatin depends on its RNA-binding domain, and one RNA (ANRIL) is known to negatively regulate the INK4a locus through CBX7 (Bernstein et al., 2006; Yap et al., 2010). Below we demonstrate that CBX7 interacts with a large family of messenger RNAs (mRNAs), identify short RNA footprints, and develop a bioinformatic pipeline to uncover specific functional motifs.

[0213] Here we have developed the denaturing CLIP (dCLIP) methodology and identified a large RNA interactome for CBX7 in human and mouse cells. Interestingly, CBX7 interacts predominantly with mRNA—a somewhat unexpected finding given that previous work with the BMI1 subunit indicated a preference for noncoding RNA (Ray et al., 2016). However, CBX7 is unlike the other CBX isoforms (CBX2, 4, 6, 8) in that it lacks the signature polynucleosome compaction function (Grau et al., 2011). Indeed, our present analysis indicates that CBX7, when associated with the 3′UTR of mRNAs, does not compact or modulate chromatin. Rather, CBX7 is paradoxically associated with a gene upregulatory function. Thus, the RNA-bound CBX7-containing form of PRC1 may not operate as a repressive complex in the same way as PRC1 complexes that contain compaction-competent CBX isoforms. Together, these observations raise the possibility that the immensely heterogeneous PRC1 complexes (as defined by their distinct subunit compositions) may bind different types of transcripts and serve diverse gene regulatory functions, both positive and negative in nature. Recent work with the EZH2 subunit of PRC2 has also revealed direct positive effects on gene regulation (Zovoilis et al., 2016). Thus, although Polycomb proteins have largely been associated with gene-repressive activities, they can serve gene-upregulatory functions in specific instances.

[0214] Our current work provides proof-of-concept for the dCLIP methodology. We suggest that dCLIP can complement a number of existing methods, each offering various pro's and con's. A recent popular method is eCLIP (Van Nostrand et al., 2016), which relies on antibody-antigen interactions for RNA precipitation and can be applied to any endogenous protein with good antibodies. Similarly, nRIP and fRIP can also be applied to a wide range of proteins without the need for construction of affinity tags (Hendrickson et al., 2016; Ray et al., 2016; Zhao et al., 2010). These methods have all provided valuable information regarding nuclear RNA-protein networks. What dCLIP offers is a complementary view with certain advantages. One key feature is the highly stringent conditions that enable separation (through denaturation) of tightly associated protein complexes into individual components, which therefore makes possible the assessment of RNA binding activities of a single component within the complex.

[0215] Another major advantage of dCLIP method is that it yields a high signal-to-noise ratio and generates reproducible footprints with median sizes of 171 nt (mouse) and 183 nt (human). The small footprints enabled us to identify consensus binding motifs in the RNA that are concordant between two species. We identified families of motifs that tend to co-cluster in the 3′UTR and that share significant similarities between species (mCBX7, hCBX7). While the overall binding affinity of CBX7 to any one FAM is relatively low (Kd in the micromolar range), our data suggest a potential for positive cooperativity that could considerably boost binding dynamics in cells. First, icSHAPE analysis showed that FAM clustering predisposes to an open RNA conformation in vivo (FIG. 14). Second, in vivo CBX7 footprints harboring clustered FAMs demonstrated higher FAM occupancy ratios than those harboring only a single motif (FIG. 3D). Finally, biochemical analysis revealed a Hill coefficient of 2-3 in vitro for three tested 3′UTR examples (FIG. 5E).

[0216] The mRNA upregulation following the administration of FAM-targeted LNAs is reminiscent of the RNA-upregulation seen after targeting PRC2-RNA interactions with LNAs against the long noncoding RNA, SMN-AS1, for human spinal muscular atrophy locus (Woo et al., 2017). In the case of SMN-AS1, the LNA blocked PRC2 from binding to the antisense regulatory transcript for SMN2 and thereby prevented the deposition of the repressive H3K27me3 mark. Interestingly, however, chromatin assays suggest that our CBX7-mediated upregulation was not due to reduced levels of the repressive H2AK119Ub mark, nor was it due to increased chromatin accessibility. These findings suggested a co-transcriptional and/or post-transcriptional effect. Indeed, the gene-specific LNAs can increase the steady state levels of both nascent and processed mRNA. Furthermore, Western blot analysis indicated that mRNA upregulation was accompanied by increased protein expression. Potential mechanisms include enhanced transcriptional elongation, RNA splicing, mRNA stability, improved export, or increased translation. One possible hint may come from the paradoxical finding that the mixmer LNAs enhanced (rather than blocked) the CBX7-3′UTR interactions, producing a strong supershift in gel retardation assays. Thus, the binding of CBX7 to the 3′UTR may play a role in transcript stabilization and processing, rather than in chromatin modulation. Notably, our data show that mRNAs bound by CBX7 have a higher probability of expression than transcripts not associated with CBX7 (FIG. 6F). The CBX7-containing form of PRC1 therefore appears to have an activity that has not previously been associated with either canonical or non-canonical PRC1.

[0217] Methods of Modulating Gene Expression

[0218] The inhibitory nucleic acids and small molecules targeting (e.g., complementary to) a PRC1 binding RNA can be used to modulate gene expression in a cell, e.g., a cancer cell, a stem cell, or other normal cell types for gene or epigenetic therapy. The cells can be in vitro, including ex vivo, or in vivo (e.g., in a subject who has cancer, e.g., a tumor).

[0219] In various related aspects, including with respect to the targeting of RNAs by LNA molecule, PRC1-binding RNAs can include endogenous coding and non-coding cellular RNAs, including but not limited to those RNAs that are greater than 60 nt in length, e.g., greater than 100 nt, e.g., greater than 200 nt, have no positive-strand open reading frames greater than 100 amino acids in length, are identified as ncRNAs by experimental evidence, and are distinct from known (smaller) functional-RNA classes (including but not limited to ribosomal, transfer, and small nuclear/nucleolar RNAs, siRNA, piRNA, and miRNA). See, e.g., Lipovich et al., “MacroRNA underdogs in a microRNA world: Evolutionary, regulatory, and biomedical significance of mammalian long non-protein-coding RNA” Biochimica et Biophysica Acta (2010) doi:10.1016/j.bbagrm.2010.10.001; Ponting et al., Cell 136(4):629-641 (2009), Jia et al., RNA 16 (8) (2010) 1478-1487, Dinger et al., Nucleic Acids Res. 37 1685 (2009) D122-D126 (database issue); and references cited therein. ncRNAs have also been referred to as, and can include, long non-coding RNA, long RNA, large RNA, macro RNA, intergenic RNA, and NonCoding Transcripts.

[0220] The methods described herein can be used to target both coding and non-coding RNAs. Known classes of RNAs include large intergenic non-coding RNAs (lincRNAs, see, e.g., Guttman et al., Nature. 2009 Mar. 12; 458(7235):223-7. Epub 2009 Feb. 1, which describes over a thousand exemplary highly conserved large non-coding RNAs in mammals; and Khalil et al., PNAS 106(28)11675-11680 (2009)); promoter associated short RNAs (PASRs; see, e.g., Seila et al., Science. 2008 Dec. 19; 322(5909):1849-51. Epub 2008 Dec. 4; Kanhere et al., Molecular Cell 38, 675-688, (2010)); endogenous antisense RNAs (see, e.g., Numata et al., BMC Genomics. 10:392 (2009); Okada et al., Hum Mol Genet. 17(11):1631-40 (2008); Numata et al., Gene 392(1-2):134-141 (2007); and Rosok and Sioud, Nat Biotechnol. 22(1):104-8 (2004)); and RNAs that bind chromatin modifiers such as PRC2 and LSD1 (see, e.g., Tsai et al., Science. 2010 Aug. 6; 329(5992):689-93. Epub 2010 Jul. 8; and Zhao et al., Science. 2008 Oct. 31; 322(5902):750-6).

[0221] Exemplary ncRNAs include XIST, TSIX, SRA1, and KCNQ1OT1. The sequences for more than 17,000 long human ncRNAs can be found in the NCode™ Long ncRNA Database on the Invitrogen website. Additional long ncRNAs can be identified using, e.g., manual published literature, Functional Annotation of Mouse (FANTOM3) project, Human Full-length cDNA Annotation Invitational (H-Invitational) project, antisense ncRNAs from cDNA and EST database for mouse and human using a computation pipeline (Zhang et al., Nucl. Acids Res. 35 (suppl 1): D156-D161 (2006); Engstrom et al., PLoS Genet. 2:e47 (2006)), human snoRNAs and scaRNAs derived from snoRNA-LBME-db, RNAz (Washietl et al. 2005), Noncoding RNA Search (Torarinsson, et al. 2006), and EvoFold (Pedersen et al. 2006).

[0222] A transcriptome of exemplary PRC1-binding RNAs that can be targeted with the present methods is described in WO 2016/149455, which is incorporated by reference herein in its entirety. See, e.g., Table 1 of WO 2016/149455: Human CBX7-RNA binding sites as determined by denaturing CLIP-seq analysis in Human 293 cells. All coordinates in hg19. The columns (c) correspond to: c1, SEQ ID Number. c2, Chromosome number. c3, Read start position. c4, Read end position. c5, chromosome strand that the transcript is made from (+, top or Watson strand; −, bottom or Crick strand of each chromosome). C6, nearest gene name. c7, gene categories as defined in Example 2.

[0223] See also Table 2 of WO 2016/149455: Human LiftOver sequences corresponding to CBX7-RNA binding sites as determined by denaturing CLIP-seq analysis in mouse ES cells shown. All coordinates in hg19. CBX7-binding sites derived from CLIP-seq performed in the mouse ES cell line, 16.7, as shown in Table 3, are translated from mouse mm9 to human hg19 coordinates.

[0224] In addition, see Table 3 of WO 2016/149455: Mouse CBX7-RNA binding sites as determined by denaturing CLIP-seq analysis in ES cells derived from Mus musculus. All coordinates in mm9. CLIP-seq performed in the mouse ES cell line, EL 16.7. CBX7 binding sites in the RNA are shown.

[0225] Calculations of homology or sequence identity between sequences (the terms are used interchangeably herein) are performed as follows.

[0226] To determine the percent identity of two nucleic acid sequences, the sequences are aligned for optimal comparison purposes (e.g., gaps can be introduced in one or both of a first and a second amino acid or nucleic acid sequence for optimal alignment and non-homologous sequences can be disregarded for comparison purposes). The length of a reference sequence aligned for comparison purposes is at least 80% of the length of the reference sequence, and in some embodiments is at least 90% or 100%. The nucleotides at corresponding amino acid positions or nucleotide positions are then compared. When a position in the first sequence is occupied by the same nucleotide as the corresponding position in the second sequence, then the molecules are identical at that position (as used herein nucleic acid “identity” is equivalent to nucleic acid “homology”). The percent identity between the two sequences is a function of the number of identical positions shared by the sequences, taking into account the number of gaps, and the length of each gap, which need to be introduced for optimal alignment of the two sequences.

[0227] For purposes of the present invention, the comparison of sequences and determination of percent identity between two sequences can be accomplished using a Blossum 62 scoring matrix with a gap penalty of 12, a gap extend penalty of 4, and a frameshift gap penalty of 5.

[0228] The methods described herein can be used for modulating expression of oncogenes and tumor suppressors in cells, e.g., cancer cells. For example, to decrease expression of an gene (e.g., an oncogene or imprinted gene) in a cell, the methods include introducing into the cell an inhibitory nucleic acid or small molecule that specifically binds, or is complementary, to a PRC1-binding region of an RNA that increases expression of the gene, e.g., an oncogene and/or an imprinted gene, set forth in Tables 1-3. As another example, to increase expression of a gene, e.g., a tumor suppressor, in a cell, the methods include introducing into the cell an inhibitory nucleic acid or small molecule that specifically binds, or is complementary, to a PRC1-binding region of an RNA that decreases expression of the gene, e.g., of a tumor suppressor gene, set forth in Tables 1-3, e.g., in subjects with cancer, e.g., lung adenocarcinoma patients.

[0229] In general, the methods include introducing into the cell an inhibitory nucleic acid that specifically binds, or is complementary, to a region of an RNA that modulated expression of a gene as set forth in Tables 1-3.

[0230] In preferred embodiments, the inhibitory nucleic acid binds to a region within or near (e.g., within 100, 200, 300, 400, 500, 600, 700, 1K, 2K, or 5K bases of) a PRC1-binding region of the RNA as set forth in Tables 1-3. The empirically-identified “peaks,” which are believed to represent PRC1-binding regions are shown in Table 1, with 500 nts of sequence on each side, so that in some the methods can include targeting a sequence as shown in one of the sequences in Tables 1-3, or a sequence that is between 500 nts from the start and 500 nts of the end of a sequence shown in Tables 1-3, or between 400 nts from the start and 400 nts of the end, 300 nts from the start and 300 nts of the end, between 200 nts from the start and 200 nts of the end, or between 100 nts from the start and 100 nts of the end, of a sequence shown in Tables 1-3. A nucleic acid that binds “specifically” binds primarily to the target RNA or related RNAs to inhibit regulatory function of the RNA but not of other non-target RNAs. The specificity of the nucleic acid interaction thus refers to its function (e.g., inhibiting the PRC1-associated repression of gene expression) rather than its hybridization capacity. Inhibitory nucleic acids may exhibit nonspecific binding to other sites in the genome or other RNAs, without interfering with binding of other regulatory proteins and without causing degradation of the non-specifically-bound RNA. Thus this nonspecific binding does not significantly affect function of other non-target RNAs and results in no significant adverse effects.

[0231] These methods can be used to treat a cancer in a subject by administering to the subject a composition (e.g., as described herein) comprising a PRC1-binding fragment of an RNA as described herein and/or an inhibitory nucleic acid that binds to an RNA (e.g., an inhibitory nucleic acid that binds to an RNA that inhibits a tumor suppressor, or cancer-suppressing gene, or imprinted gene and/or other growth-suppressing genes in any of Tables 1-3). Examples of cellular proliferative and/or differentiative disorders include cancer, e.g., carcinoma, sarcoma, metastatic disorders or hematopoietic neoplastic disorders, e.g., leukemias. A metastatic tumor can arise from a multitude of primary tumor types, including but not limited to those of prostate, colon, lung, breast and liver origin.

[0232] As used herein, treating includes “prophylactic treatment” which means reducing the incidence of or preventing (or reducing risk of) a sign or symptom of a disease in a patient at risk for the disease, and “therapeutic treatment”, which means reducing signs or symptoms of a disease, reducing progression of a disease, reducing severity of a disease, in a patient diagnosed with the disease. With respect to cancer, treating includes inhibiting tumor cell proliferation, increasing tumor cell death or killing, inhibiting rate of tumor cell growth or metastasis, reducing size of tumors, reducing number of tumors, reducing number of metastases, increasing 1-year or 5-year survival rate.

[0233] As used herein, the terms “cancer”, “hyperproliferative” and “neoplastic” refer to cells having the capacity for autonomous growth, i.e., an abnormal state or condition characterized by rapidly proliferating cell growth. Hyperproliferative and neoplastic disease states may be categorized as pathologic, i.e., characterizing or constituting a disease state, or may be categorized as non-pathologic, i.e., a deviation from normal but not associated with a disease state. The term is meant to include all types of cancerous growths or oncogenic processes, metastatic tissues or malignantly transformed cells, tissues, or organs, irrespective of histopathologic type or stage of invasiveness. “Pathologic hyperproliferative” cells occur in disease states characterized by malignant tumor growth. Examples of non-pathologic hyperproliferative cells include proliferation of cells associated with wound repair.

[0234] The terms “cancer” or “neoplasms” include malignancies of the various organ systems, such as affecting lung (e.g. small cell, non-small cell, squamous, adenocarcinoma), breast, thyroid, lymphoid, gastrointestinal, genito-urinary tract, kidney, bladder, liver (e.g. hepatocellular cancer), pancreas, ovary, cervix, endometrium, uterine, prostate, brain, as well as adenocarcinomas which include malignancies such as most colon cancers, colorectal cancer, renal-cell carcinoma, prostate cancer and/or testicular tumors, non-small cell carcinoma of the lung, cancer of the small intestine and cancer of the esophagus.

[0235] The term “carcinoma” is art recognized and refers to malignancies of epithelial or endocrine tissues including respiratory system carcinomas, gastrointestinal system carcinomas, genitourinary system carcinomas, testicular carcinomas, breast carcinomas, prostatic carcinomas, endocrine system carcinomas, and melanomas. In some embodiments, the disease is renal carcinoma or melanoma. Exemplary carcinomas include those forming from tissue of the cervix, lung, prostate, breast, head and neck, colon and ovary. The term also includes carcinosarcomas, e.g., which include malignant tumors composed of carcinomatous and sarcomatous tissues. An “adenocarcinoma” refers to a carcinoma derived from glandular tissue or in which the tumor cells form recognizable glandular structures.

[0236] The term “sarcoma” is art recognized and refers to malignant tumors of mesenchymal derivation.

[0237] Additional examples of proliferative disorders include hematopoietic neoplastic disorders. As used herein, the term “hematopoietic neoplastic disorders” includes diseases involving hyperplastic/neoplastic cells of hematopoietic origin, e.g., arising from myeloid, lymphoid or erythroid lineages, or precursor cells thereof. Preferably, the diseases arise from poorly differentiated acute leukemias, e.g., erythroblastic leukemia and acute megakaryoblastic leukemia. Additional exemplary myeloid disorders include, but are not limited to, acute promyeloid leukemia (APML), acute myelogenous leukemia (AML) and chronic myelogenous leukemia (CML) (reviewed in Vaickus, L. (1991) Crit Rev. in Oncol./Hemotol. 11:267-97); lymphoid malignancies include, but are not limited to acute lymphoblastic leukemia (ALL) which includes B-lineage ALL and T-lineage ALL, chronic lymphocytic leukemia (CLL), prolymphocytic leukemia (PLL), hairy cell leukemia (HLL) and Waldenstrom's macroglobulinemia (WM). Additional forms of malignant lymphomas include, but are not limited to non-Hodgkin lymphoma and variants thereof, peripheral T cell lymphomas, adult T cell leukemia/lymphoma (ATL), cutaneous T-cell lymphoma (CTCL), large granular lymphocytic leukemia (LGF), Hodgkin's disease and Reed-Sternberg disease.

[0238] In some embodiments, specific cancers that can be treated using the methods described herein include, but are not limited to: breast, lung, prostate, CNS (e.g., glioma), salivary gland, prostate, ovarian, and leukemias (e.g., ALL, CML, or AML). Associations of these genes with a particular cancer are known in the art, e.g., as described in Futreal et al., Nat Rev Cancer. 2004; 4;177-83; and The COSMIC (Catalogue of Somatic Mutations in Cancer) database and website, Bamford et al., Br J Cancer. 2004; 91;355-8; see also Forbes et al., Curr Protoc Hum Genet. 2008; Chapter 10; Unit 10.11, and the COSMIC database, e.g., v.50 (Nov. 30, 2010).

[0239] In addition, the methods described herein can be used for modulating (e.g., enhancing or decreasing) pluripotency of a stem cell and to direct stem cells down specific differentiation pathways to make endoderm, mesoderm, ectoderm, and their developmental derivatives. To increase, maintain, or enhance pluripotency, the methods include introducing into the cell an inhibitory nucleic acid that specifically binds to, or is complementary to, a motif as described herein within a PRC1-binding site on a non-coding RNA as set forth in SEQ ID NOs:1 to 5893 (human), 5894 to 17415 (human), and 17416 to 36368 (mouse) or in any of Tables 1-3 of WO 2016/149455. Stem cells useful in the methods described herein include adult stem cells (e.g., adult stem cells obtained from the inner ear, bone marrow, mesenchyme, skin, fat, liver, muscle, or blood of a subject, e.g., the subject to be treated); embryonic stem cells, or stem cells obtained from a placenta or umbilical cord; progenitor cells (e.g., progenitor cells derived from the inner ear, bone marrow, mesenchyme, skin, fat, liver, muscle, or blood); and induced pluripotent stem cells (e.g., iPS cells).

[0240] Furthermore, the present methods can be used to treat Systemic Lupus erythematosus (SLE), an autoimmune disease that affects 1.5 million Americans (16,000 new cases per year). Ages 10-50 are the most affected, with more sufferers being female than male. SLE is a multi-organ disease; the effects include arthritis, joint pain & swelling, chest pain, fatigue, general malaise, hair loss, mouth sores, sensitivity to light, skin rash, and swollen lymph nodes. Current treatments include corticosteroids, immunosuppressants, and more recently belimumab (an inhibitor of B cell activating factor).

[0241] The causes of SLE are probably multiple, including HLA haplotypes. The interleukin 1 receptor associated kinase 1 (IRAK1) has been implicated in some patients. IRAK1 is X-linked (possibly explaining the female predominance of the disease) and is involved in immune response to foreign antigens and pathogens. IRAK1 has been associated with SLE in both adult and pediatric forms. Overexpression of IRAK1 in animal models causes SLE, and knocking out IRAK1 in mice alleviates symptoms of SLE. See, e.g., Jacob et al., Proc Natl Acad Sci USA. 2009 Apr. 14; 106(15):6256-61. The present methods can include treating a subject with SLE by administering an inhibitory nucleic acid that is complementary to a PRC1-binding region on IRAK1 RNA, e.g., an LNA targeting the 3′ UTR as shown in FIGS. 2D and 5B, e.g., as shown in Table 4.

[0242] The present methods can also be used to treat MECP2 Duplication Syndrome in a subject. This condition is characterized by mental retardation, weak muscle tone, and feeding difficulties, as well as poor/absent speech, seizures, and muscle spasticity. There are more reported cases in males than in females; female carriers may have skewed XCI. There is a 50% mortality rate by age 25 associated with this condition, which accounts for 1-2% of X-linked mental retardation. The real rate of incidence is unknown, as many go undiagnosed. Genetically, the cause is duplication (even triplication) of MECP2 gene. There is no current treatment. The present methods can include treating a subject with MECP2 Duplication Syndrome by administering an inhibitory nucleic acid that is complementary to a motif as described herein within a PRC1-binding region on Mecp2 RNA, e.g., an LNA targeting the 3′UTR of Mecp2 as shown in FIGS. 2C and 5A of WO 2016/149455, e.g., as shown in Table 4 of WO 2016/149455.

[0243] In some embodiments, the methods described herein include administering a composition, e.g., a sterile composition, comprising an inhibitory nucleic acid that is complementary to a motif as described herein within a PRC1-binding region on an RNA, e.g., as set forth in SEQ ID NOs:1 to 5893 (human), 5894 to 17415 (human), and 17416 to 36368 (mouse) or in any of Tables 1-3 of WO 2016/149455. Inhibitory nucleic acids for use in practicing the methods described herein can be an antisense or small interfering RNA, including but not limited to an shRNA or siRNA. In some embodiments, the inhibitory nucleic acid is a modified nucleic acid polymer (e.g., a locked nucleic acid (LNA) molecule).

[0244] Inhibitory nucleic acids have been employed as therapeutic moieties in the treatment of disease states in animals, including humans. Inhibitory nucleic acids can be useful therapeutic modalities that can be configured to be useful in treatment regimes for the treatment of cells, tissues and animals, especially humans.

[0245] For therapeutics, an animal, preferably a human, suspected of having cancer is treated by administering an RNA or inhibitory nucleic acid in accordance with this invention. For example, in one non-limiting embodiment, the methods comprise the step of administering to the animal in need of treatment, a therapeutically effective amount of an RNA or inhibitory nucleic acid as described herein.

[0246] Inhibitory Nucleic Acids

[0247] Inhibitory nucleic acids useful in the present methods and compositions include antisense oligonucleotides, ribozymes, external guide sequence (EGS) oligonucleotides, siRNA compounds, single- or double-stranded RNA interference (RNAi) compounds such as siRNA compounds, molecules comprising modified bases, locked nucleic acid molecules (LNA molecules), antagomirs, peptide nucleic acid molecules (PNA molecules), and other oligomeric compounds or oligonucleotide mimetics which hybridize to at least a portion of the target nucleic acid and modulate its function. In some embodiments, the inhibitory nucleic acids include antisense RNA, antisense DNA, chimeric antisense oligonucleotides, antisense oligonucleotides comprising modified linkages, interference RNA (RNAi), short interfering RNA (siRNA); a micro, interfering RNA (miRNA); a small, temporal RNA (stRNA); or a short, hairpin RNA (shRNA); small RNA-induced gene activation (RNAa); small activating RNAs (saRNAs), or combinations thereof. See, e.g., WO 2010040112.

[0248] In the present methods, the inhibitory nucleic acids are preferably designed to target a motif as described herein within a region of the RNA that binds to PRC1, e.g., as described in WO 2016/149455 (see Tables 1-3 thereof). The motifs are shown in FIG. 2 and FIG. 7D and in the matrices shown in Table 1. In some embodiments, the motifs comprise the “consensus” sequences shown in Table 1. In some embodiments, the motifs are constructed using the top 1, top 2, or top 3 nucleotides at each position. In some embodiments, the motifs are constructed using the nucleotides present in greater than 0.1, 0.2, 0.3, or 0.4 of the target sequences, using the percentages as shown in Table 1.

[0249] These “inhibitory” nucleic acids are believed to work by inhibiting the interaction between the RNA and PRC1, and as described herein can be used to modulate expression of a gene.

[0250] In some embodiments, the inhibitory nucleic acids are 10 to 50, 13 to 50, or 13 to 30 nucleotides in length. One having ordinary skill in the art will appreciate that this embodies oligonucleotides having antisense (complementary) portions of 10, 11, 12, 13, 14, 15, 16, 17, 18, 19, 20, 21, 22, 23, 24, 25, 26, 27, 28, 29, 30, 31, 32, 33, 34, 35, 36, 37, 38, 39, 40, 41, 42, 43, 44, 45, 46, 47, 48, 49, or 50 nucleotides in length, or any range therewithin. It is understood that non-complementary bases may be included in such inhibitory nucleic acids; for example, an inhibitory nucleic acid 30 nucleotides in length may have a portion of 15 bases that is complementary to the targeted RNA. In some embodiments, the oligonucleotides are 15 nucleotides in length. In some embodiments, the antisense or oligonucleotide compounds of the invention are 12 or 13 to 30 nucleotides in length. One having ordinary skill in the art will appreciate that this embodies inhibitory nucleic acids having antisense (complementary) portions of 12, 13, 14, 15, 16, 17, 18, 19, 20, 21, 22, 23, 24, 25, 26, 27, 28, 29 or 30 nucleotides in length, or any range therewithin.

[0251] Preferably the inhibitory nucleic acid comprises one or more modifications comprising: a modified sugar moiety, and/or a modified internucleoside linkage, and/or a modified nucleotide and/or combinations thereof. It is not necessary for all positions in a given oligonucleotide to be uniformly modified, and in fact more than one of the modifications described herein may be incorporated in a single oligonucleotide or even at within a single nucleoside within an oligonucleotide.

[0252] In some embodiments, the inhibitory nucleic acids are chimeric oligonucleotides that contain two or more chemically distinct regions, each made up of at least one nucleotide. These oligonucleotides typically contain at least one region of modified nucleotides that confers one or more beneficial properties (such as, for example, increased nuclease resistance, increased uptake into cells, increased binding affinity for the target) and a region that is a substrate for enzymes capable of cleaving RNA:DNA or RNA:RNA hybrids. Chimeric inhibitory nucleic acids of the invention may be formed as composite structures of two or more oligonucleotides, modified oligonucleotides, oligonucleosides and/or oligonucleotide mimetics as described above. Such compounds have also been referred to in the art as hybrids or gapmers. Representative United States patents that teach the preparation of such hybrid structures comprise, but are not limited to, U.S. Pat. Nos. 5,013,830; 5,149,797; 5, 220,007; 5,256,775; 5,366,878; 5,403,711; 5,491,133; 5,565,350; 5,623,065; 5,652,355; 5,652,356; and 5,700,922, each of which is herein incorporated by reference.

[0253] In some embodiments, the inhibitory nucleic acid comprises at least one nucleotide modified at the 2′ position of the sugar, most preferably a 2′-O-alkyl, 2′-O-alkyl-O-alkyl or 2′-fluoro-modified nucleotide. In other preferred embodiments, RNA modifications include 2′-fluoro, 2′-amino and 2′ O-methyl modifications on the ribose of pyrimidines, abasic residues or an inverted base at the 3′ end of the RNA. Such modifications are routinely incorporated into oligonucleotides and these oligonucleotides have been shown to have a higher Tm (i.e., higher target binding affinity) than; 2′-deoxyoligonucleotides against a given target.

[0254] A number of nucleotide and nucleoside modifications have been shown to make the oligonucleotide into which they are incorporated more resistant to nuclease digestion than the native oligodeoxynucleotide; these modified oligos survive intact for a longer time than unmodified oligonucleotides. Specific examples of modified oligonucleotides include those comprising modified backbones, for example, phosphorothioates, phosphotriesters, methyl phosphonates, short chain alkyl or cycloalkyl intersugar linkages or short chain heteroatomic or heterocyclic intersugar linkages. Most preferred are oligonucleotides with phosphorothioate backbones and those with heteroatom backbones, particularly CH₂—NH—O—CH₂, CH, ˜N(CH₃)˜O˜CH₂ (known as a methylene(methylimino) or MMI backbone], CH₂—O—N(CH₃)—CH₂, CH₂—N(CH₃)—N(CH₃)—CH₂ and O—N(CH₃)—CH₂—CH₂ backbones, wherein the native phosphodiester backbone is represented as O—P—O—CH,); amide backbones (see De Mesmaeker et al. Ace. Chem. Res. 1995, 28:366-374); morpholino backbone structures (see Summerton and Weller, U.S. Pat. No. 5,034,506); peptide nucleic acid (PNA) backbone (wherein the phosphodiester backbone of the oligonucleotide is replaced with a polyamide backbone, the nucleotides being bound directly or indirectly to the aza nitrogen atoms of the polyamide backbone, see Nielsen et al., Science 1991, 254, 1497). Phosphorus-containing linkages include, but are not limited to, phosphorothioates, chiral phosphorothioates, phosphorodithioates, phosphotriesters, aminoalkylphosphotriesters, methyl and other alkyl phosphonates comprising 3′alkylene phosphonates and chiral phosphonates, phosphinates, phosphoramidates comprising 3′-amino phosphoramidate and aminoalkylphosphoramidates, thionophosphoramidates, thionoalkylphosphonates, thionoalkylphosphotriesters, and boranophosphates having normal 3′-5′ linkages, 2′-5′ linked analogs of these, and those having inverted polarity wherein the adjacent pairs of nucleoside units are linked 3′-5′ to 5′-3′ or 2′-5′ to 5′-2′; see U.S. Pat. Nos. 3,687,808; 4,469,863; 4,476,301; 5,023,243; 5, 177,196; 5,188,897; 5,264,423; 5,276,019; 5,278,302; 5,286,717; 5,321,131; 5,399,676; 5,405,939; 5,453,496; 5,455, 233; 5,466,677; 5,476,925; 5,519,126; 5,536,821; 5,541,306; 5,550,111; 5,563, 253; 5,571,799; 5,587,361; and 5,625,050.

[0255] Morpholino-based oligomeric compounds are described in Dwaine A. Braasch and David R. Corey, Biochemistry, 2002, 41(14), 4503-4510); Genesis, volume 30, issue 3, 2001; Heasman, J., Dev. Biol., 2002, 243, 209-214; Nasevicius et al., Nat. Genet., 2000, 26, 216-220; Lacerra et al., Proc. Natl. Acad. Sci., 2000, 97, 9591-9596; and U.S. Pat. No. 5,034,506, issued Jul. 23, 1991. In some embodiments, the morpholino-based oligomeric compound is a phosphorodiamidate morpholino oligomer (PMO) (e.g., as described in Iverson, Curr. Opin. Mol. Ther., 3:235-238, 2001; and Wang et al., J. Gene Med., 12:354-364, 2010; the disclosures of which are incorporated herein by reference in their entireties).

[0256] Cyclohexenyl nucleic acid oligonucleotide mimetics are described in Wang et al., J. Am. Chem. Soc., 2000, 122, 8595-8602.

[0257] Additional modifications are possible as described in WO 2016/149455.

[0258] The inhibitory nucleic acids useful in the present methods are sufficiently complementary to the target RNA, e.g., hybridize sufficiently well and with sufficient biological functional specificity, to give the desired effect. “Complementary” refers to the capacity for pairing, through base stacking and specific hydrogen bonding, between two sequences comprising naturally or non-naturally occurring (e.g., modified as described above) bases (nucleosides) or analogs thereof. For example, if a base at one position of an inhibitory nucleic acid is capable of hydrogen bonding with a base at the corresponding position of an RNA, then the bases are considered to be complementary to each other at that position. 100% complementarity is not required. As noted above, inhibitory nucleic acids can comprise universal bases, or inert abasic spacers that provide no positive or negative contribution to hydrogen bonding. Base pairings may include both canonical Watson-Crick base pairing and non-Watson-Crick base pairing (e.g., Wobble base pairing and Hoogsteen base pairing). It is understood that for complementary base pairings, adenosine-type bases (A) are complementary to thymidine-type bases (T) or uracil-type bases (U), that cytosine-type bases (C) are complementary to guanosine-type bases (G), and that universal bases such as such as 3-nitropyrrole or 5-nitroindole can hybridize to and are considered complementary to any A, C, U, or T. Nichols et al., Nature, 1994; 369:492-493 and Loakes et al., Nucleic Acids Res., 1994; 22:4039-4043. Inosine (I) has also been considered in the art to be a universal base and is considered complementary to any A, C, U, or T. See Watkins and SantaLucia, Nucl. Acids Research, 2005; 33 (19): 6258-6267.

[0259] In some embodiments, the location on a target RNA to which an inhibitory nucleic acids hybridizes is defined as a region to which a protein binding partner binds, as shown in Tables 1-3. Routine methods can be used to design an inhibitory nucleic acid that binds to this sequence with sufficient specificity. In some embodiments, the methods include using bioinformatics methods known in the art to identify regions of secondary structure, e.g., one, two, or more stem-loop structures, or pseudoknots, and selecting those regions to target with an inhibitory nucleic acid. For example, methods of designing oligonucleotides similar to the inhibitory nucleic acids described herein, and various options for modified chemistries or formats, are exemplified in Lennox and Behlke, Gene Therapy (2011) 18: 1111-1120, which is incorporated herein by reference in its entirety, with the understanding that the present disclosure does not target miRNA ‘seed regions’.

[0260] While the specific sequences of certain exemplary target segments are set forth herein, one of skill in the art will recognize that these serve to illustrate and describe particular embodiments within the scope of the present invention. Additional target segments are readily identifiable by one having ordinary skill in the art in view of this disclosure. Target segments 5-500 nucleotides in length comprising a stretch of at least five (5) consecutive nucleotides within the protein binding region, or immediately adjacent thereto, are considered to be suitable for targeting as well. Target segments can include sequences that comprise at least the 5 consecutive nucleotides from the 5′-terminus of one of the protein binding regions (the remaining nucleotides being a consecutive stretch of the same RNA beginning immediately upstream of the 5′-terminus of the binding segment and continuing until the inhibitory nucleic acid contains about 5 to about 100 nucleotides). Similarly preferred target segments are represented by RNA sequences that comprise at least the 5 consecutive nucleotides from the 3′-terminus of one of the illustrative preferred target segments (the remaining nucleotides being a consecutive stretch of the same RNA beginning immediately downstream of the 3′-terminus of the target segment and continuing until the inhibitory nucleic acid contains about 5 to about 100 nucleotides). One having skill in the art armed with the sequences provided herein will be able, without undue experimentation, to identify further preferred protein binding regions to target with complementary inhibitory nucleic acids.

[0261] In the context of the present disclosure, hybridization means base stacking and hydrogen bonding, which may be Watson-Crick, Hoogsteen or reversed Hoogsteen hydrogen bonding, between complementary nucleoside or nucleotide bases. For example, adenine and thymine are complementary nucleobases which pair through the formation of hydrogen bonds. Complementary, as the term is used in the art, refers to the capacity for precise pairing between two nucleotides. For example, if a nucleotide at a certain position of an oligonucleotide is capable of hydrogen bonding with a nucleotide at the same position of a RNA molecule, then the inhibitory nucleic acid and the RNA are considered to be complementary to each other at that position. The inhibitory nucleic acids and the RNA are complementary to each other when a sufficient number of corresponding positions in each molecule are occupied by nucleotides that can hydrogen bond with each other through their bases. Thus, “specifically hybridizable” and “complementary” are terms which are used to indicate a sufficient degree of complementarity or precise pairing such that stable and specific binding occurs between the inhibitory nucleic acid and the RNA target. For example, if a base at one position of an inhibitory nucleic acid is capable of hydrogen bonding with a base at the corresponding position of a RNA, then the bases are considered to be complementary to each other at that position. 100% complementarity is not required.

[0262] It is understood in the art that a complementary nucleic acid sequence need not be 100% complementary to that of its target nucleic acid to be specifically hybridizable. A complementary nucleic acid sequence for purposes of the present methods is specifically hybridizable when binding of the sequence to the target RNA molecule interferes with the normal function of the target RNA to cause a loss of activity (e.g., inhibiting PRC1-associated repression with consequent up-regulation of gene expression) and there is a sufficient degree of complementarity to avoid non-specific binding of the sequence to non-target RNA sequences under conditions in which avoidance of the non-specific binding is desired, e.g., under physiological conditions in the case of in vivo assays or therapeutic treatment, and in the case of in vitro assays, under conditions in which the assays are performed under suitable conditions of stringency. For example, stringent salt concentration will ordinarily be less than about 750 mM NaCl and 75 mM trisodium citrate, preferably less than about 500 mM NaCl and 50 mM trisodium citrate, and more preferably less than about 250 mM NaCl and 25 mM trisodium citrate. Low stringency hybridization can be obtained in the absence of organic solvent, e.g., formamide, while high stringency hybridization can be obtained in the presence of at least about 35% formamide, and more preferably at least about 50% formamide. Stringent temperature conditions will ordinarily include temperatures of at least about 30° C., more preferably of at least about 37° C., and most preferably of at least about 42° C. Varying additional parameters, such as hybridization time, the concentration of detergent, e.g., sodium dodecyl sulfate (SDS), and the inclusion or exclusion of carrier DNA, are well known to those skilled in the art. Various levels of stringency are accomplished by combining these various conditions as needed. In a preferred embodiment, hybridization will occur at 30° C. in 750 mM NaCl, 75 mM trisodium citrate, and 1% SDS. In a more preferred embodiment, hybridization will occur at 37° C. in 500 mM NaCl, 50 mM trisodium citrate, 1% SDS, 35% formamide, and 100 μg/ml denatured salmon sperm DNA (ssDNA). In a most preferred embodiment, hybridization will occur at 42° C. in 250 mM NaCl, 25 mM trisodium citrate, 1% SDS, 50% formamide, and 200 μg/ml ssDNA. Useful variations on these conditions will be readily apparent to those skilled in the art.

[0263] For most applications, washing steps that follow hybridization will also vary in stringency. Wash stringency conditions can be defined by salt concentration and by temperature. As above, wash stringency can be increased by decreasing salt concentration or by increasing temperature. For example, stringent salt concentration for the wash steps will preferably be less than about 30 mM NaCl and 3 mM trisodium citrate, and most preferably less than about 15 mM NaCl and 1.5 mM trisodium citrate. Stringent temperature conditions for the wash steps will ordinarily include a temperature of at least about 25° C., more preferably of at least about 42° C., and even more preferably of at least about 68° C. In a preferred embodiment, wash steps will occur at 25° C. in 30 mM NaCl, 3 mM trisodium citrate, and 0.1% SDS. In a more preferred embodiment, wash steps will occur at 42° C. in 15 mM NaCl, 1.5 mM trisodium citrate, and 0.1% SDS. In a more preferred embodiment, wash steps will occur at 68° C. in 15 mM NaCl, 1.5 mM trisodium citrate, and 0.1% SDS. Additional variations on these conditions will be readily apparent to those skilled in the art. Hybridization techniques are well known to those skilled in the art and are described, for example, in Benton and Davis (Science 196:180, 1977); Grunstein and Hogness (Proc. Natl. Acad. Sci., USA 72:3961, 1975); Ausubel et al. (Current Protocols in Molecular Biology, Wiley Interscience, New York, 2001); Berger and Kimmel (Guide to Molecular Cloning Techniques, 1987, Academic Press, New York); and Sambrook et al., Molecular Cloning: A Laboratory Manual, Cold Spring Harbor Laboratory Press, New York.

[0264] In general, the inhibitory nucleic acids useful in the methods described herein have at least 80% sequence complementarity to a target region within the target nucleic acid, e.g., 90%, 95%, or 100% sequence complementarity to the target region within an RNA. For example, an antisense compound in which 18 of 20 nucleobases of the antisense oligonucleotide are complementary, and would therefore specifically hybridize, to a target region would represent 90 percent complementarity. Percent complementarity of an inhibitory nucleic acid with a region of a target nucleic acid can be determined routinely using basic local alignment search tools (BLAST programs) (Altschul et al., J. Mol. Biol., 1990, 215, 403-410; Zhang and Madden, Genome Res., 1997, 7, 649-656). Antisense and other compounds of the invention that hybridize to an RNA are identified through routine experimentation. In general the inhibitory nucleic acids must retain specificity for their target, i.e., either do not directly bind to, or do not directly significantly affect expression levels of, transcripts other than the intended target.

[0265] Target-specific effects, with corresponding target-specific functional biological effects, are possible even when the inhibitory nucleic acid exhibits non-specific binding to a large number of non-target RNAs. For example, short 8 base long inhibitory nucleic acids that are fully complementary to a RNA may have multiple 100% matches to hundreds of sequences in the genome, yet may produce target-specific effects, e.g. upregulation of a specific target gene through inhibition of PRC1 activity. 8-base inhibitory nucleic acids have been reported to prevent exon skipping with with a high degree of specificity and reduced off-target effect. See Singh et al., RNA Biol., 2009; 6(3): 341-350. 8-base inhibitory nucleic acids have been reported to interfere with miRNA activity without significant off-target effects. See Obad et al., Nature Genetics, 2011; 43: 371-378.

[0266] For further disclosure regarding inhibitory nucleic acids, please see WO 2016/149455 as well as US2010/0317718 (antisense oligos); US2010/0249052 (double-stranded ribonucleic acid (dsRNA)); US2009/0181914 and US2010/0234451 (LNA molecules); US2007/0191294 (siRNA analogues); US2008/0249039 (modified siRNA); and WO2010/129746 and WO2010/040112 (inhibitory nucleic acids).

[0267] Antisense

[0268] In some embodiments, the inhibitory nucleic acids are antisense oligonucleotides. Antisense oligonucleotides are typically designed to block expression of a DNA or RNA target by binding to the target and halting expression at the level of transcription, translation, or splicing. Antisense oligonucleotides of the present invention are complementary nucleic acid sequences designed to hybridize under stringent conditions to an RNA in vitro, and are expected to inhibit the activity of PRC1 in vivo. Thus, oligonucleotides are chosen that are sufficiently complementary to the target, i.e., that hybridize sufficiently well and with sufficient biological functional specificity, to give the desired effect.

[0269] Modified Base, Including Locked Nucleic Acids (LNAs)

[0270] In some embodiments, the inhibitory nucleic acids used in the methods described herein comprise one or more modified bonds or bases. Modified bases include phosphorothioate, methylphosphonate, peptide nucleic acids, or locked nucleic acids (LNAs). Preferably, the modified nucleotides are part of locked nucleic acid molecules, including [alpha]-L-LNAs. LNAs include ribonucleic acid analogues wherein the ribose ring is “locked” by a methylene bridge between the 2′-oxgygen and the 4′-carbon—i.e., oligonucleotides containing at least one LNA monomer, that is, one 2′-O,4′-C-methylene-β-D-ribofuranosyl nucleotide. LNA bases form standard Watson-Crick base pairs but the locked configuration increases the rate and stability of the basepairing reaction (Jepsen et al., Oligonucleotides, 14, 130-146 (2004)). LNAs also have increased affinity to base pair with RNA as compared to DNA. These properties render LNAs especially useful as probes for fluorescence in situ hybridization (FISH) and comparative genomic hybridization, as knockdown tools for miRNAs, and as antisense oligonucleotides to target mRNAs or other RNAs, e.g., RNAs as described herein.

[0271] The modified base/LNA molecules can include molecules comprising 10-30, e.g., 12-24, e.g., 12, 13, 14, 15, 16, 17, 18, 19, 20, 21, 22, 23, 24, 25, 26, 27, 28, 29, or 30 nucleotides in each strand, wherein one of the strands is substantially identical, e.g., at least 80% (or more, e.g., 85%, 90%, 95%, or 100%) identical, e.g., having 3, 2, 1, or 0 mismatched nucleotide(s), to a target region in the RNA. The modified base/LNA molecules can be chemically synthesized using methods known in the art.

[0272] The modified base/LNA molecules can be designed using any method known in the art; a number of algorithms are known, and are commercially available (e.g., on the internet, for example at exiqon.com). See, e.g., You et al., Nuc. Acids. Res. 34:e60 (2006); McTigue et al., Biochemistry 43:5388-405 (2004); and Levin et al., Nuc. Acids. Res. 34:e142 (2006). For example, “gene walk” methods, similar to those used to design antisense oligos, can be used to optimize the inhibitory activity of a modified base/LNA molecule; for example, a series of oligonucleotides of 10-30 nucleotides spanning the length of a target RNA can be prepared, followed by testing for activity. Optionally, gaps, e.g., of 5-10 nucleotides or more, can be left between the LNAs to reduce the number of oligonucleotides synthesized and tested. GC content is preferably between about 30-60%. General guidelines for designing modified base/LNA molecules are known in the art; for example, LNA sequences will bind very tightly to other LNA sequences, so it is preferable to avoid significant complementarity within an LNA molecule. Contiguous runs of three or more Gs or Cs, or more than four LNA residues, should be avoided where possible (for example, it may not be possible with very short (e.g., about 9-10 nt) oligonucleotides). In some embodiments, the LNAs are xylo-LNAs.

[0273] For additional information regarding LNA molecules see U.S. Pat. Nos. 6,268,490; 6,734,291; 6,770,748; 6,794,499; 7,034,133; 7,053,207; 7,060,809; 7,084,125; and 7,572,582; and U.S. Pre-Grant Pub. Nos. 20100267018; 20100261175; and 20100035968; Koshkin et al. Tetrahedron 54, 3607-3630 (1998); Obika et al. Tetrahedron Lett. 39, 5401-5404 (1998); Jensen et al., Oligonucleotides 14:130-146 (2004); Kauppinen et al., Drug Disc. Today 2(3):287-290 (2005); and Ponting et al., Cell 136(4):629-641 (2009), and references cited therein.

[0274] As demonstrated herein and previously (see, e.g., WO 2012/065143 and WO 2012/087983, incorporated herein by reference), LNA molecules can be used as a valuable tool to manipulate and aid analysis of RNAs. Advantages offered by an LNA molecule-based system are the relatively low costs, easy delivery, and rapid action. While other inhibitory nucleic acids may exhibit effects after longer periods of time, LNA molecules exhibit effects that are more rapid, e.g., a comparatively early onset of activity, are fully reversible after a recovery period following the synthesis of new RNA, and occur without causing substantial or substantially complete RNA cleavage or degradation. One or more of these design properties may be desired properties of the inhibitory nucleic acids of the invention. Additionally, LNA molecules make possible the systematic targeting of domains within much longer nuclear transcripts. Although a PNA-based system has been described earlier, the effects on Xi were apparent only after 24 hours (Beletskii et al., Proc Natl Acad Sci USA. 2001; 98:9215-9220). The LNA technology enables high-throughput screens for functional analysis of non-coding RNAs and also provides a novel tool to manipulate chromatin states in vivo for therapeutic applications.

[0275] In various related aspects, the methods described herein include using LNA molecules to target RNAs for a number of uses, including as a research tool to probe the function of a specific RNA, e.g., in vitro or in vivo. The methods include selecting one or more desired RNAs, designing one or more LNA molecules that target the RNA, providing the designed LNA molecule, and administering the LNA molecule to a cell or animal. The methods can optionally include selecting a region of the RNA and designing one or more LNA molecules that target that region of the RNA.

[0276] Aberrant imprinted gene expression is implicated in several diseases including Long QT syndrome, Beckwith-Wiedemann, Prader-Willi, and Angelman syndromes, as well as behavioral disorders and carcinogenesis (see, e.g., Falls et al., Am. J. Pathol. 154:635-647 (1999); Lalande, Annu Rev Genet 30:173-195 (1996); Hall Annu Rev Med. 48:35-44 (1997)). LNA molecules can be created to treat such imprinted diseases. As one example, the long QT Syndrome can be caused by a K+ gated Calcium-channel encoded by Kcnq1. This gene is regulated by its antisense counterpart, the long noncoding RNA, Kcnq1ot1 (Pandey et al., Mol Cell. 2008 Oct. 24; 32(2):232-46). Disease arises when Kcnq1ot1 is aberrantly expressed. LNA molecules can be created to downregulate Kcnq1ot1, thereby restoring expression of Kcnq1. As another example, LNA molecules could inhibit RNA cofactors for polycomb complex chromatin modifiers to reverse the imprinted defect.

[0277] From a commercial and clinical perspective, the timepoints between about 1 to 24 hours potentially define a window for epigenetic reprogramming. The advantage of the LNA system is that it works quickly, with a defined half-life, and is therefore reversible upon degradation of LNAs, at the same time that it provides a discrete timeframe during which epigenetic manipulations can be made. By targeting nuclear long RNAs, LNA molecules or similar polymers, e.g., xylo-LNAs, might be utilized to manipulate the chromatin state of cells in culture or in vivo, by transiently eliminating the regulatory RNA and associated proteins long enough to alter the underlying locus for therapeutic purposes. In particular, LNA molecules or similar polymers that specifically bind to, or are complementary to, PRC1-binding RNA can prevent recruitment of PRC1 to a specific chromosomal locus, in a gene-specific fashion.

[0278] LNA molecules might also be administered in vivo to treat other human diseases, such as but not limited to cancer, neurological disorders, infections, inflammation, and myotonic dystrophy. For example, LNA molecules might be delivered to tumor cells to downregulate the biologic activity of a growth-promoting or oncogenic long nuclear RNA (e.g., Gtl2 or MALAT1 (Luo et al., Hepatology. 44(4):1012-24 (2006)), a RNA associated with metastasis and is frequently upregulated in cancers). Repressive RNAs downregulating tumor suppressors can also be targeted by LNA molecules to promote reexpression. For example, expression of the INK4b/ARF/INK4a tumor suppressor locus is controlled by Polycomb group proteins including PRC1 and PRC1 and repressed by the antisense noncoding RNA ANRIL (Yap et al., Mol Cell. 2010 Jun. 11; 38(5):662-74). PRC1-binding regions described herein in ANRIL can be targeted by LNA molecules to promote reexpression of the INK4b/ARF/INK4a tumor suppressor. Some ncRNAs may be positive regulators of oncogenes. Such “activating ncRNAs” have been described recently (e.g., Jpx (Tian et al., Cell. 143(3):390-403 (2010) and others (Ørom et al., Cell. 143(1):46-58 (2010)). Therefore, LNA molecules could be directed at these activating ncRNAs to downregulate oncogenes. LNA molecules could also be delivered to inflammatory cells to downregulate regulatory ncRNA that modulate the inflammatory or immune response. (e.g., LincRNA-Cox2, see Guttman et al., Nature. 458(7235):223-7. Epub 2009 Feb. 1 (2009)).

[0279] In still other related aspects, the LNA molecules targeting PRC1-binding regions in RNAs described herein can be used to create animal or cell models of conditions associated with altered gene expression (e.g., as a result of altered epigenetics).

[0280] The methods described herein may also be useful for creating animal or cell models of other conditions associated with aberrant imprinted gene expression, e.g., as noted above.

[0281] In various related aspects, the results described herein demonstrate the utility of LNA molecules for targeting RNA, for example, to transiently disrupt chromatin for purposes of reprogramming chromatin states ex vivo. Because LNA molecules stably displace RNA for hours and chromatin does not rebuild for hours thereafter, LNA molecules create a window of opportunity to manipulate the epigenetic state of specific loci ex vivo, e.g., for reprogramming of hiPS and hESC prior to stem cell therapy. For example, Gtl2 controls expression of DLK1, which modulates the pluripotency of iPS cells. Low Gtl2 and high DLK1 is correlated with increased pluripotency and stability in human iPS cells. Thus, LNA molecules targeting Gtl2 can be used to inhibit differentiation and increase pluripotency and stability of iPS cells.

[0282] See also PCT/US11/60493, which is incorporated by reference herein in its entirety.

[0283] Interfering RNA, Including siRNA/shRNA

[0284] In some embodiments, the inhibitory nucleic acid sequence that is complementary to an RNA can be an interfering RNA, including but not limited to a small interfering RNA (“siRNA”) or a small hairpin RNA (“shRNA”). Methods for constructing interfering RNAs are well known in the art. For example, the interfering RNA can be assembled from two separate oligonucleotides, where one strand is the sense strand and the other is the antisense strand, wherein the antisense and sense strands are self-complementary (i.e., each strand comprises nucleotide sequence that is complementary to nucleotide sequence in the other strand; such as where the antisense strand and sense strand form a duplex or double stranded structure); the antisense strand comprises nucleotide sequence that is complementary to a nucleotide sequence in a target nucleic acid molecule or a portion thereof (i.e., an undesired gene) and the sense strand comprises nucleotide sequence corresponding to the target nucleic acid sequence or a portion thereof Alternatively, interfering RNA is assembled from a single oligonucleotide, where the self-complementary sense and antisense regions are linked by means of nucleic acid based or non-nucleic acid-based linker(s). The interfering RNA can be a polynucleotide with a duplex, asymmetric duplex, hairpin or asymmetric hairpin secondary structure, having self-complementary sense and antisense regions, wherein the antisense region comprises a nucleotide sequence that is complementary to nucleotide sequence in a separate target nucleic acid molecule or a portion thereof and the sense region having nucleotide sequence corresponding to the target nucleic acid sequence or a portion thereof. The interfering can be a circular single-stranded polynucleotide having two or more loop structures and a stem comprising self-complementary sense and antisense regions, wherein the antisense region comprises nucleotide sequence that is complementary to nucleotide sequence in a target nucleic acid molecule or a portion thereof and the sense region having nucleotide sequence corresponding to the target nucleic acid sequence or a portion thereof, and wherein the circular polynucleotide can be processed either in vivo or in vitro to generate an active siRNA molecule capable of mediating RNA interference.

[0285] In some embodiments, the interfering RNA coding region encodes a self-complementary RNA molecule having a sense region, an antisense region and a loop region. Such an RNA molecule when expressed desirably forms a “hairpin” structure, and is referred to herein as an “shRNA.” The loop region is generally between about 2 and about 10 nucleotides in length. In some embodiments, the loop region is from about 6 to about 9 nucleotides in length. In some embodiments, the sense region and the antisense region are between about 15 and about 20 nucleotides in length. Following post-transcriptional processing, the small hairpin RNA is converted into a siRNA by a cleavage event mediated by the enzyme Dicer, which is a member of the RNase III family. The siRNA is then capable of inhibiting the expression of a gene with which it shares homology. For details, see Brummelkamp et al., Science 296:550-553, (2002); Lee et al, Nature Biotechnol., 20, 500-505, (2002); Miyagishi and Taira, Nature Biotechnol 20:497-500, (2002); Paddison et al. Genes & Dev. 16:948-958, (2002); Paul, Nature Biotechnol, 20, 505-508, (2002); Sui, Proc. Natl. Acad. Sd. USA, 99(6), 5515-5520, (2002); Yu et al. Proc Natl Acad Sci USA 99:6047-6052, (2002).

[0286] The target RNA cleavage reaction guided by siRNAs is highly sequence specific. In general, siRNA containing a nucleotide sequences identical to a portion of the target nucleic acid are preferred for inhibition. However, 100% sequence identity between the siRNA and the target gene is not required to practice the present invention. Thus the invention has the advantage of being able to tolerate sequence variations that might be expected due to genetic mutation, strain polymorphism, or evolutionary divergence. For example, siRNA sequences with insertions, deletions, and single point mutations relative to the target sequence have also been found to be effective for inhibition. Alternatively, siRNA sequences with nucleotide analog substitutions or insertions can be effective for inhibition. In general the siRNAs must retain specificity for their target, i.e., must not directly bind to, or directly significantly affect expression levels of, transcripts other than the intended target.

[0287] Ribozymes

[0288] In some embodiments, the inhibitory nucleic acids are ribozymes. Trans-cleaving enzymatic nucleic acid molecules can also be used; they have shown promise as therapeutic agents for human disease (Usman & McSwiggen, 1995 Ann. Rep. Med. Chem. 30, 285-294; Christoffersen and Marr, 1995 J. Med. Chem. 38, 2023-2037). Enzymatic nucleic acid molecules can be designed to cleave specific RNA targets within the background of cellular RNA. Such a cleavage event renders the RNA non-functional.

[0289] In general, enzymatic nucleic acids with RNA cleaving activity act by first binding to a target RNA. Such binding occurs through the target binding portion of a enzymatic nucleic acid which is held in close proximity to an enzymatic portion of the molecule that acts to cleave the target RNA. Thus, the enzymatic nucleic acid first recognizes and then binds a target RNA through complementary base pairing, and once bound to the correct site, acts enzymatically to cut the target RNA. Strategic cleavage of such a target RNA will destroy its ability to direct synthesis of an encoded protein. After an enzymatic nucleic acid has bound and cleaved its RNA target, it is released from that RNA to search for another target and can repeatedly bind and cleave new targets.

[0290] Several approaches such as in vitro selection (evolution) strategies (Orgel, 1979, Proc. R. Soc. London, B 205, 435) have been used to evolve new nucleic acid catalysts capable of catalyzing a variety of reactions, such as cleavage and ligation of phosphodiester linkages and amide linkages, (Joyce, 1989, Gene, 82, 83-87; Beaudry et al., 1992, Science 257, 635-641; Joyce, 1992, Scientific American 267, 90-97; Breaker et al, 1994, TIBTECH 12, 268; Bartel et al, 1993, Science 261 :1411-1418; Szostak, 1993, TIBS 17, 89-93; Kumar et al, 1995, FASEB J., 9, 1183; Breaker, 1996, Curr. Op. Biotech., 1, 442). The development of ribozymes that are optimal for catalytic activity would contribute significantly to any strategy that employs RNA-cleaving ribozymes for the purpose of regulating gene expression. The hammerhead ribozyme, for example, functions with a catalytic rate (kcat) of about 1 min⁻¹ in the presence of saturating (10 MM) concentrations of Mg²⁺ cofactor. An artificial “RNA ligase” ribozyme has been shown to catalyze the corresponding self-modification reaction with a rate of about 100 min⁻¹. In addition, it is known that certain modified hammerhead ribozymes that have substrate binding arms made of DNA catalyze RNA cleavage with multiple turn-over rates that approach 100 min⁻¹.

[0291] Making and Using Inhibitory Nucleic Acids

[0292] The nucleic acid sequences used to practice the methods described herein, whether RNA, cDNA, genomic DNA, vectors, viruses or hybrids thereof, can be isolated from a variety of sources, genetically engineered, amplified, and/or expressed/generated recombinantly. If desired, nucleic acid sequences of the invention can be inserted into delivery vectors and expressed from transcription units within the vectors. The recombinant vectors can be DNA plasmids or viral vectors. Generation of the vector construct can be accomplished using any suitable genetic engineering techniques well known in the art, including, without limitation, the standard techniques of PCR, oligonucleotide synthesis, restriction endonuclease digestion, ligation, transformation, plasmid purification, and DNA sequencing, for example as described in Sambrook et al. Molecular Cloning: A Laboratory Manual. (1989)), Coffin et al. (Retroviruses. (1997)) and “RNA Viruses: A Practical Approach” (Alan J. Cann, Ed., Oxford University Press, (2000)).

[0293] Preferably, inhibitory nucleic acids of the invention are synthesized chemically. Nucleic acid sequences used to practice this invention can be synthesized in vitro by well-known chemical synthesis techniques, as described in, e.g., Adams (1983) J. Am. Chem. Soc. 105:661; Belousov (1997) Nucleic Acids Res. 25:3440-3444; Frenkel (1995) Free Radic. Biol. Med. 19:373-380; Blommers (1994) Biochemistry 33:7886-7896; Narang (1979) Meth. Enzymol. 68:90; Brown (1979) Meth. Enzymol. 68:109; Beaucage (1981) Tetra. Lett. 22:1859; U.S. Pat. No. 4,458,066; WO/2008/043753 and WO/2008/049085, and the refences cited therein.

[0294] Nucleic acid sequences of the invention can be stabilized against nucleolytic degradation such as by the incorporation of a modification, e.g., a nucleotide modification. For example, nucleic acid sequences of the invention includes a phosphorothioate at least the first, second, or third internucleotide linkage at the 5′ or 3′ end of the nucleotide sequence. As another example, the nucleic acid sequence can include a 2′-modified nucleotide, e.g., a 2′-deoxy, 2′-deoxy-2′-fluoro, 2′-O-methyl, 2′-O-methoxyethyl (2′-O-MOE), 2′-O-aminopropyl (2′-O-AP), 2′-O-dimethylaminoethyl (2′-O-DMAOE), 2′-O-dimethylaminopropyl (2′-O-DMAP), 2′-O-dimethylaminoethyloxyethyl (2′-O-DMAEOE), or 2′-O—N-methylacetamido (2′-O—NMA). As another example, the nucleic acid sequence can include at least one 2′-O-methyl-modified nucleotide, and in some embodiments, all of the nucleotides include a 2′-O-methyl modification. In some embodiments, the nucleic acids are “locked,” i.e., comprise nucleic acid analogues in which the ribose ring is “locked” by a methylene bridge connecting the 2′-O atom and the 4′-C atom (see, e.g., Kaupinnen et al., Drug Disc. Today 2(3):287-290 (2005); Koshkin et al., J. Am. Chem. Soc., 120(50):13252-13253 (1998)). For additional modifications see US 20100004320, US 20090298916, and US 20090143326.

[0295] It is understood that any of the modified chemistries or formats of inhibitory nucleic acids described herein can be combined with each other, and that one, two, three, four, five, or more different types of modifications can be included within the same molecule.

[0296] Techniques for the manipulation of nucleic acids used to practice this invention, such as, e.g., subcloning, labeling probes (e.g., random-primer labeling using Klenow polymerase, nick translation, amplification), sequencing, hybridization and the like are well described in the scientific and patent literature, see, e.g., Sambrook et al., Molecular Cloning; A Laboratory Manual 3d ed. (2001); Current Protocols in Molecular Biology, Ausubel et al., eds. (John Wiley & Sons, Inc., New York 2010); Kriegler, Gene Transfer and Expression: A Laboratory Manual (1990); Laboratory Techniques In Biochemistry And Molecular Biology: Hybridization With Nucleic Acid Probes, Part I. Theory and Nucleic Acid Preparation, Tijssen, ed. Elsevier, N.Y. (1993).

[0297] Pharmaceutical Compositions

[0298] The methods described herein can include the administration of pharmaceutical compositions and formulations comprising inhibitory nucleic acid sequences designed to target an RNA.

[0299] In some embodiments, the compositions are formulated with a pharmaceutically acceptable carrier. The pharmaceutical compositions and formulations can be administered parenterally, topically, orally or by local administration, such as by aerosol or transdermally. The pharmaceutical compositions can be formulated in any way and can be administered in a variety of unit dosage forms depending upon the condition or disease and the degree of illness, the general medical condition of each patient, the resulting preferred method of administration and the like. Details on techniques for formulation and administration of pharmaceuticals are well described in the scientific and patent literature, see, e.g., Remington: The Science and Practice of Pharmacy, 21st ed., 2005.

[0300] The inhibitory nucleic acids can be administered alone or as a component of a pharmaceutical formulation (composition). The compounds may be formulated for administration, in any convenient way for use in human or veterinary medicine. Wetting agents, emulsifiers and lubricants, such as sodium lauryl sulfate and magnesium stearate, as well as coloring agents, release agents, coating agents, sweetening, flavoring and perfuming agents, preservatives and antioxidants can also be present in the compositions.

[0301] Formulations of the compositions of the invention include those suitable for intradermal, inhalation, oral/nasal, topical, parenteral, rectal, and/or intravaginal administration. The formulations may conveniently be presented in unit dosage form and may be prepared by any methods well known in the art of pharmacy. The amount of active ingredient (e.g., nucleic acid sequences of this invention) which can be combined with a carrier material to produce a single dosage form will vary depending upon the host being treated, the particular mode of administration, e.g., intradermal or inhalation. The amount of active ingredient which can be combined with a carrier material to produce a single dosage form will generally be that amount of the compound which produces a therapeutic effect, e.g., an antigen specific T cell or humoral response.

[0302] Pharmaceutical formulations of this invention can be prepared according to any method known to the art for the manufacture of pharmaceuticals. Such drugs can contain sweetening agents, flavoring agents, coloring agents and preserving agents. A formulation can be admixtured with nontoxic pharmaceutically acceptable excipients which are suitable for manufacture. Formulations may comprise one or more diluents, emulsifiers, preservatives, buffers, excipients, etc. and may be provided in such forms as liquids, powders, emulsions, lyophilized powders, sprays, creams, lotions, controlled release formulations, tablets, pills, gels, on patches, in implants, etc.

[0303] Pharmaceutical formulations for oral administration can be formulated using pharmaceutically acceptable carriers well known in the art in appropriate and suitable dosages. Such carriers enable the pharmaceuticals to be formulated in unit dosage forms as tablets, pills, powder, dragees, capsules, liquids, lozenges, gels, syrups, slurries, suspensions, etc., suitable for ingestion by the patient. Pharmaceutical preparations for oral use can be formulated as a solid excipient, optionally grinding a resulting mixture, and processing the mixture of granules, after adding suitable additional compounds, if desired, to obtain tablets or dragee cores. Suitable solid excipients are carbohydrate or protein fillers include, e.g., sugars, including lactose, sucrose, mannitol, or sorbitol; starch from corn, wheat, rice, potato, or other plants; cellulose such as methyl cellulose, hydroxypropylmethyl-cellulose, or sodium carboxy-methylcellulose; and gums including arabic and tragacanth; and proteins, e.g., gelatin and collagen. Disintegrating or solubilizing agents may be added, such as the cross-linked polyvinyl pyrrolidone, agar, alginic acid, or a salt thereof, such as sodium alginate. Push-fit capsules can contain active agents mixed with a filler or binders such as lactose or starches, lubricants such as talc or magnesium stearate, and, optionally, stabilizers. In soft capsules, the active agents can be dissolved or suspended in suitable liquids, such as fatty oils, liquid paraffin, or liquid polyethylene glycol with or without stabilizers.

[0304] Aqueous suspensions can contain an active agent (e.g., nucleic acid sequences of the invention) in admixture with excipients suitable for the manufacture of aqueous suspensions, e.g., for aqueous intradermal injections. Such excipients include a suspending agent, such as sodium carboxymethylcellulose, methylcellulose, hydroxypropylmethylcellulose, sodium alginate, polyvinylpyrrolidone, gum tragacanth and gum acacia, and dispersing or wetting agents such as a naturally occurring phosphatide (e.g., lecithin), a condensation product of an alkylene oxide with a fatty acid (e.g., polyoxyethylene stearate), a condensation product of ethylene oxide with a long chain aliphatic alcohol (e.g., heptadecaethylene oxycetanol), a condensation product of ethylene oxide with a partial ester derived from a fatty acid and a hexitol (e.g., polyoxyethylene sorbitol mono-oleate), or a condensation product of ethylene oxide with a partial ester derived from fatty acid and a hexitol anhydride (e.g., polyoxyethylene sorbitan mono-oleate). The aqueous suspension can also contain one or more preservatives such as ethyl or n-propyl p-hydroxybenzoate, one or more coloring agents, one or more flavoring agents and one or more sweetening agents, such as sucrose, aspartame or saccharin. Formulations can be adjusted for osmolarity.

[0305] In some embodiments, oil-based pharmaceuticals are used for administration of nucleic acid sequences of the invention. Oil-based suspensions can be formulated by suspending an active agent in a vegetable oil, such as arachis oil, olive oil, sesame oil or coconut oil, or in a mineral oil such as liquid paraffin; or a mixture of these. See e.g., U.S. Pat. No. 5,716,928 describing using essential oils or essential oil components for increasing bioavailability and reducing inter- and intra-individual variability of orally administered hydrophobic pharmaceutical compounds (see also U.S. Pat. No. 5,858,401). The oil suspensions can contain a thickening agent, such as beeswax, hard paraffin or cetyl alcohol. Sweetening agents can be added to provide a palatable oral preparation, such as glycerol, sorbitol or sucrose. These formulations can be preserved by the addition of an antioxidant such as ascorbic acid. As an example of an injectable oil vehicle, see Minto (1997) J. Pharmacol. Exp. Ther. 281:93-102.

[0306] Pharmaceutical formulations can also be in the form of oil-in-water emulsions. The oily phase can be a vegetable oil or a mineral oil, described above, or a mixture of these. Suitable emulsifying agents include naturally-occurring gums, such as gum acacia and gum tragacanth, naturally occurring phosphatides, such as soybean lecithin, esters or partial esters derived from fatty acids and hexitol anhydrides, such as sorbitan mono-oleate, and condensation products of these partial esters with ethylene oxide, such as polyoxyethylene sorbitan mono-oleate. The emulsion can also contain sweetening agents and flavoring agents, as in the formulation of syrups and elixirs. Such formulations can also contain a demulcent, a preservative, or a coloring agent. In alternative embodiments, these injectable oil-in-water emulsions of the invention comprise a paraffin oil, a sorbitan monooleate, an ethoxylated sorbitan monooleate and/or an ethoxylated sorbitan trioleate.

[0307] The pharmaceutical compounds can also be administered by in intranasal, intraocular and intravaginal routes including suppositories, insufflation, powders and aerosol formulations (for examples of steroid inhalants, see e.g., Rohatagi (1995) J. Clin. Pharmacol. 35:1187-1193; Tjwa (1995) Ann. Allergy Asthma Immunol. 75:107-111). Suppositories formulations can be prepared by mixing the drug with a suitable non-irritating excipient which is solid at ordinary temperatures but liquid at body temperatures and will therefore melt in the body to release the drug. Such materials are cocoa butter and polyethylene glycols.

[0308] In some embodiments, the pharmaceutical compounds can be delivered transdermally, by a topical route, formulated as applicator sticks, solutions, suspensions, emulsions, gels, creams, ointments, pastes, jellies, paints, powders, and aerosols.

[0309] In some embodiments, the pharmaceutical compounds can also be delivered as microspheres for slow release in the body. For example, microspheres can be administered via intradermal injection of drug which slowly release subcutaneously; see Rao (1995) J. Biomater Sci. Polym. Ed. 7:623-645; as biodegradable and injectable gel formulations, see, e.g., Gao (1995) Pharm. Res. 12:857-863 (1995); or, as microspheres for oral administration, see, e.g., Eyles (1997) J. Pharm. Pharmacol. 49:669-674.

[0310] In some embodiments, the pharmaceutical compounds can be parenterally administered, such as by intravenous (IV) administration or administration into a body cavity or lumen of an organ. These formulations can comprise a solution of active agent dissolved in a pharmaceutically acceptable carrier. Acceptable vehicles and solvents that can be employed are water and Ringer's solution, an isotonic sodium chloride. In addition, sterile fixed oils can be employed as a solvent or suspending medium. For this purpose any bland fixed oil can be employed including synthetic mono- or diglycerides. In addition, fatty acids such as oleic acid can likewise be used in the preparation of injectables. These solutions are sterile and generally free of undesirable matter. These formulations may be sterilized by conventional, well known sterilization techniques. The formulations may contain pharmaceutically acceptable auxiliary substances as required to approximate physiological conditions such as pH adjusting and buffering agents, toxicity adjusting agents, e.g., sodium acetate, sodium chloride, potassium chloride, calcium chloride, sodium lactate and the like. The concentration of active agent in these formulations can vary widely, and will be selected primarily based on fluid volumes, viscosities, body weight, and the like, in accordance with the particular mode of administration selected and the patient's needs. For IV administration, the formulation can be a sterile injectable preparation, such as a sterile injectable aqueous or oleaginous suspension. This suspension can be formulated using those suitable dispersing or wetting agents and suspending agents. The sterile injectable preparation can also be a suspension in a nontoxic parenterally-acceptable diluent or solvent, such as a solution of 1,3-butanediol. The administration can be by bolus or continuous infusion (e.g., substantially uninterrupted introduction into a blood vessel for a specified period of time).

[0311] In some embodiments, the pharmaceutical compounds and formulations can be lyophilized. Stable lyophilized formulations comprising an inhibitory nucleic acid can be made by lyophilizing a solution comprising a pharmaceutical of the invention and a bulking agent, e.g., mannitol, trehalose, raffinose, and sucrose or mixtures thereof. A process for preparing a stable lyophilized formulation can include lyophilizing a solution about 2.5 mg/mL protein, about 15 mg/mL sucrose, about 19 mg/mL NaCl, and a sodium citrate buffer having a pH greater than 5.5 but less than 6.5. See, e.g., U.S. 20040028670.

[0312] The compositions and formulations can be delivered by the use of liposomes. By using liposomes, particularly where the liposome surface carries ligands specific for target cells, or are otherwise preferentially directed to a specific organ, one can focus the delivery of the active agent into target cells in vivo. See, e.g., U.S. Pat. Nos. 6,063,400; 6,007,839; Al-Muhammed (1996) J. Microencapsul. 13:293-306; Chonn (1995) Curr. Opin. Biotechnol. 6:698-708; Ostro (1989) Am. J. Hosp. Pharm. 46:1576-1587. As used in the present invention, the term “liposome” means a vesicle composed of amphiphilic lipids arranged in a bilayer or bilayers. Liposomes are unilamellar or multilamellar vesicles that have a membrane formed from a lipophilic material and an aqueous interior that contains the composition to be delivered. Cationic liposomes are positively charged liposomes that are believed to interact with negatively charged DNA molecules to form a stable complex. Liposomes that are pH-sensitive or negatively-charged are believed to entrap DNA rather than complex with it. Both cationic and noncationic liposomes have been used to deliver DNA to cells.

[0313] Liposomes can also include “sterically stabilized” liposomes, i.e., liposomes comprising one or more specialized lipids. When incorporated into liposomes, these specialized lipids result in liposomes with enhanced circulation lifetimes relative to liposomes lacking such specialized lipids. Examples of sterically stabilized liposomes are those in which part of the vesicle-forming lipid portion of the liposome comprises one or more glycolipids or is derivatized with one or more hydrophilic polymers, such as a polyethylene glycol (PEG) moiety. Liposomes and their uses are further described in U.S. Pat. No. 6,287,860.

[0314] The formulations of the invention can be administered for prophylactic and/or therapeutic treatments. In some embodiments, for therapeutic applications, compositions are administered to a subject who is need of reduced triglyceride levels, or who is at risk of or has a disorder described herein, in an amount sufficient to cure, alleviate or partially arrest the clinical manifestations of the disorder or its complications; this can be called a therapeutically effective amount. For example, in some embodiments, pharmaceutical compositions of the invention are administered in an amount sufficient to decrease serum levels of triglycerides in the subject.

[0315] The amount of pharmaceutical composition adequate to accomplish this is a therapeutically effective dose. The dosage schedule and amounts effective for this use, i.e., the dosing regimen, will depend upon a variety of factors, including the stage of the disease or condition, the severity of the disease or condition, the general state of the patient's health, the patient's physical status, age and the like. In calculating the dosage regimen for a patient, the mode of administration also is taken into consideration.

[0316] The dosage regimen also takes into consideration pharmacokinetics parameters well known in the art, i.e., the active agents' rate of absorption, bioavailability, metabolism, clearance, and the like (see, e.g., Hidalgo-Aragones (1996) J. Steroid Biochem. Mol. Biol. 58:611-617; Groning (1996) Pharmazie 51:337-341; Fotherby (1996) Contraception 54:59-69; Johnson (1995) J. Pharm. Sci. 84:1144-1146; Rohatagi (1995) Pharmazie 50:610-613; Brophy (1983) Eur. J. Clin. Pharmacol. 24:103-108; Remington: The Science and Practice of Pharmacy, 21st ed., 2005). The state of the art allows the clinician to determine the dosage regimen for each individual patient, active agent and disease or condition treated. Guidelines provided for similar compositions used as pharmaceuticals can be used as guidance to determine the dosage regiment, i.e., dose schedule and dosage levels, administered practicing the methods of the invention are correct and appropriate.

[0317] Single or multiple administrations of formulations can be given depending on for example: the dosage and frequency as required and tolerated by the patient, the degree and amount of therapeutic effect generated after each administration (e.g., effect on tumor size or growth), and the like. The formulations should provide a sufficient quantity of active agent to effectively treat, prevent or ameliorate conditions, diseases or symptoms.

[0318] In alternative embodiments, pharmaceutical formulations for oral administration are in a daily amount of between about 1 to 100 or more mg per kilogram of body weight per day. Lower dosages can be used, in contrast to administration orally, into the blood stream, into a body cavity or into a lumen of an organ. Substantially higher dosages can be used in topical or oral administration or administering by powders, spray or inhalation. Actual methods for preparing parenterally or non-parenterally administrable formulations will be known or apparent to those skilled in the art and are described in more detail in such publications as Remington: The Science and Practice of Pharmacy, 21st ed., 2005.

[0319] Various studies have reported successful mammalian dosing using complementary nucleic acid sequences. For example, Esau C., et al., (2006) Cell Metabolism, 3(2):87-98 reported dosing of normal mice with intraperitoneal doses of miR-122 antisense oligonucleotide ranging from 12.5 to 75 mg/kg twice weekly for 4 weeks. The mice appeared healthy and normal at the end of treatment, with no loss of body weight or reduced food intake. Plasma transaminase levels were in the normal range (AST ¾ 45, ALT ¾ 35) for all doses with the exception of the 75 mg/kg dose of miR-122 ASO, which showed a very mild increase in ALT and AST levels. They concluded that 50 mg/kg was an effective, non-toxic dose. Another study by Krützfeldt J., et al., (2005) Nature 438, 685-689, injected anatgomirs to silence miR-122 in mice using a total dose of 80, 160 or 240 mg per kg body weight. The highest dose resulted in a complete loss of miR-122 signal. In yet another study, locked nucleic acid molecules (“LNA molecules”) were successfully applied in primates to silence miR-122. Elmen J., et al., (2008) Nature 452, 896-899, report that efficient silencing of miR-122 was achieved in primates by three doses of 10 mg kg-1 LNA-antimiR, leading to a long-lasting and reversible decrease in total plasma cholesterol without any evidence for LNA-associated toxicities or histopathological changes in the study animals.

[0320] In some embodiments, the methods described herein can include co-administration with other drugs or pharmaceuticals, e.g., compositions for providing cholesterol homeostasis. For example, the inhibitory nucleic acids can be co-administered with drugs for treating or reducing risk of a disorder described herein.

### EXAMPLES

[0321] The invention is further described in the following examples, which do not limit the scope of the invention described in the claims.

[0322] Materials and Methods

[0323] The following materials and methods were used in the Examples set forth below.

[0324] Experimental Model and Subject Details

[0325] EL 16.7 (129/Cas) mouse female embryonic stem cells were described previously (Lee and Lu, 1999). Cbx7+/+ and Cbx7−/− mouse embryonic stem cell lines were generated by Dr. Bo Cheng in the laboratory of Dr. T. Kerppola (University of Michigan) as described in (Cheng et al., 2014), and kindly provided by Dr. Xiaojun Ren (University of Colorado). All stem cell lines were routinely maintained in 500 U/ml LIF, DME, and 15% FCS on gamma-irradiated mouse embryonic fibroblasts feeder layer. For differentiation, 7×10⁵ cells were plated on pre-gelatinized 150 mm TC plates and grown in monolayer for 7 days in DME+15% FBS without LIF. HEK293 cells were routinely maintained in DME+10% FBS.

[0326] Stable Transfection

[0327] The following plasmid vectors were used for stable transfection into EL16.7 ES cells:

[0328] pCAGGS—mouse CBX7-Flag-HA-IRES-Puro-GFP plasmid was used for stable expression of HA-tagged CBX7 for ChIP-seq experiments. pCAGGS-IRES-Puro-GFP plasmid was a kind gift from Dr. Mitinori Saitou (Kyoto University, Japan).

[0329] pEF1aBirAV5His plasmid was utilized for stable expression of V5-His-tagged BirA bacterial biotinylase in EL16.7 ES cells.

[0330] pEF1a-Flag-biotag-PGKpuro-mCBX7 and pEF1a-Flag-biotag-PGKpuro-mRYBP plasmids were employed for stable transfection of mouse CBX7 and RYBP carrying biotinylation tag in EL16.7 cells expressing BirA biotinylase.

[0331] pCAG-Avi-GFP-hCBX7-IRES-Puro plasmid was employed for stable transfection of human CBX7 carrying biotinylation tag in HEK293 cells expressing BirA biotinylase.

[0332] pEF1aBirAV5His and pEF1-Flag-Biotag plasmid vectors were a kind gift from Dr. Stuart Orkin (Harvard Medical School) and have been described previously by Kim et al (Kim et al., 2009).

[0333] pCAG-Avi-GFP-IRES-Puro plasmid was a kind gift from Dr. Mitinori Saitou, Department of Anatomy and Cell Biology, Graduate School of Medicine, Kyoto University.

[0334] To create mouse ES cells with stable expression of recombinant proteins, EL 16.7 mouse ES cells were grown to 70% confluence on embryonic feeder layer in T75 flasks. Cells were trypsinized and 2×10⁷ cells electroporated with 30 μg of linearized vector in PBS using GenePulser II (Bio-Rad). Positive cells were selected using growth media supplemented with 1 μg/ml Puromycin (Gibco) alone or in combination with 300 μg/ml G418. To create HEK293 cells with stable expression of recombinant proteins, cells were grown to 70% confluence in T75 flasks. Cells were trypsinized and 1×10⁷ cells electroporated with 15 μg of linearized vector in PBS using GenePulser II (Bio-Rad). Positive cells were selected using growth media supplemented with 1 μg/ml Puromycin (Gibco) alone or in combination with 300 μg/ml G418. Stable transfection and expression of recombinant proteins was confirmed by PCR genotyping and Western blotting with specific antibodies.

[0335] CLIP Method—Small Scale

[0336] The conventional CLIP method was performed as described previously (Jeon and Lee, 2011). Cells were grown to full confluence in 15 cm tissue culture dishes. Medium was then aspirated and cells were washed with 10 ml ice-cold phosphate-buffered saline (PBS) (containing 8.1 mM Na₂HPO₄, 1.45 mM KH₂PO₄, 137 mM NaCl, 2.7 mM KCL, pH 7.4). To covalently cross-link protein-RNA complexes in vivo, ice-cold PBS (5 ml) was added to cells, lid was removed and cells were exposed to 400 mJ/cm² irradiation in a wavelength of 254 nm. After adding 5 ml of ice-cold PBS, cross-linked cells were scraped and collected into 16 ml tubes. Cells were pelleted by 5 min centrifugation (1,000×G) in 4° C. Supernatant was removed and cell pellets were shock-frozen in liquid nitrogen and stored in −80° C. Protein G Dynabeads (Life Technologies) were utilized for pre-clearing and immunoprecipitation. Beads were thoroughly resuspended, and a volume of beads corresponding to 20 μl beads×number of samples+5 μl was transferred into a clean 1.5 ml tube. Beads were then captured on magnetic separator. Pre-clearing beads were washed 3 times with 1 ml lysis buffer (PBS supplemented with 1 mM MgCl₂, 0.1 mM CaCl₂, 0.5% Nonidet-P-40, and 0.5% Sodium Deoxycholate). Beads were resuspended in 100 μl lysis buffer per 20 μl beads and 100 μl portions transferred into 1.5 ml tubes. Beads for immunoprecipitation were washed 3 times with 1 ml lysis buffer (PBS supplemented with 1 mM MgCl₂, 0.1 mM CaCl₂, 0.5% Nonidet-P-40, and 0.5% Sodium Deoxycholate)+0.5% BSA. Beads were resuspended in 100 μl lysis buffer per 20 μl beads and 100 μl portions transferred into 1.5 ml tubes. 400 μl lysis buffer+0.5% BSA+5 μg of specific antibody were added and beads incubated 4 hrs in 4° C. on a rotatory wheel. To prepare cell lysate, cell pellets (1 pellet for each cell type) were resuspended in 1.25 ml of ice-cold lysis buffer supplemented with 1 tablet of Complete-mini EDTA-free tablet (Roche), 40 u/ml protector RNAse inhibitor (Roche), 1 mM Dithiothreitol (DTT), and transferred into 2 ml tube followed by 25 min incubation in 4° C. on rotatory wheel. After a brief spin down, 25 μl (50 U) of TurboDNAse (Life Technologies) were added to each tube. The entire content of each tube was then split equally between four 1.5 ml tubes. Two dilutions of RNAse I (Life Technologies) in lysis buffer containing additives were prepared: 10-fold (10 u/ml) and 100-fold (1 u/ml). Per each of the cell lines, three samples were prepared in growing concentrations of RNAse I: (1) undiluted RNAse I (×1) (2) 10-fold diluted, and (3) 100-fold diluted. Volume of RNAse I solution corresponded to 1/100th of total sample volume. The final dilutions of RNAse I were correspondingly 100-fold, 1,000-fold and 10,000-fold. In parallel, a fourth sample, untreated with RNAse I, was prepared and used as immunoprecipitation control for Western Blotting. Samples were thoroughly mixed, incubated for 15 min in a 37° C. water bath, and were gently mixed every 5 min. After a brief spin-down, each sample received 6 μl (12 U) of SuperRNAseIN (Life Technologies) 10-fold diluted in lysis buffer. Sodium dodecyl sulfate (SDS) concentrations per each sample were further brought up to 0.1% following by addition of 1/100th volume of 10% SDS. After 10 min 21,130×G centrifugation in 4° C., supernatant was transferred into a clean 1.5 ml tube and sample was centrifuged for another 10 min 21,130×G in 4° C. to remove remaining cell debris. 1.5 ml tubes supplemented with 100 μl of pre-clearing beads were put on magnetic separator and lysis buffer was removed. The entire supernatant from the previous step was placed on the beads and samples were further incubated 1 hr in 4° C. on a rotatory wheel. After capturing pre-clearing beads on magnetic separator, pre-cleared lysate samples were transferred into 1.5 ml tubes with protein G-antibody complex and incubated for 16 hrs in 4° C. on a rotatory wheel. Samples were placed on a magnetic separator and supernatant was removed. Samples were washed twice with 1 ml high-salt buffer (PBS supplemented with 750 mM NaCl, 1% Nonidet-P-40, 0.5% NaDeoxycholate, and 0.1% SDS) and three times with 1 ml low-salt buffer (PBS supplemented with 150 mM NaCl, 1% Nonidet-P-40, 0.5% NaDeoxycholate, and 0.1% SDS) for 5 min at 4° C. on a rotatory wheel per every wash, following by supernatant removal on a magnetic separator. IP control samples received 40 μl of NuPage 3× LDS sample buffer (Life Technologies), or alternatively, 40 μl SDS sample buffer ×1 (80 mM Tris pH 6.8, 2% SDS, 100 mM DTT, and 10% Glycerol). In the remaining RNAse-treated samples, beads were resuspended in 400 μl 1× DNAse buffer (Life Technologies) and incubated for 5 min at 4° C. on a rotatory wheel followed by subsequent supernatant removal on a magnetic separator. Beads were resuspended in 40 μl of DNAse mix (1× DNAse buffer, 0.1 u/μl Turbo DNAse, 0.1 u/μl SUPERasin (Life Technologies), 100-fold diluted EDTA-free protease inhibitors mix (Sigma), 0.4 u/μl Protector RNAse inhibitor) and incubated at 37° C. for 30 min. After a brief spin down, beads were placed on a magnetic rack and supernatant was removed. One wash with 0.5 ml low-salt washing buffer was performed for 5 min at 4° C. placed on a rotatory wheel. Supernatant was removed on a magnetic separator. For phosphorylation of 5′ ends, supernatant was removed on a magnetic separator and beads were washed once in 1 ml of PNK buffer (50 mM Tris pH 7.4, 10 mM MgCl₂, 5 mM DTT, 0.5% Nonidet-P-40) for 5 min at 4° C. placed on a rotatory wheel. Beads were then resuspended in 20 μl of PNK mix (per sample, 20 μl PNK buffer, 1 μl ³²P-gamma-ATP, 0.5 μl (5 U) T4 Polynucleotide Kinase (PNK) (NEB)) and incubated at 37° C. for 20 min. Beads were captured and supernatant was removed on a magnetic separator. Beads were instantly washed 3 times with 0.5 ml of ice-cold PNK washing buffer (50 mM Tris pH 7.4, 150 mM NaCl, 0.5% Nonidet-P-40, 10 mM EDTA). After the last wash, beads were resuspended in 40 μl of NuPage 3× LDS sample buffer (Life Technologies), or alternatively, in 40 μl of SDS sample buffer ×1 (80 mM Tris pH 6.8, 2% SDS, 100 mM DTT, 10% Glycerol). 3× LDS samples were incubated at 80° C. for 10 min. Samples with 1× SDS sample buffer were incubated at 95° C. for 5 min. Samples were then loaded on 1 mm NuPage 4%-12% Bis-Tris gradient gel (Life Technologies), and electrophoresis on 200V was performed using NuPage MOPS/SDS running buffer (50 mM Tris base, 50 mM MOPS, 0.1% SDS, 1 mM EDTA, pH 7.7). Transfer into nitrocellulose membranes was performed for 1 hr under 140 mA at 4° C., soaking in NuPage 1× transfer buffer (25 mM Bicine, 25 mM Bis-Tris (free base) 1 mM EDTA pH 7.2) supplemented with 12% methanol. Membrane was wrapped in saran plastic wrap and exposed to phosphoimager screen.

[0337] Denaturing CLIP Method—Small Scale

[0338] To perform the denaturing CLIP method, we raised by DNA vectors transfection, following by antibiotic selection, several cell lines expressing (1) a bacterial biotin ligase BirA vector carrying a neomycin-resistance marker, along with (2) a puromycin resistance expression vector of mouse CBX7 fused to a biotinylation tag. An empty biotinylation vector was alternatively transfected for generating control cell lines. Cells were grown to full confluence in 15 cm tissue culture dishes. Medium was then aspirated and cells were washed with 10 ml ice-cold phosphate-buffered saline (PBS) (containing 8.1 mM Na₂HPO₄, 1.45 mM KH₂PO₄, 137 mM NaCl, 2.7 mM KCL, pH 7.4). To covalently cross-link protein-RNA complexes in vivo, ice-cold PBS (5 ml) was added to cells, lid was removed and cells were exposed to 400 mJ/cm² irradiation in a wavelength of 254 nm. Day 7 differentiated cells grown in monolayer as well as HEK293 cells were exposed to 150 mJ/cm² irradiation in a wavelength of 254 nm. After adding 5 ml of ice-cold PBS, cross-linked cells were scraped and collected into 16 ml tubes. Cells were pelleted by 5 min centrifugation (1,000×G) in 4° C. Supernatant was removed and cell pellets were shock-frozen in liquid nitrogen and stored in −80° C. For performing protein pull-down, two types of magnetic beads were employed: (1) Protein G Dynabeads (for pre-clearing), and (2) Dynabeads® MyOne™ Streptavidin C1 (for biotinylated protein pull-down)—both bead types from Life Technologies. Beads were thoroughly resuspended, and a volume of beads corresponding to 20 μl beads×number of samples+5 μl was transferred into a clean 1.5 ml tube. Beads were then captured on magnetic separator. Pre-clearing beads were washed 3 times with 1 ml lysis buffer (PBS supplemented with 1 mM MgCl₂, 0.1 mM CaCl₂, 0.5% Nonidet-P-40, and 0.5% Sodium Deoxycholate). Streptavidin beads were washed 3 times with 1 ml lysis buffer containing 0.5% Bovine serum albumin (BSA). Beads were resuspended in 100 μl lysis buffer per 20 μl beads and 100 μl portions transferred into 1.5 ml tubes. Cell lysate was prepared the following manner: Cell pellets (1 pellet for each cell type) were resuspended in 1.25 ml of ice-cold lysis buffer (supplemented with 1 tablet of Complete-mini EDTA-free tablet (Roche), 40 u/ml protector RNAse inhibitor (Roche), 1 mM Dithiothreitol (DTT)), and transferred into 2 ml tube following by 25 min incubation in 4° C. on rotatory wheel. After a brief spin down, 25 μl (50 U) of TurboDNAse (Life Technologies) were added to each tube. The entire content of each tube was then split equally between four 1.5 ml tubes. Two dilutions of RNAse I (Life Technologies) in lysis buffer containing additives were prepared: 10-fold (10 u/ml) and 100-fold (1 u/ml). Per each of the cell lines, three samples were prepared in growing concentrations of RNAse I: (1) undiluted RNAse I (×1) (2) 10-fold diluted, and (3) 100-fold diluted. Volume of RNAse I solution corresponded to 1/100th of total sample volume. The final dilutions of RNAse I were correspondingly: 100-fold, 1,000-fold and 10,000-fold. In parallel, a fourth sample, untreated with RNAse I, was prepared and used as a pull-down control for Western Blotting. Samples were thoroughly mixed, incubated for 15 min in a 37° C. water bath, and were gently mixed every 5 min. After a brief spin-down, each sample received 6 μl (12 U) of SuperRNAseIN (Life Technologies) 10-fold diluted in lysis buffer. Sodium dodecyl sulfate (SDS) concentrations per each sample were further brought up to 0.1% following by addition of 1/100th volume of 10% SDS. After 10 min 21,130×G centrifugation in 4° C., supernatant was transferred into a clean 1.5 ml tube and samples were centrifuged for another 10 min 21,130×G in 4° C. to remove remaining cell debris. 1.5 ml tubes supplemented with 100 μl of pre-clearing beads were put on magnetic separator and lysis buffer was removed. The entire supernatant from the previous step was placed on the beads and samples were further incubated for 1 hr in 4° C. on a rotatory wheel. 1.5 ml tubes containing streptavidin beads were placed on a magnetic separator and any excess of lysis buffer was removed. After capturing pre-clearing beads on magnetic separator, pre-cleared lysate samples were transferred into 1.5 ml tubes supplemented with streptavidin beads and incubated for 2 hrs in 4° C. on a rotatory wheel. Samples were placed on a magnetic separator and supernatant was removed. Samples were washed twice with 0.5 ml wash buffer 1 (PBS containing 8M Urea and 0.1% SDS) for 5 min at room temperature swirling on rotatory wheel. Supernatant was removed by employing magnetic separator each time. Samples were washed twice with 0.5 ml Urea wash buffer (PBS+8M urea+0.1% SDS) and twice with 0.5 ml SDS wash buffer (PBS+2% SDS) for 5 min at room temperature and were swirled on a rotatory wheel. Supernatant was removed on magnetic separator per each cycle. One wash was performed with 0.5 ml high-salt buffer (PBS supplemented with 750 mM NaCl, 1% Nonidet-P-40, 0.5% NaDeoxycholate, and 0.1% SDS) and one time with 0.5 ml low-salt buffer (PBS supplemented with 150 mM NaCl, 1% Nonidet-P-40, 0.5% NaDeoxycholate, and 0.1% SDS) for 5 min at 4° C. on a rotatory wheel per every wash, following by supernatant removal on a magnetic separator. IP control samples received 40 μl of NuPage 3× LDS sample buffer (Life Technologies), or alternatively, 40 μl SDS sample buffer ×1 (80 mM Tris pH 6.8, 2% SDS, 100 mM DTT, and 10% Glycerol). In the remaining RNAse-treated samples, beads were resuspended in 400 μl 1× DNAse buffer (Life Technologies) and incubated for 5 min at 4° C. on a rotatory wheel followed by subsequent supernatant removal on a magnetic separator. Beads were resuspended in 40 μl of DNAse mix (1× DNAse buffer, 0.1 u/μl Turbo DNAse, 0.1 u/μl SUPERasin (Life Technologies), 100-fold diluted EDTA-free protease inhibitors mix (Sigma), 0.4 u/μl Protector RNAse inhibitor) and incubated at 37° C. for 30 min. After a brief spin down, beads were placed on a magnetic rack and supernatant was removed. One wash with 0.5 ml low-salt washing buffer was performed for 5 min at 4° C. placed on a rotatory wheel. Supernatant was removed on a magnetic separator. For phosphorylation of 5′ ends, supernatant was removed on a magnetic separator and beads were washed once in 0.5 ml of PNK buffer (50 mM Tris pH 7.4, 10 mM MgCl₂, 5 mM DTT, 0.5% Nonidet-P-40) for 5 min at 4° C. placed on a rotatory wheel. Beads were then resuspended in 20 μl of PNK mix (per sample, 20 μl PNK buffer, 1 μl ³²P-gamma-ATP, 0.5 μl (5 U) T4 Polynucleotide Kinase (PNK) (NEB)) and incubated at 37° C. for 20 min. Beads were captured and supernatant was removed on a magnetic separator. Beads were instantly washed 3 times with 0.5 ml of ice-cold PNK washing buffer (50 mM Tris pH 7.4, 150 mM NaCl, 0.5% Nonidet-P-40, 10 mM EDTA). After the last wash, beads were resuspended in 40 μl of NuPage 3× LDS sample buffer (Life Technologies), or alternatively, in 40 μl of SDS sample buffer ×1 (80 mM Tris pH 6.8, 2% SDS, 100 mM DTT, 10% Glycerol). 3× LDS samples were incubated at 80° C. for 10 min. Samples in 1× SDS sample were incubated at 95° C. for 5 min. Samples were then loaded on lmm NuPage 4%-12% Bis-Tris gradient gel (Life Technologies), and electrophoresis on 200V was performed using NuPage MOPS/SDS running buffer (50 mM Tris base, 50 mM MOPS, 0.1% SDS, 1 mM EDTA, pH 7.7). Transfer into nitrocellulose membranes was performed for 1 hr under 140 mA at 4° C., soaking in NuPage 1× transfer buffer (25 mM Bicine, 25 mM Bis-Tris (free base) 1 mM EDTA pH 7.2) supplemented with 12% methanol. Membrane was wrapped in saran plastic wrap and exposed to phosphoimager screen.

[0339] Denaturing CLIP Method—Large Scale for Library Preparation.

[0340] For large-scale denaturing CLIP method, UV treatment of cells was performed as described above for small scale dCLIP method. Two kinds of magnetic beads were used for the experiment: Protein G Dynabeads (for Pre-clearing) and Dynabeads® MyOne™ Streptavidin C1 (for a Pull-down of biotinylated protein). Beads were thoroughly resuspended and volume of beads corresponding to 80 μl beads×number of cell pellets+5 μl was transferred into clean 2 ml tubes. Beads were captured on magnetic separator. Pre-clearing beads were washed 3 times with 1 ml lysis buffer (PBS+1 mM MgCl₂+0.1 mM CaCl₂+0.5% Nonidet-P-40+0.5% Sodium Deoxycholate). Streptavidin beads were washed 3 times with 1 ml lysis buffer+0.5% Bovine serum albumin (BSA) Beads were resuspended in 150 μl lysis buffer per 80 μl beads and 150 μl portions transferred into 2 ml tubes. Lysate was prepared the following way. Cell pellets (2 pellets for each cell type) were resuspended each in 1.25 ml of ice-cold lysis buffer supplemented with 1 tablet of Complete-mini EDTA-free tablet (Roche)+40 u/ml Protector RNAse inhibitor (Roche)+1 mM Dithiothreitol (DTT), delivered into 2 ml tubes and incubated for 25 min at 4° C. on rotatory wheel. After brief spin down, 25 μl (50 u) of TurboDNAse (Life Technologies) were added to every tube. The entire content of the tube was transferred to the new 2 ml tube in order to estimate the volume. 2 dilutions of RNAse I (Life Technologies) in lysis buffer+additives were prepared: 100-fold (1 u/ml) and 500-fold (0.2 u/ml) For each cell type, one sample received 100-fold and one sample received 500-fold diluted RNAse I. Volume of RNAse I solution corresponded to 1/100th of total estimated sample. Samples were mixed well and incubated 15 min in 37° C. water bath with mixing up-and-down every 5 min. After brief spin-down, each sample received 24 μl (48 u) of SuperRNAseIN (Life Technologies) diluted 10-fold in lysis buffer. In addition, the sodium dodecyl sulfate (SDS) concentration in each sample was brought up to 0.1% following addition of + 1/100th volume of 10% SDS. After 10 min 21,130×G 4° C. centrifugation, sup was delivered into clean 2 ml tubes and samples centrifuged another 10 min 21,130×G 4° C. to remove remaining cell debris. 2 ml tubes with 150 μl of pre-clearing beads were placed on magnetic separator and lysis buffer removed. The entire sup from the previous step was placed on the beads and samples incubated 1 hr 4° C. on rotatory wheel. 2 ml tubes with Streptavidin beads were placed on magnetic separator and excess lysis buffer removed. After capturing pre-clearing beads on magnetic separator, pre-cleared lysate was transferred into 2 ml tubes with Streptavidin beads and incubated 2 hrs 4° C. on rotatory wheel. Samples were placed on magnetic separator and sup removed. Samples were washed 2 times with 1.2 ml Urea wash buffer (PBS+8M Urea+0.1% SDS) for 5 min on room temperature using rotatory wheel. Sup was removed on magnetic separator every time. Samples were washed 2 times with 1.2 ml SDS wash buffer (PBS+2% SDS) for 5 min on room temperature using rotatory wheel. Sup was removed on magnetic separator every time. One wash was performed with 1.2 ml high-salt buffer (PBS+750 mM NaCl+1% Nonidet-P-40+0.5% NaDeoxycholate+0.1% SDS) and one wash with low-salt buffer (PBS+150 mM NaCl+1% Nonidet-P-40+0.5% NaDeoxycholate+0.1% SDS), 5 min 4° C. on rotatory wheel for every wash with subsequent sup removal on magnetic separator. Beads were resuspended in 800 μl 1× DNAse buffer, transferred into 1.5 ml tubes and incubated for 5 min 4° C. on rotatory wheel with subsequent sup removal on magnetic separator. Beads were resuspended in 160 μl of DNAse mix (1× DNAse buffer, 0.1 u/μl Turbo DNAse, 0.1 u/μl SUPERasin (Life Technologies), 100-fold diluted EDTA-free protease inhibitors mix (Sigma), 0.4 u/μl Protector RNAse inhibitor) and incubated at 37° C. on rotatory wheel for 30 min. After brief spin down, beads were placed on magnetic rack and sup removed. One wash with 1 ml low-salt wash buffer was performed 5 min 4° C. on rotatory wheel. Sup removed on magnetic separator. For 3′ends dephosphorylation, beads were washed once in 1 ml of Low_pH_PNK buffer (70 mM Tris pH 6.5, 10 mM MgCl₂, 5 mM DTT) 5 min 4° C. on rotatory wheel. Low-pH-PNK mix (per sample, 80 μl Low_pH_PNK buffer, 2 μl (20 u) T4 polynucleotide kinase (T4 PNK) (NEB), 2 μl (80 u) Protector RNAse inhibitor) was prepared. Beads resuspended in 80 μl of Low-pH-PNK mix and incubated at 37° C. for 20 min on Thermomixer, vortexing on 1,000RPM for 15 sec every 2 min. For subsequent phosphorylation of 5′ ends, sup was removed on magnetic separator and beads washed once in 1 ml of PNK buffer (50 mM Tris pH 7.4, 10 mM MgCl₂, 5 mM DTT, 0.5% Nonidet-P-40) 5 min 4° C. on rotatory wheel. Beads were resuspended in 80 μl of PNK mix (per sample, 80 μl PNK buffer, 4 μl ³²P-gamma-ATP, 3 μl (30 u) T4 PNK, 2 μl (80 u) Protector RNAse inhibitor) and incubated at 37° C. for 10 min. After adding 8 μl 10 mM ATP, samples were incubated additional 20 min at 37° C. Beads were captured and sup removed on magnetic separator. Beads were instantly washed 3 times with 1 ml of ice-cold PNK wash buffer (50 mM Tris pH 7.4, 150 mM NaCl, 0.5% Nonidet-P-40, 10 mM EDTA). After last wash, beads were resuspended in 85 μl of 1× SDS sample buffer (80 mM Tris pH 6.8, 2% SDS, 100 mM DTT, 10% Glycerol) and incubated at 95° C. for 5 min. Samples were loaded on 1.5 mm NuPage 4%-12% Bis-Tris gradient gels (Life Technologies)—40 μl per lane, and electrophoresis on 200V was performed using NuPage MOPS/SDS running buffer (50 mM Tris base, 50 mM MOPS, 0.1% SDS, 1 mM EDTA, pH 7.7). Transfer into nitrocellulose membranes was performed for 1.5 hrs 140 mA on 4° C. in NuPage 1× transfer buffer (25 mM Bicine, 25 mM Bis-Tris (free base) 1 mM EDTA pH 7.2)+12% methanol. Membrane was wrapped in Saran plastic wrap and briefly exposed to phosphoimager screen.

[0341] Samples that were subjected for beads elution protocol, were treated with PNK mix supplemented with 8 μl 10 mM ATP and incubated at 37° C. for 30 min. Samples were washed twice with 1 ml Urea wash buffer (PBS+8M Urea+0.1% SDS) and once with Proteinase K buffer (100 mM Tris pH 8.0, 200 mM NaCl, 5 mM EDTA, 0.1% SDS) for 5 min on room temperature using rotatory wheel. Beads were resuspended in 200 μl Proteinase K mix (100 mM Tris pH 8.0, 200 mM NaCl, 5 mM EDTA, 0.1% SDS, lmg/ml Proteinase K (PCR grade, Roche, 20 mg/ml)) and incubated 30 min at 55° C. using rotatory wheel. After brief spin-down and beads capture on magnetic separator, eluted RNA from 2 combined samples (400 μl total) was transferred into phase-lock gel 2 ml tubes (5 Prime) (pre-centrifuged 30 sec 16,000×G to pellet gel), and 400 μl acidic phenol-chloroform (Life Technologies) were added. After rigorous up-and-down shaking to mix the phases, samples were centrifuged 5 min 16,000×G on room temperature. Another 400 μl of acidic phenol-chloroform were added to the upper aqueous phase with subsequent rigorous up-and-down shaking to mix the phases and 5 min 16,000×G centrifugation on room temperature. Upper phase was transferred into clean 1.5 ml tubes with 40 μl 3M Sodium Acetate. After addition of 1 μl Glycoblue (Life Technologies) and 1 ml 100% ethanol, samples were mixed by up-and-down shaking and incubated at least 16 hrs on −20° C.

[0342] Elution of Protein-Bound RNAs from Membrane

[0343] For membrane elution, PK solution (100 mM Tris pH 7.4, 50 mM NaCl, 10 mM EDTA, 4 mg/ml Proteinase K (Roche)) was prepared and pre-incubated for 10-20 min at room temperature to eliminate possible RNAse contamination. All the solutions were filtered through 0.22 μm membrane filter before adding Proteinase K. Membrane pieces were excised using a sterile scalpel starting from protein of interest size+10 kda (corresponding to approximately 30 bases of RNA fragments covalently linked to the protein of interest) up to the end of visible radioactive signal specific to the protein of interest. Addition of 10 kDa to the original protein size allows for binding of roughly 30 bases of RNA in complex with the protein of interest. The goal was to avoid purifying CBX7 crosslinked to RNAs shorter than 30 bases, as the shorter RNAs would be more difficult to sequence and align to the genome with high confidence level. Membrane pieces were further cut into smaller pieces and placed into low-binding 1.5 ml tubes. After addition of 200 μl PK buffer, membrane pieces were incubated for 20 min at 55° C. in Thermomixer with constant vortexing on 1,200 RPM. Meanwhile, PK-urea solution was prepared (100 mM Tris pH 7.4, 50 mM NaCl, 10 mM EDTA, 7M urea). All the solutions except for urea were filtered through 0.22 μM membrane filter before preparation. 200 μl of PK-urea solution was further added to membrane pieces. Samples were incubated for 20 min at 55° C. in Thermomixer with constant vortexing on 1,200 RPM. After brief spin-down, the eluates were transferred into phase-lock gel 2 ml tubes (5 Prime) (pre-centrifuged 30 sec 16,000×G to pellet gel), and 400 μl acidic phenol-chloroform (Life Technologies) were added. After rigorous up-and-down shaking to mix the phases, samples were centrifuged 5 min 16,000×G on room temperature. Another 400 μl of acidic phenol-chloroform were added to the upper aqueous phase with subsequent rigorous up-and-down shaking to mix the phases and 5 min 16,000×G centrifugation on room temperature. Upper phase was transferred into clean 1.5 ml tubes with 40 μl 3M Sodium Acetate. After addition of 1 μl Glycoblue (Life Technologies) and lml 100% ethanol, samples were mixed by up-and-down shaking and incubated at least 16 hrs on −20° C.

[0344] Library Preparation from Membrane-Eluted and Beads-Eluted Samples

[0345] Membrane-eluted or beads-eluted samples were centrifuged for 30 min 13,523×G on 4° C. and sup removed. Pellets were washed once with 1 ml 75% ethanol in DEPC-treated water with subsequent 10 min 13,523×G centrifugation on 4° C. After sup removal and short spin down, the remaining ethanol solution was carefully removed and pellets incubated 5-10 min with open cup on room temperature inside a PCR workstation under constant airflow. Pellets were eluted in 25 μl DNAse mix and 2 samples that belonged to the same cell type with different RNAse concentrations combined into one sample (DNAse mix: per combined sample, 43 μl nuclease-free DDW, 5 μl 10× DNAse buffer, 1 μl (40 u) Protector RNAse inhibitor, 1 μl (2 u) of Turbo-DNAse (Life Technologies). Samples were incubated 30 min on 37° C. RNA was extracted using 950 μl Trizol reagent (Life Technologies) according to the manufacturer instructions. 0.5 μl Glycoblue were used for precipitation during Trizol extraction. RNA pellets were eluted with 8 μl nuclease-free DDW. Samples were incubated for 2 min on 70° C. to reduce the secondary structure and then kept on ice. Multiplex Compatible NEBNext Small RNA Library Prep Set for Illumina (NEB) was used for library preparation according to manufacturer instructions with the following modifications. 7 μl of eluted RNA were used for library preparation. All the adapters and primers used throughout a procedure were diluted 12-fold. SuperScript III Reverse Transcriptase (Life Technologies) and Protector RNAse inhibitor (Roche) replaced M-MuLV reverse transcriptase and Murine RNAse inhibitor respectively. 25 PCR amplification cycles were performed on the resulting cDNA using multiplexed primers with Illumina barcodes—distinct barcode for every cell type. Amplification was performed with LongAmp™ Taq 2× Master Mix (NEB). Amplified PCR products were subjected to PAGE electrophoresis on 6% TBE-acrylamide gel. The area between 160 bp and 520 bp was excised, gel pieces crushed into slurry with 1 ml syringe plunger and PCR products eluted by overnight incubation on room temperature in 400 μl Gel elution buffer (NEB) inside a 1.5 ml low-binding tubes. One glass filter (Whatman, 1823010) was placed into Costar SpinX column (Cornig, 8161). The suspension from the previous step was placed on the column and centrifuged on 15,871×G on room temperature for 1 min. Eluates were subjected to ethanol precipitation following addition of 40 μl 3M Sodium Acetate, 1 μl Glycoblue and lml 100% ethanol. After incubating for at least 30 min on −20° C., samples were centrifuged for 30 min 13,523×G on 4° C. and sup removed. Pellets were washed once with 1 ml 70% ethanol with subsequent 10 min 13,523×G centrifugation on 4° C. After sup removal and short spin down, the remaining ethanol solution was carefully removed and pellets incubated 5-10 min with open cap on room temperature inside a PCR workstation under constant airflow. Pellets were eluted in 12 μl nuclease-free water. Size distribution of PCR products was determined by Bioanalyzer run with 1 μl of each sample loaded on High Sensitivity DNA chip (Agillent). Quantification of PCR products was performed by Illumina Library Quantification kit (Kapa Biosystems). Equivalent amounts of multiplexed samples were pooled into final library—1.5 nM-2 nM per multiplexed sample. Total of 3 to 5 samples were pooled into one library.

[0346] Gene Expression

[0347] RNA was extracted from cells with Trizol reagent (Life Technologies) according to manufacturer instructions. cDNA libraries were constructed using Superscript III reverse-transcriptase (Life Technologies) and qPCR was performed with primers spanning exon-exon junctions. For studies involving intronic primers (FIG. 6D,E), contaminating DNA was removed from RNA prior to reverse transcription by Turbo DNA-free kit (Life Technologies). Primer sequences are given in Table a.

TABLE a
LNA ASO oligomers, primers, and RNA-EMSA probes used in this study.
LNA Oligomers

| Target Gene | LNA I.D | LNA sequence | SEQ ID NO. |
|---|---|---|---|
| Dusp9 | Dusp9-1-a | CCTACAGTTCCAAGAAGTCTAA | 36405 |
| | Dusp9-1-b | GAAGCAGGAAGGAGTCTACACG | 36406 |
| | Dusp9-2-a | CAGTTTGACCACCCTCAGTCAC | 36407 |
| | Dusp9-2-b | AAAGAAACAGTCAGGGCACCAG | 36408 |
| | Dusp9-3-a | CACAGGTATTGCCAGCTCCAGG | 36409 |
| | Dusp9-3-b | CACACACACAGAGTCTACAACG | 36410 |
| Dcaf1211 | Dcaf12I1-1 | CCTGTCTGCCATACATTCTACA | 36411 |
| | Dcaf12I1-2 | GCTCAGACTTCTTCCTTTGCAC | 36412 |
| | Dcaf12I1-3 | GTAACAGATCTATTCTACTTGA | 36413 |
| | Dcaf12I1-4-a | CATTATCTCTATTTATCTGAAC | 36414 |
| | Dcaf12I1-4-b | GGAGAAAACCAATCTATCCGCA | 36415 |
| Calm2 | Calm2-1-a | GCCAGAGTAAGCCACATGCAAC | 36416 |
| | Calm2-1-b | TTAGATGTGCAGACGGGCTTAG | 36417 |
| | Calm2-2-a | TTACAGCTCCACACTTCAACAAC | 36418 |
| | Calm2-2-b | ACATGCTGACAGTTCCTAAAAG | 36419 |
| Control LNAs | LNA-Scr | GTGTAACACGTCTATACGCCCA | 36420 |
| | Negative control | TAACACGTCTATACGCCCA | 36421 |
| | A | | |

Native RIP-qPCR primers

| | | |
|---|---|---|
| Tug1_F | CAG GTC TGT AGG CTG ATG GAG | SEQ ID NO. 36422 |
| Tug1_R | AAG TGA ACT ACG TCC CGT GC | SEQ ID NO. 36423 |
| Dusp9_4F | TCA CAC AGC CAC TGT TGG TT | SEQ ID NO. 36424 |
| Dusp9_4R | GTC CTG CTG CCA CAG GTA TT | SEQ ID NO. 36425 |
| Calm2_F | GCA GAA CTG CAG GAC ATG AT | SEQ ID NO. 36426 |
| Calm2_R | CAA ACA CAC GGA ATG CTT CT | SEQ ID NO. 36427 |
| U1-F | GGAAATCATACTTACCTGGC | SEQ ID NO. 36428 |
| U1-R | AAACGCAGTCCCCCACTACC | SEQ ID NO. 36429 |

Gene Expression primers

| | | |
|---|---|---|
| Dusp9_F | GGG GAT CCG TCT CCA TGA AC | SEQ ID NO. 36430 |
| Dusp9_ChIP_R2 | TGA CCG ACT CAG ACT CTC CA | SEQ ID NO. 36431 |
| Calm2_F | GCA GAA CTG CAG GAC ATG AT | SEQ ID NO. 36432 |
| Calm2_R | CAA ACA CAC GGA ATG CTT CT | SEQ ID NO. 36433 |
| Dcaf12I1-1F | CCC AAT GCG CTC TAC ACT CA | SEQ ID NO. 36434 |
| Dcaf12I1-1R | ACT GGA TAC TCT GGG GCA GT | SEQ ID NO. 36435 |

Intronic primers

| | | |
|---|---|---|
| Calm2_int_F | GCC AAG CAA ACT TGA CTC CG | SEQ ID NO. 36436 |
| Calm2_int_R | GAC CAC ACT GCC ATG GAT CA | SEQ ID NO. 36437 |
| Dcaf12I1-1R | ACT GGA TAC TCT GGG GCA GT | SEQ ID NO. 36438 |
| Dcaf12I1-int-R | TGT AAT TCA TGT TGT GCA TGC TGT | SEQ ID NO. 36439 |

ChIP-qPCR primers

| | | |
|---|---|---|
| Calm2_ChIP_1F | AGC TAT ATG CAC CCA CTC GG | SEQ ID NO. 36440 |
| Calm2_ChIP_1R | TGG GCA TTC GTT CGA AAG GG | SEQ ID NO. 36441 |
| Dcafl2I1_ChIP F | CCA GAG TGG GCA ACT GGT AG | SEQ ID NO. 36442 |
| Dcaf12I1_ChIP R | GAC CAC ATC ATG CGC ATT CC | SEQ ID NO. 36443 |

FAIRE-qPCR primers

| | | |
|---|---|---|
| Calm2_ChIP_1F | AGC TAT ATG CAC CCA CTC GG | SEQ ID NO. 36444 |
| Calm2_ChIP_1R | TGG GCA TTC GTT CGA AAG GG | SEQ ID NO. 36445 |
| Calm2_DNAse_1A_F | GGG GAC GGA TGA CGT AAG TG | SEQ ID NO. 36446 |
| Calm2_DNAse_1A_R | AAT CAG CAG CAA GCT CAA CG | SEQ ID NO. 36447 |
| Dcaf12I1_ChIP_F | CCA GAG TGG GCA ACT GGT AG | SEQ ID NO. 36448 |
| Dcaf12I1_ChIP_R | GAC CAC ATC ATG CGC ATT CC | SEQ ID NO. 36449 |
| Dcaf12I1_DNAse_72F | GTC GGC CTG ACG CAT GAT A | SEQ ID NO. 36450 |
| Dcaf12I1_DNAse_72R | GCT GAT CGG TTG ATC GCT CT | SEQ ID NO. 36451 |

qPCR primers-human genes

| | | |
|---|---|---|
| PES1-F | GAG GAG AAG TGA CTC TGG TCC AT | SEQ ID NO. 36452 |
| PES1-R | AGA AGC GGA AAG CCC ACG AT | SEQ ID NO. 36453 |
| IRAK1-F | CAC ATT AGG CCA GCT CGC AG | SEQ ID NO. 36454 |
| IRAK1-R | TGG CTG TAA GTC TCA TGG TTC A | SEQ ID NO. 36455 |

RNA-EMSA Probes

| | | |
|---|---|---|
| Dusp9-EMSA probe | GGCCACTTTGACTCGTGTAGACTCCTTCCT | SEQ ID NO. 36456 |
| | GCTTCTCTCACTAGGG | |
| | CTTAGACTTCTTGGAACTGTAGGGTGTGA | |
| | ACCCAGAGAC | |
| Dcaf12I1-EMSA probe | TCAAATAGAGGAGCTGGGGATTAAAAAG | SEQ ID NO. 36457 |
| | ATAGGTCTGATTAAAG | |
| | GACTGTGCAGTTCAGATAAATAGAGATAA | |
| | TGGGATGCCGTGCGG | |
| | ATAGATTGGTTTTCTCC | |
| Calm2-EMSA probe | GTAGCTTTTAGGAACTGTCAGCATGTTGTT | SEQ ID NO. 36458 |
| | GTTGAAGTGTGGAGC | |
| | TGTAACTCTGCGTGGACTGTGGACAGTCA | |
| | ACAATATGTACTTAAAA | |
| | GTTGCACTATTGCAA | |
| Larp1-FAM1-WT | GGGAGGTATATGTGGACATAGAG | SEQ ID NO. 36459 |
| Larp1-FAM1-Mut | GGGAGGTATATTCCACCATAGAG | SEQ ID NO. 36460 |
| Nucks1-FAM3-WT | GGGtgtgcggacggaggtcagaaa | SEQ ID NO. 36461 |
| Nucks1-FAM3-Mut | GGGtgtgcggaccctcctcagaaa | SEQ ID NO. 36462 |

[0348] Native RNA Immunoprecipitation (Native-RIP)

[0349] EL16.7 cells were grown on T75 flask until ˜80% confluency. Cells were trypsinized and, after adding fresh growth media, counted and pelleted by 5 min 200×G centrifugation. Cell pellets were resuspended in PBS and divided into 1×10⁷ cells aliquots. After another round of centrifugation, sup was removed and cells shock-frozen in LN2. After thawing, cells from single cell pellet were incubated in 1 ml of ice-cold hypothonic buffer A (10 mM HEPES pH 7.9, 1.5 mM MgCl₂, 10 mM KCl)+1 mM AEBSF. Cells were incubated on ice for 20 min and nuclei were pelleted by 15 min 2,500×G centrifugation on 4° C. Sup was removed and pellet resuspended in 1 ml of Polysomal lysis buffer (10 mM HEPES pH 7.0, 100 mM KCL, 5 mM MgCl₂, 0.5% NP-40)+1 mM DTT+EDTA-free PI cocktail 1:100+100 u/ml RNAseIN (Promega). After adding 20 μl (40 u) of TurboDNAse (Life Technologies), cell nuclei were incubated 30 min 4° C. on orbital shaker. After 10 min 16,000×G 4° C. centrifugation, supernatant was transferred into 16 ml tube with 9 ml NT2 buffer (50 mM Tris pH 7.4, 150 mM NaCl, 1 mM MgCl₂, 0.05% NP-40)+10 μl 1M DTT+10 μl RNAseIN (Promega)+1 tablet of Complete-mini EDTA-free protease inhibitors mix. On the same time, Protein G Dynabeads were prepared—20 μl per sample for pre-clearing×number of samples+20 μl per sample for immunoprecipitation×number of samples. Beads were thoroughly resuspended, captured on magnetic separator and washed 3×1 ml NT2 buffer (50 mM Tris pH 7.4, 150 mM NaCl, 1 mM MgCl₂, 0.05% NP-40). After final resuspension—20 μl beads/100 μl NT2 volume, beads intended for immunoprecipitation were incubated with 5 μg of specific antibody (anti-CBX7 (P-15), Santa Cruz Biotechnologies) or Rabbit IgG control (Abcam) in total volume of 500 μl NT2 buffer. To prepare pre-cleared lysates, 1 ml aliquots of lysate were transferred into 1.5 ml tubes with 100 μl beads suspension and incubated 1 hr 4° C. on rotatory shaker. Input samples were prepared by taking 100 μl aliquots from lysate+900 μl Trizol reagent. After capturing beads on magnetic separator, pre-cleared lysates were transferred into 1.5 ml tubes with beads-antibody complex (unbound antibody fraction was removed on magnetic separator). After 3 hrs 4° C. incubation on rotatory shaker, sup was removed and beads washed 5×1 ml NT2 buffer. After the last wash solution was removed on magnetic separator, beads were resuspended in 1 ml Trizol reagent. RNA was extracted according to manufacturer protocol, eluted in 20 μl nuclease-free water and 2 μl of eluted RNA was subjected to reverse transcription using SuperScript III (Life technologies) according to manufacturer instructions. qPCR assays were performed on CFX96 real-time PCR system (Bio-Rad). Specific primers are listed in Table a. Threshold cycle values were translated into initial template amount for each sample based on the standard curve prepared from known quantities of EL16.7 cDNA. Enrichment of specific RNA species was expressed as percentage of total input RNA for each reaction.

[0350] Chromatin Immunoprecipitation

[0351] Before the experiment, cells were grown on 15 cm feeder plates up to 80-90% confluence. Medium was removed and cells washed once with 20 ml PBS. After 10 min incubation on 37° C. in 3 ml trypsin-EDTA (Gibco), cells were passed twice through 200 μl tip in 9 ml growth media using 13 ml pipette, transferred into 50 ml tubes with 18 ml growth media and counted. Cells were centrifuged 5 min 200×G on room temperature. Sup was removed and cells resuspended in 40 ml fresh growth media and split into 2×15 cm tissue culture dishes—20 ml per dish. Cells were incubated 45 min on 37° C. for feeder removal. Floating cells were collected into 50 ml tube and counted. Then, 1/10th volume of cross-linking solution (50 mM HEPES-KOH pH. 7.5, 100 mM NaCl, 1 mM EDTA, 0.5 mM EGTA, 11% Formaldehyde) were added and cells incubated 20 min room temperature on rotatory shaker followed by quenching with 1/20th volume of 2.5M Glycine solution. After 5 min 700×G centrifugation on 4° C., cells were washed twice with 30 ml of ice-cold PBS and pellet resuspended in volume of ice-cold PBS according to 3 ml PBS/5×10⁶ cells ratio. Cells were divided into 3 ml portions in 16 ml tubes and centrifuged 5 min 700×G 4° C. Sup was aspirated and pellets shock-frozen in liquid nitrogen and stored on −80° C. On the day of immunoprecipitation, cell pellets were pre-thawed on 4° C. and re-suspended in 1 ml Buffer#1 (50 mM HEPES-KOH pH 7.5, 140 mM NaCl, 1 mM EDTA, 10% Glycerol, 0.5% NP-40, 0.25% Triton-X-100) supplemented with protease inhibitors mix (Sigma). After 10 min 4° C. incubation on rotatory shaker, cells were spun 5 min 1400×G 4° C. Sup was aspirated and pellets resuspended in 1 ml Buffer#2 (10 mM Tris pH 8.0, 200 mM NaCl, 1 mM EDTA, 0.5 mM EGTA) supplemented with protease inhibitors mix (Sigma). After 10 min 4° C. incubation on rotatory shaker, cells were spun 5 min 1,400×G 4° C. Sup was aspirated and pellets resuspended in 1.2 ml of Buffer#3 (10 mM Tris pH 8.0, 1 mM EDTA, 0.5 mM EGTA) supplemented with protease inhibitors mix (Sigma). After 10 min 4° C. incubation on rotatory shaker, 70 μl 10% N-lauroyl-sarcosine were added, cell nuclei suspension transferred into screw-cap 15 mm×19 mm Covaris tubes and sonicated in Covaris E220 system with the following conditions: Duty—10%, Peak Incident Power—175, Cycles per burst—200, Duration—2400 sec (40 min). After sonication, cells were transferred into 1.5 ml tubes and centrifuged for 10 min 14,000×G on 4° C. Sup was transferred into 1.5 ml tubes, 20 μg of RNAse A (Roche) were added and samples incubated for 30 min on 37° C. After incubation, 55 μl aliquots were taken from each sample for input control and the rest divided into 2×550 μl portions in 1.5 ml tubes. Input samples were stored on −20° C. 275 μl of freshly prepared solution (3% Triton-X-100, 0.3% NaDeoxycholate, 3 mM EDTA)+protease inhibitors mix were added to 550 μl samples along with specific antibody or matched isotype controls and samples incubated 16 hrs 4° C. on rotatory shaker. For recombinant CBX7-Flag-HA, 5 μl of rabbit polyclonal anti-hemagglutinin tag antibody (H6908, Sigma) were used per reaction. For endogenous CBX7, 5 μg of rabbit polyclonal anti-CBX7 antibody (ab21873, Abcam) were used per reaction. 5 μg of Ubiquityl-Histone H2A (Lys119) (D27C4) #8240 antibody (Cell Signaling) were used for pull-down of ubiquitynated histone H2A. Meanwhile, magnetic protein G dynabeads (Life technologies)—40 μl per reaction, were washed twice with Buffer#1 using magnetic stand and blocked for 1 hr on 4° C. with 250 μg/ml salmon sperm DNA (Life technologies). After two washes with Buffer#1, beads were resuspended in buffer#1 according to 40 μl beads/100 μl buffer ratio and divided into 1.5 ml tubes. After removal of buffer, immunoprecipitated samples were transferred to 1.5 ml tubes with protein G dynabeads for additional 2-3 hrs 4° C. incubation on rotatory shaker. Then, sup was removed and beads washed 3×0.5 ml RIPA-1 buffer (50 mM HEPES-KOH, pH 7.5, 0.5 m LiCl, 0.7% NaDeoxycholate, 1% NP-40, 10 mM EDTA) and 3×0.5 ml RIPA-2 buffer (50 mM HEPES-KOH, pH 7.5, 0.25 m LiCl, 0.7% NaDeoxycholate, 1% NP-40, 10 mM EDTA). Beads were resuspended manually on each step. After one wash with 0.5 ml TEN buffer (10 mM Tris pH 8.0, 50 mM NaCl, 1 mM EDTA), beads were resuspended in 0.2 ml TES buffer (50 mM Tris pH8.0, 10 mM EDTA, 1% SDS) and incubated 15 min 65° C. with occasional vortexing and subsequent spin down. 145 μl of TES buffer were added to input samples. 40 μg of Proteinase K (Roche) were then added to all samples and samples incubated 16 hrs on 65° C. Then, after addition of 0.2 ml of TE buffer, the entire volume was transferred to Phase-Lock Gel Heavy 2 ml tubes (5 Prime GmbH) and extracted with 0.4 ml of phenol:chlorophorm:isoamyl alcohol solution (25:24:1, USB) according to manufacturer protocol. The aqueous phase was collected and ethanol precipitated by adding 40 μl of 3M NaAcetate, 25 μg GlycoBlue reagent (Life technologies) and 2.5 volumes of 100% ethanol. Elution was performed with 50 μl TE buffer pH 8.0. qPCR assays were performed on CFX96 real-time PCR system (Bio-Rad). Specific primers are listed in Table a. Threshold cycle values were translated into initial template amount for each sample based on the standard curve prepared from known quantities of genomic DNA. Enrichment of specific PCR amplicons was expressed as percentage of total input DNA for each reaction. ChIP-seq libraries were constructed using the NEBNext ChIP-Seq Library Prep Master Mix Set (NEB). Libraries were subjected to high-throughput sequencing using Illumina HiSeq 2000 apparatus according to manufacturer instructions. Approximately 40 million paired-end 50 bp reads were generated for every ChIP-seq sample.

[0352] LNA Nucleofection

[0353] LNA mixmers (Exiqon) were designed specifically against a CBX7 binding regions of selected genes (See Table a for the list of LNA oligomers) A total of 2×10⁶ EL16.7 cells, after feeder removal, were resuspended in 100 μL of ES cell nucleofector solution (Lonza). LNA oligos were added to a final concentration of 2 μM. The cells were transfected using the A-013 program on Amaxa Nucleofector II. 0.5 mL of culture medium were added and cell suspension was divided equally between two wells in gelatinized 6-well dish. For RT-qPCR, cells were harvested in 1 ml Trizol reagent 24 hrs after nucleofection, RNA extraction was performed according to manufacturer instruction. For Western Blotting, cells were scraped in 300 μl of SDS sample buffer (50 mM Tris pH 6.8, 100 mM DTT, 2% SDS, 0.1% bromophenol blue, 10% glycerol) and resulting extracts boiled on 95° C. for 5 min. For ChIP and Formaldehyde-assisted Isolation of Regulatory Elements (FAIRE) assays, three nucleofection reactions were pooled into one gelatinized 10 cm dish and cells harvested for cross-linking according to the ChIP or FAIRE protocol.

[0354] Formaldehyde-assisted Isolation of Regulatory Elements (FAIRE) analysis FAIRE analysis of nucleofected cells was performed as described in Simon et al (Simon et al., 2012) with following modifications. 24 hours after nucleofection, cells growing on gelatin-coated 10 cm tissue culture dishes were trypsinized with 1 ml Trypsin-EDTA solution. After most of the cells detached from the surface, 9 ml growth media were added to the plate and cells passed 2 times through 200 μl pipette tip. Then, 1/10^{th} volume of cross-linking solution (50 mM HEPES-KOH pH. 7.5, 100 mM NaCl, 1 mM EDTA, 0.5 mM EGTA, 11% Formaldehyde) were added and cells subjected to 5 min incubation on room temperature with constant rotation followed by 5 min quenching with 1/20^{th} volume of 2.5M Glycine solution. After 5 min 700×G centrifugations on 4° C., cells were washed 3 times with 10 ml of ice-cold PBS. Sup was aspirated and pellets shock-frozen in liquid nitrogen and stored on −80° C. On the day of the assay, cell pellets were pre-thawed on 4° C. and re-suspended in 1 ml lysis buffer Buffer A (10 mM HEPES-KOH pH 7.5, 100 mM NaCl, 1 mM EDTA, 1% SDS, 2% TX-100) After 10 min 4° C. incubation on rotatory shaker, cells were delivered into screw-capped 1.3 ml Covaris 15 mm×19 mm tubes and sonicated in Covaris E220 system in the following conditions: Duty—10%, Peak Incident Power—175, Cycles per burst—200, Duration—600 sec (10 min). After sonication, cells were transferred into 1.5 ml tubes and centrifuged for 5 min 20,000×G on 4° C. to pellet cell debris. Sup was transferred into 1.5 ml tubes. 100 μl aliquots from each sample were taken as input controls. Then, 2 aliquots of 300 μl from each lysate were transferred to Phase-Lock Gel Heavy 1.5 ml tubes (pre-centrifuged for 30 sec on 16,000×G), and extracted twice with 300 μl of phenol:chlorophorm:isoamyl alcohol solution (25:24:1, USB) after vigorous shaking and 5 min 16,000×G centrifugation on room temperature. The remaining phenol was removed by adding 150 μl of 24:1 chloroform:isoamyl alcohol solution, 5 min 16,000×G. The upper aqueous phase was transferred to 1.5 ml tube. Another 100 μl of EB buffer (Qiagen) were added to Phase-Lock Gel Heavy 1.5 ml tube to collect the remaining upper phase and transferred to the same 1.5 ml tube with the rest of the upper phase. After adding 40 μl of 3M Sodium Acetate, 1.5 μl of GlycoBlue reagent (Life technologies) and 800 μl ethanol, samples were incubated on −80° C. for at least 30 min. Samples were centrifuged 15 min 12,000×G 4° C. Sup removed and pellets washed 1×0.5 ml 70% ethanol, 5 min 12,000×G. Samples were eluted with 50 μl EB buffer (Qiagen). 1 μl of DNAse-free RNAse A (Sigma, 37 mg/ml) was added to every sample including input samples, 30 min 37° C. Then, 1 μl (20 μg) Proteinase K (Roche) were added and samples incubated for 1 hr on 55° C. and 16 hrs on 65° C. to reverse cross-linking. Then, samples were supplemented to 300 μl with EB buffer. Phenol:chloroform:isoamyl alcohol extraction and ethanol precipitation were repeated exactly the same way it was performed in the first step. Samples eluted with 50 μl EB buffer (100 μl EB buffer for input samples). qPCR assays were performed on CFX96 real-time PCR system (Bio-Rad). Specific primers are listed in Table a. Threshold cycle values were translated into initial template amount for each sample based on the standard curve prepared from known quantities of genomic DNA. Enrichment of specific PCR amplicons was expressed as percentage of total input DNA for each reaction.

[0355] Protein Expression and Purification

[0356] Mouse CBX7 carrying Flag and HA tag on C-terminus was expressed in Sf9 insect cells using the bac-to-bac system (Invitrogen). Protein extract was prepared by resuspending cell pellet in lysis buffer F (20 mM HEPES-KOH [pH 7.9], 300 mM NaCl, 4 mM MgCl₂, 1 mM DTT, 20% glycerol, and protease inhibitors mix [Sigma]). After 15 strikes with tight pestle on 15 ml Dounce homogenizer, cell suspension was supplemented with 0.1% Nonidet-P-40, 0.2% Triton-X-100, 5 u/ml TurboDNAse (Invitrogen) and 12.5 μg/ml Heparin. After 30 min 4° C. incubation on orbital shaker, cell lysate was subjected to 2 rounds of 15 min 30,000×G centrifugation on 4° C. Supernatant was collectedand snap-frozen in liquid nitrogen. M2 anti-FLAG beads (Sigma) were used for all purifications. Proteins were bound to M2 beads in lysis buffer for 2 hr at 4° C. Beads were washed twice with buffer F (500 mM NaCl), twice with buffer F (300 mM NaCl) and twice with elution buffer (50 mM Tris pH 7.4, 100 mM NaCl). Proteins were eluted twice by 1 hr incubations with 0.2 μg/ml 3×-FLAG peptide (Sigma). Protein concentrations were determined by SDS-page and Bradford assay using bovine serum albumin as a standard.

[0357] Electrophoretic Mobility Shift Assays

[0358] RNA-EMSA assays with CBX7 protein were performed as follows. Labeled RNAs were produced with MEGAscript® T7 Transcription Kit (Life Technologies) and purified from 6% acrylamide TBE-urea gels. Labeled RNAs were prefolded in buffer TE+300 mM NaCl by incubating for 2 min at 95° C., followed by 20 min incubation on ice. Binding reactions were assembled with 20 μl of binding mix (13 mM Tris pH 8.0, 0.2 mM EDTA, 68.8 mM NaCl, 20% Glycerol, 0.2 mg/ml Yeast tRNA, 4 mM DTT, 4 μl 2500 cpm/μl RNA probe). LNA oligonucleotides were added to binding mix at final concentration of 8 μM and samples were pre-incubated on ice for 10 min. After pre-incubation, binding mix samples were combined with 60 μl of purified protein in dialysis buffer (50 mM Tris pH 7.4, 5 mM MgCl₂, 50 mM NaCl, 1 mM DTT, 10% Glycerol, 4 u/μl Protector RNAse inhibitor (Roche)). Control experiments were performed with dialysis buffer only or control proteins—Flag-GFP or GST-Flag-HA, dissolved in dialysis buffer at the highest protein concentration in the particular experiment. After 30 min on ice, the sample was loaded onto a 5% 37:1 acrylamide (Bio-Rad) gel in 0.5× TBE buffer (45 mM Tris-Borate, 1 mM disodium EDTA) and run for 90 min at 250 V at 4° C. Gels were exposed to phosphorimager screens. For validation of motif sequences, labeled RNA probes were produced with MEGAshortscript™ T7 Transcription Kit (Life Technologies) and gel purified using 15% TBE-urea gels (Life technologies) Similar RNA-EMSA conditions were applied except 8% 37:1 acrylamide (Bio-Rad) gels replaced 5% gels. Sequences of RNA probes are given in Table a.

[0359] Western Blotting

[0360] 20 μl of protein extracts were resolved on 4%-20% gradient SDS-PAGE gels (Bio-Rad) and proteins were transferred for 1 hr on 100V in transfer buffer (48 mM Tris, 39 mM Glycine, 20% methanol) to Immobilon-P 0.45 μm PVDF membrane (Millipore) using Mini Protean Tetra transfer unit (Bio-Rad)). To detect CBX7 protein expression, Western blotting was performed with mouse monoclonal CBX7 Antibody (G-3) (Santa Cruz Biotechnologies, sc-376274) as primary antibody and goat-anti-mouse-HRP (Promega) as a secondary antibody. For quantitative Western blotting of DCAF12l1 protein, anti-WDR40B (Dcaf12l1) rabbit polyclonal antibody (Biorbit, orb155395) was used as a primary antibody along with anti-Ctcf rabbit polyclonal antibody (Cell Signaling Technologies, #2899) as a loading control. Goat-anti-rabbit-HRP (Promega) was employed as a secondary antibody. Protein bands were developed using Western Lightening Plus-ECL Kit (Perkin-Elmer) and the signal intensity was analyzed using Chemidoc MP Imaging System (Bio-Rad) and ImageLab Ver. 5.2.1 software (Bio-Rad). Exposures were captured on different times using ChemiDoc cumulative signal option to avoid signal saturation. Standard curves were prepared using increasing amounts of cell extract (FIG. 6G), to confirm a signal intensity staying in a dynamic linear range.

[0361] Quantification and Statistical Analysis of qPCR Data

[0362] Data represents the average±standard deviation for at least 3 biological replicates as stated in the figure legends. P values were determined by unpaired two-tailed student t-test unless otherwise stated.

[0363] Quantitative Analysis of RNA-EMSA

[0364] Gels were exposed to phosphoimager screens and scanned using Typhoon laser scanner (GE Healthcare). Radioactive signal intensity was quantified by Image Quant 5.2 software (GE Healthcare). Fraction of bound RNA (signal intensity of the shifted bands divided by the total signal intensity in the particular lane) was computed for every protein concentration and plotted against corresponding protein concentration. To determine dissociation constant (Kd), the resulting binding curves were fitted to sigmoidal plots by non-linear regression using “Prism” software (Graphpad Software inc).

[0365] Analysis of CLIP-Seq Data

[0366] Libraries were subjected to high-throughput sequencing using Illumina HiSeq 2000 apparatus according to manufacturer instructions. Approximately 40 million paired-end 50 bp reads were generated per every CLIP-seq sample. Adaptor sequences were trimmed with either Trim Galore! V0.3.3 (http://www.bioinformatics.babraham.ac.uk/projects/trim_galore/) (for CLIP-seq; stringency 15 and allowed error rate 0.2), or cutadapt (v1.0) (https://pypi.python.org/pypi/cutadapt/) Identical genomic sequences (PCR duplicates) were removed by custom program prior to alignment. To account for the M. mus (mus)/M. castaneus (cas) hybrid character of mouse EL 16.7 ES cell line that was employed in a CLIP-seq studies, reads were first aligned to custom mus/129 and cas genomes, and then mapped back to the reference mm9 genome (Pinter et al., 2012). All alignments were performed by utilizing Tophat (v2.0.11) (Trapnell et al., 2012). Post-processing of alignments was performed with custom scripts using SAMtools (Li et al., 2009), and BEDtools v2.17.0 (Quinlan and Hall, 2010). These included accounting, alignment file-type conversion, extracting and reads sorting (SAMtools), and obtaining wig coverage files (SAMtools depth).

[0367] Fragment per million (fpm) wig files were then created by scaling uniquely aligned wig files to total number of fragments per million in each library (determined by SAMtools flagstat combining reads “with itself and mate mapped” and “singletons”). CLIP-seq enriched tag density wig files were viewed in UCSC genome browser (Kent et al., 2002) or Integrated Genome Browser (IGB) (Nicol et al., 2009). Then consecutive wig entries of equal coverage were merged forming bed files that were used for peak calling. The peak caller software PeakRanger (v.16) (Feng et al., 2011) was used. The software requires an even distribution of watson/crick entries, thus, prior to peak calling, strand specific bed file entries were randomized per each strand. PeakRanger was called with arguments ranger -p 0.01-format bed -gene_annot_file (mm9), -d experiment and -c mock-transfected control, to identify narrow peaks with p-value 0.01 or less.

[0368] For assessing dCLIP fragments footprints PeakRanger-enriched CLIP fragments from 3 libraries were pooled and merged in a strand-specific manner to create continuous CLIP fragments (in case of overlapping peaks). Length-frequency histogram of enriched CLIP fragments was obtained, along with mean, median, and SD.

[0369] RNA-Seq Analysis

[0370] For RNA-seq, RNA was extracted from cells used for dCLIP experiments. Starting amount of Total RNA was 4 μg. RNA was depleted of ribosomal RNA using Ribominus kit (Life technologies). Strand-specific cDNA libraries were constructed using Superscript III reverse-transcriptase for first-strand synthesis, NEBNext mRNA Second Strand Synthesis Module supplemented with dUTP (NEB) for second-strand synthesis, and NEBNext ChIP-Seq Library Prep Master Mix Set for library preparation. Libraries were subjected to high-throughput sequencing using Illumina HiSeq 2000 apparatus according to manufacturer instructions. Approximately 40 million single-end 50 nt reads were generated for every RNA-seq sample. Data processing was performed essentially as described previously (Kung et al., 2015). Adaptor sequences were trimmed from libraries with Trim Galore! v0.3.3 (for dCLIP-seq and RNA-seq; stringency 15). PCR duplicates were removed by custom programs prior to alignment. To account for the M. mus (mus)/M. castaneus (cas) hybrid character of the ES cell lines, reads were first aligned to custom mus/129 and cas genomes, and then mapped back to the reference mm9 genome. RNA was aligned with Tophat (v2.0.8 or greater). Post-processing of mm9 alignments was performed with custom C and Perl programs and bash shell scripts, SAMtools v0.1.18, and BEDtools v2.17.0.

[0371] RNA-Seq vs CLIP-Seq Analysis

[0372] For RNA-seq analysis two CBX7 libraries were used and for CLIP-seq analysis three CBX7 libraries were used. We have performed the following analysis for both RNA-seq and CLIP libraries: By applying the Homer (http://homer.salk.edu/homer/motif/) suit's makeTagDirectory and makeUCSCfile algorithms we converted aligned SAM files into strand-specific bedGraph files. Reads were further filtered to eliminate mappable reads assigned to ribosomal DNA and mitochondrial DNA, and per each library read counts values were normalized to the corresponding 3^{rd} quartile read counts value. Strand-specific wig files were then binned to 100 bp windows and subjected to Piranha peak analysis (http://smithlabresearch.org/software/piranha/) resulting in significantly (p<0.01) enriched peaks. Piranha CLIP peaks were further filtered to include only peaks that were considered enriched also based on the PeakRanger algorithm (see “PeakRanger” peak calling under STAR Methods' “Analysis of CLIP-Seq data” section). To compare between the resultant enriched CLIP signals and their corresponding enriched RNAseq signals, piranha peaks files (of both, CLIP libraries and RNAseq libraries) were processed by the Homer's makeTagDirectory algorithm, and subsequently parsed to genomic features by the Homer's analyzeRNA algorithm, generating a matrix of total read counts per gene normalized to the length of each gene. Next, a matrix holding only genes that manifested CLIP signals higher than zero in at least two out of three datasets was created. The log 2-transformed normalized read values of each of 2 or 3 CLIP libraries that had enriched signals were averaged to reflect an averaged CLIP signal per gene. The normalized values (per gene) of corresponding RNAseq libraries, similarly analyzed in parallel, were averaged in the same manner to reflect an average RNAseq signal per gene. This analysis resulted in a matrix containing 1,333 genes with positive CBX7 CLIP signal.

[0373] To focus on a gene cohort that represents genes with high CLIP and RNAseq signals we selected 10% of the CLIP'ed genes (135 genes circled by green ellipse, as shown in FIG. 1G. List of 135 genes is provided in Table d). We also identified all genes (6,671 genes) that manifested no piranha CLIP peaks in all three datasets, and that showed no PeakRanger CLIP peaks in at least two out of three datasets. This group of CLIP-devoid genes was further filtered to include only genes (2,078) that their average RNAseq signal corresponded to the same RNAseq signal range manifested by the 135 highly CLIP'ed genes (this gene group is indicated by red-colored dots on the scatter-plot as shown in FIG. 1G. Note that all genes within this group are devoid of CLIP signal (CLIP signal equals to zero) and their plotting at the bottom of the scatter plot (after replacement of zero values by a “dummy” value) was generated merely for representation purpose (FIG. 1G).

TABLE d
Related to FIG. 1G. List of 135 CBX7 high-binding transcripts.

| GeneID | GeneSymbol |
|---|---|
| NR_028540 | Snord12 |
| NR_002142 | Rpphl |
| NR_002865 | Rnu11 |
| NR_028572 | Snora43 |
| NR_031758 | Snora26 |
| NR_030451 | Mir682 |
| NR_037683 | Snord42b |
| NM_010106 | Eef1a1 |
| NR_030762 | Snord17 |
| NM_011401 | Slc2a3 |
| NM_007907 | Eef2 |
| NR_027885 | Vaultrc5 |
| NM_012053 | Rpl8 |
| NM_177099 | Lefty2 |
| NR_015531 | Dancr |
| NM_010240 | Ftl1 |
| NR_038063 | Rplp2-ps1 |
| NR_045289 | Rab26os |
| NM_018860 | Rpl41 |
| NM_001145804 | Nucks1 |
| NR_110499 | Rpl14-ps1 |
| NM_008774 | Pabpc1 |
| NM_024212 | Rpl4 |
| NM_029352 | Dusp9 |
| NM_012052 | Rps3 |
| NM_001078167 | Srsf1 |
| NM_152806 | Ddx17 |
| NR_003363 | Gm6548 |
| NM_009128 | Scd2 |
| NM_010202 | Fgf4 |
| NM_018796 | Eef1b2 |
| NM_008143 | Gnb2l1 |
| NM_029872 | Hnrnpa0 |
| NM_026147 | Rps20 |
| NM_001289828 | Nanog |
| NM_026242 | Mrfap1 |
| NM_010094 | Lefty1 |
| NM_018853 | Rplp1 |
| NM_021278 | Tmsb4x |
| NM_011562 | Tdgf1 |
| NM_016906 | Sec61a1 |
| NM_029767 | Rps9 |
| NM_010239 | Fth1 |
| NM_026055 | Rpl39 |
| NM_029701 | Spcs3 |
| NM_007451 | Slc25a5 |
| NM_007475 | Rplp0 |
| NR_027901 | 2900060B14Rik |
| NM_011712 | Wbp5 |
| NM_019419 | Arl6ip1 |
| NM_009127 | Scd1 |
| NM_001204875 | Set |
| NM_010480 | Hsp90aa1 |
| NM_026155 | Ssr3 |
| NM_181401 | Tmem64 |
| NM_198006 | Coa5 |
| NM_172665 | Pdk1 |
| NM_001081164 | Otud4 |
| NM_009786 | Cacybp |
| NM_001039129 | Hnrnpa1 |
| NM_008468 | Kpna6 |
| NM_001190800 | Ddx19b |
| NM_026036 | Cmtm6 |
| NM_026521 | Zfp706 |
| NM_024166 | Chchd2 |
| NM_008019 | Fkbp1a |
| NM_008972 | Ptma |
| NM_001252260 | Npm1 |
| NM_001033474 | Atxn7l3b |
| NM_001081005 | 1500012F01Rik |
| NM_001253857 | Tet1 |
| NM_001285412 | Calu |
| NM_025586 | Rpl15 |
| NM_145625 | Eif4b |
| NM_013725 | Rps11 |
| NM_001171035 | Tmbim6 |
| NM_011400 | Slc2a1 |
| NM_175403 | Mlec |
| NM_007984 | Fscn1 |
| NM_023755 | Tfcp2l1 |
| NM_001136069 | Ldha |
| NM_008568 | Mcm7 |
| NM_146012 | Ctdsp2 |
| NM_011296 | Rps18 |
| NM_013765 | Rps26 |
| NM_001134427 | Cdv3 |
| NR_027907 | AI414108 |
| NM_007478 | Arf3 |
| NM_020600 | Rps14 |
| NM_008251 | Hmgn1 |
| NM_026517 | Rpl22l1 |
| NM_009546 | Trim25 |
| NM_001142809 | S1c6a8 |
| NM_001159375 | Eif4a1 |
| NM_001293559 | Cox4i1 |
| NM_007748 | Cox6a1 |
| NM_009391 | Ran |
| NM_001030307 | Dkc1 |
| NM_028451 | Larp1 |
| NM_019647 | Rpl21 |
| NM_033561 | Eif4h |
| NM_008810 | Pdha1 |
| NR_002883 | Gm5643 |
| NM_009536 | Ywhae |
| NM_010193 | Fem1b |
| NM_033617 | Atp6v0b |
| NM_011404 | Slc7a5 |
| NM_024214 | Tomm20 |
| NM_009951 | Igf2bp1 |
| NM_009320 | Slc6a6 |
| NM_001253757 | Anp32e |
| NM_001164806 | Bend4 |
| NM_025881 | Luc7l |
| NM_178627 | Poldip3 |
| NM_011292 | Rpl9 |
| NM_001252292 | Mest |
| NM_011291 | Rpl7 |
| NM_001110499 | Canx |
| NM_144866 | Etf1 |
| NM_001004153 | AU018091 |
| NM_145833 | Lin28a |
| NM_016898 | Cd164 |
| NM_172467 | Zc3havl1 |
| NM_001142732 | Ttll3 |
| NM_133815 | Lbr |
| NM_001190718 | Dcaf12l1 |
| NM_001289599 | Txndc5 |
| NM_178111 | Trp53inp2 |
| NM_007589 | Calm2 |
| NM_011462 | Spin1 |
| NM_028261 | Rian |
| NM_153592 | Erlin2 |
| NM_045170 | Gm10336 |
| NM_021383 | Rqcd1 |
| NM_001276481 | Dag1 |

[0374] To determine reproducibility among dCLIP peaks, we utilized deepTools (Ramirez et al., 2014) analysis, we averaged the significance values (−log(p-value)) of strand-specific peaks enriched in at least two out of three replicates, per bin. 1-kb bin size was applied. Pairwise-Pearson correlation (PPC) analysis was performed for the 3 replicates. Scatter plots were generated (FIG. 11B) and Pearson correlation coefficient was calculated per pair. Overall positive correlation was observed with Pearson correlation coefficients ranging from 0.44 to 0.67 (FIG. 11B).

[0375] We further utilized a matrix of total read counts per gene normalized to the length of each gene (as described above), and per all genes that manifest CLIP signal in at least two replicates, conducted three paired comparisons as follows: Replicate #1 vs. Replicate #2; Replicate #1 vs. Replicate #3; Replicate #2 vs. Replicate #3. Normalized data points were plotted and correlative patterns are presented as three scatterplots (FIG. 11B). Spearman's and Pearson's correlation coefficients were calculated per each comparison, indicating a high concordance between three CLIP replicates, with average Spearman's correlation coefficient of 0.87, and Pearson's correlation coefficient of 0.89.

[0376] To characterized and summarize whole-genome occupancy pattern of peaks, we pooled and merged all piranha peaks (overlapping PeakRanger peaks) from three libraries into one continuous track (containing 8,578 peaks), and employed CEAS analysis (Ji et al., 2006; Shin et al., 2009), using the mm9 KnownGenes database, and as background dataset we used a merged transcriptome coverage track obtained from two RNA-seq experiments conducted in the same cell line that was employed for conducting CLIP experiments.

[0377] Chip-Seq Analysis

[0378] Data processing was performed as described previously (Kung et al., 2015). Normalization to input libraries was performed with window size 500 and step size 100. To obtain highly significant ChIP peaks, we used the software macs2 (version 2.1.0.20150603) (Zhang et al., 2008) with highly stringent constraints (p 0.01) to identified ChIP peaks verses input for the IP. Additionally, we compared the IP verses a control IP using PeakSeq (version 1.3) (Rozowsky et al., 2009) with stringent constraints (Enrichment_fragment_length 200, Enrichment_mapped_fragment_length 200, Background_model Simulated, max_Qvalue 0.1, target_FDR 0.05, N_Simulations 10, Minimum_interpeak_distance 200). Then we constrained the macs called ChIP peaks to only those that were also called against the control experiment. Finally, we limited the resulting peaks to those that intersect with IP enriched regions six-fold over the input. IP and input regions are obtained using smoothed coverage data using a 500 nucleotide window with 100 nucleotide steps. To assess the relationship between CBX7s binding to RNA vs. DNA we counted the number highly significant ChIP peaks that overlapped dCLIP-bound transcripts versus all expressed transcripts using non-parametric techniques (1,000 random selections with replacement). Overlap was counted if ChIP peak was located inside an open reading frame or a promoter region (2,000 nt upstream to transcription start site) of the corresponding transcript.

[0379] Motif Analysis of CLIP-Seq Data

[0380] Basing on three separate CLIP experiments that were performed, three mouse CBX7 CLIP-seq datasets were raised, containing the following numbers of PeakRanger enriched CLIP regions aligned to positive and negative strands, respectively (after excluding rDNA and mtDNA sequences): #1: (4,262, 4,225), #2: (4,254, 3,979), #3: (5,021, 5,009). To thoroughly analyze the biological information embedded within the three independent CBX7 CLIP-seq libraries of mouse we have defined three grouping categories on the basis of regions redundancy (overlapping) existing between the three independent libraries. We dubbed these categories: (1) “Individuals”: a category containing original, unfiltered, enriched CLIP regions; (2) “OneOL”: a category containing enriched CLIP regions that their span intersects with the span of at least another enriched CLIP region that was raised from another independent library; (3) “TwoOL”: a category composed of enriched CLIP regions that their span intersects with the span of enriched CLIP regions raised from two independent libraries. This approach was based on the presumption that CBX7 could have more than one consensus motif and that each library may not have sufficient depth to capture all CBX7-binding sites. Basing on these three categories we opted to take a parallel branched approach by classifying the enriched regions raised from the three independent CBX7 CLIP-seq libraries into nine datasets, namely: Individuals #1, Individuals #2, Individuals #3, OneOL #1, OneOL #2, OneOL #3, and TwoOL #1, TwoOL #2, TwoOL #3. In addition to identifying the boundaries of enriched CLIP regions, PeakRanger algorithm determines the summit position of each region (harboring the topmost CLIP signal), which manifests the strongest binding affinity towards CBX7. Thus, in order to pinpoint the most significant CBX7-RNA binding events we referred to the summit point of each enriched region as an anchoring position and stretched a 100 bp region around it (±50 bp) (Ma et al., 2014). Per each of the nine datasets, summit-based 100 bp CLIP-enriched regions of positive and negative strands were combined into a single batch, resulting the following (number of enriched CLIP regions is indicated in parenthesis): (1) Individuals #1 (8,492); (2) Individuals #2 (8,237); (3) Individuals #3 (10,031); (4) OneOL #1 (3,422); (5) OneOL #2 (2,499); (6) OneOL #3 (3,182); (7) TwoOL #1 (1,125); (8) TwoOL #2 (1,083); (9) TwoOL #3 (1,088). In each of the nine datasets, enriched CLIP regions were sorted based on their FDR significance values as defined by PeakRanger. In order to discover novel binding motifs that may be enriched in each of the nine CLIP-seq datasets we employed MEME-ChIP tool that employs both, the MEME and DREME algorithms for identifying de-novo binding motifs (Bailey et al., 2009; Ma et al., 2014). Since the MEME-ChIP tool functions most efficiently when introduced with datasets containing up to 600 sequences (Ma et al., 2014), and due to the fact that 6 of our 9 datasets were 4-17 fold larger, we created a pipeline that receives a large-sized dataset of enriched CLIP regions, splits it into equal-sized batches (typically of 600 sequences per batch), and then, in parallel per each of the batches, fetched with Bedtools (Quinlan and Hall, 2010), the strand-specific FASTA sequences (100 bp around the summit point of each enriched region), and executes the MEME-ChIP tool in strand-specific mode (“-norc”). Given that enriched CLIP regions within each of the CLIP-seq datasets manifest a wide range of significance (FDR) values, each of the large-sized datasets was split based on equal-sized intervals across the FDR-sorted dataset, allowing an overall balanced representation of significance values of CLIP regions throughout all batches. Thus, the three “Individuals” CLIP-seq datasets (#1, #2, #3) were processed as 14, 13, and 16 batches, respectively, whereas the three “OneOL” CLIP-seq datasets (#1, #2, #3) were processed as 5, 4, and 5 batches, respectively. Each of the three “TwoOL” CLIP-seq datasets (containing 1,100 enriched regions) was processed as one batch.

[0381] Per each of the analyzed CLIP region batches MEME-ChIP tool determined the enrichment of several binding motifs. All novel motifs identified under each of the three categorical groups, namely, “Individuals”, “OneOL”, or “TwoOL”, were pooled together, yielding motif pools of 158, 48, and 19 motifs, respectively. Next, all de-novo motifs identified under each categorical group were subjected to multiple motif alignment analysis employed by the similarity-clustering tool, STAMP (Mahony and Benos, 2007). In each case, STAMP analysis, employed in strand-specific mode (“-forwardonly”), generated a phylogenetic newick tree that was constructed by comparing strand-specific similarity of binding motifs. Phylogenetic Newick trees were then depicted by employing the Molecular Evolutionary Genetics Analysis (MEGA) software (Tamura et al., 2013). In addition, our pipeline employed “SeqLogo” Bioconductor package (Bembom O. seqLogo: Sequence logos for DNA sequence alignments. R package version 1.34.0.) for generating a sequence logo for each of the enriched binding motifs. Next, we viewed the Newick tree of each of the categorical groups, and based on its branch structure grouped together neighboring motifs that share pattern similarity. We then re-subjected each of the groups containing similar motifs to STAMP analysis that generated a unique generalized FBP (Familial Binding Profile) model reflecting the general profile of all binding motifs within each group. FBP analysis was performed redundantly for each group—“Individuals”, “OneOL”, and “TwoOL”. The “individuals” FBPs were seen to fall within FBPs identified by the “OneOL” and “TwoOL” groups, strongly suggesting that the motifs from “Individuals” datasets (obtained from a single library) resembled those arising from the OneOL and TwoOL (more inclusive) datasets. Altogether, STAMP analysis of the three categorical groups yielded 24 FBPs, namely, 10 “Individuals” FBPs, 7 “OneOL” FBPs, and 7 “TwoOL” FBPs (FIG. 3A,B). Indeed, the results of this computational survey, performed separately in each of the categorical datasets, suggested that enriched motifs of all three datasets—including the “individuals”—were highly redundant and shared high sequence similarity. Using STAMP, the FBPs could be clustered into 4 higher-order motif families (hereafter dubbed “FAMs” for “FBP Association Module”), each being distinct and representing a consensus for each family

[0382] To statistically analyze over-representation of 24 mouse CBX7 FBPs in each of the three original mouse CBX7 libraries, we first assembled a motif library of 24 position weight matrices (PWMs) by combining the all FBPs from three datasets. To enable further downstream the tracking of dataset that originally yielded each of the de-novo FBPs, in addition to being labeled by a serial number, FBPs were labeled as either “Indiv.”, “OneOL”, or “TwoOL”.

[0383] By utilizing Bedtools, we fetched, per each of the three CLIP libraries, the FASTA sequences of the enriched CLIP region. Next, we used CLOVER (Frith et al., 2004) at a strand-specific mode (−z=1) to detect binding motifs that were enriched in mouse CBX7 CLIP regions. Per each of the three CLIP libraries CLOVER determined the statistical enrichment of each mouse FBPs relative to two background sets that were constructed from the entire transcriptome coverage obtained from two separate RNA-seq experiments conducted in the same cell line that was employed for conducting CLIP experiments. Each of the reported binding motifs was given a score (“raw score”) based on its predicted binding energy, and two p-value significance scores, each corresponding to the one background file (Frith et al., 2004). FBPs with raw scores higher than 6 and two significant enrichment score (p≤0.05) were selected for further analysis.

[0384] In addition, we assembled a library of 1,179 Known PWMs, by combining the RNA-binding motifs in the compendium of RBP recognition motifs (Ray et al., 2013), together with DNA binding motifs in the JASPAR database (Sandelin et al., 2004), and those in recently reported sets of PWMs for mouse transcription factors (Badis et al., 2009) (Wei et al., 2010; Xie et al., 2010). By applying the same parameters used for detecting enrichment of FBPs, we employed CLOVER for identifying enrichment of known motifs within the CBX7 CLIP regions. Per each of the enriched FBPs and Known motifs we summarized the number of binding sites hits identified within each library, and by dividing this number by the total number of library's CLIP regions, we obtained a “prevalence score” for each of the FBPs and Known motifs. We combined the output parameters obtained from CLOVER analysis of three CLIP libraries into one database, and sorted FBPs and Known motifs based on four scoring criteria: (1) Number of libraries in which a motif was significantly enriched (p≤0.05); (2) Average significance score (p-value); (3) Average prevalence score; (4) Average raw score. We discard all FBPs and Known motifs that manifested an inverse significance relative to background datasets (p≥0.95) in at least one dataset, and all motifs that their average prevalence score was under 5%. Based on this sorting procedure all qualified motifs were ranked (with motif #1 represent the motif with the best scores). Altogether, 11 FBPs (out of the originally introduced 24 mouse FBPs), and 80 Known motifs were met our criteria and found significantly enriched in at least one of the mouse CBX7 CLIP datasets (for known motifs a literature survey that determined their previously suggested role in RNA metabolism and function was additionally implemented as part of the filtration procedure). Among the 11 qualified mouse FBPs, 8 were significantly enriched in 3 CLIP libraries, while 3 were enriched in 2 libraries. Among 80 known motifs, 29 (36%), 29 (36%), and 22 (27%) motifs were enriched in three, two, and single CLIP libraries, respectively. Interestingly, 53 of these enriched Known motifs were RNA-binding motifs that previously reported as part of the compendium of RBP recognition motifs (Ray et al., 2013).

[0385] In order to determine whether specific FBPs could be grouped together into a higher-ordered motif family, also dubbed as “FAM” (FBPs Association Module), by employing STAMP analysis over the 11 qualified mouse FBPs we obtained a phylogenetic tree that identified the presence of four highly-ordered FAMs, which we named: FAM1 (composed of FBP2_Indiv., FBP5_TwoOL, FBP7_OneOL, FBP2_TwoOL); FAM2 (composed of FBP4_TwoOL, FBP3_TwoOL); FAM3 (composed of FBP5_OneOL, FBP9_Indiv.); FAM4 (composed of FBP7_TwoOL, FBP10_Indiv., FBP6_OneOL).

[0386] Basing on two separate CLIP experiments that were performed, two human CBX7 CLIP-seq datasets were raised, containing the following numbers of PeakRanger enriched CLIP regions aligned to positive and negative strands, respectively (after excluding rDNA and mtDNA sequences): #1: (2,552, 2,125), #2: (399, 490). As described above, Peak summits were used as anchoring positions for stretching 100 bp strand-specific regions around them (±50 bp). By applying identical computational tools and similar analytic steps as these described above for mouse CBX7-CLIP, we carried out identification of de novo binding motifs of Human-CBX7. Altogether, this analysis yielded 122 de novo binding motifs that were subsequently subjected to STAMP similarity-clustering analysis (see above), generating 27 human FBPs. We utilized CLOVER for determining the statistical enrichment of each of 27 human FBPs, in addition to 1,179 Known PWMs (see above) relative to two background sets that were constructed from the transcriptome of human HEK-293 cells. After filtering out motifs that were insignificantly enriched (p>0.05), or manifested presence lower than 5%, we obtained 9 human FBPs, and 50 Known motifs that met our criteria. Next, we utilized STAMP analysis (see above) for identifying motif similarities among 9 enriched Human FBPs and 11 enriched mouse FBPs. In parallel, we carried out STAMP matching analysis between 9 enriched Human FBPs and 50 Known binding motifs (Ray et al., 2013).

[0387] To define the global distribution of each of the four FAMs we extracted from CLOVER output data files of each of the three CLIP libraries, the genomic coordinates of all 11 qualified FBPs, grouped by FAMs. We then employed CEAS analysis (Ji et al., 2006; Shin et al., 2009), using the mm9 KnownGenes database, and as background dataset we used a merged transcriptome coverage track obtained from two RNA-seq experiments conducted in the same cell line that was employed for conducting CLIP experiments.

[0388] FAM-Occupancy in CLIP Regions Compare to Their Corresponding Full-Span Genomic Features

[0389] In order to determine the potential contribution of each of the four FAMs to transcripts binding to CBX7, we first pooled together the CLOVER output data of all three CLIP libraries and grouped them by FAM. By employing R packages (“GenomicFeatures”, “Bsgenome.Mmusculus.UCSC.mm9”, and NCBI37/mm9 knownGenes genome assembly), we extracted coordinates of genomic features (3′UTR, 5′UTR, coding sequences (CDs), and introns). We then annotated all FBPs (FAMs) overlapping with mouse genes to their corresponding genomic features. Next, we calculate per each CLIP transcript its “FAM occupancy score”. To this end, we aggregated per each gene, and per a given genomic feature, all FAM-hits that were detected within each of the transcripts that were obtained by CLIP. In case that the genomic feature was composed of multiple frames per a single gene (such in the case of introns that composed of multiple frames per a single gene), FBP-hits were aggregated from all frames that were retrieved by CLIP. Then, by dividing the total number of FAM-hits identified at a given CLIP fragment by the length of the genomic feature that CLIP FAM resides in, we generated per each gene a “CLIP-associated FAM-occupancy score”. Next, we calculated a “full-length genomic feature-associated FAM-occupancy score”. To this end, per each of the transcripts retrieved by CLIP, we mapped all putative FAM-hits across the entire span of the genomic feature. Thus, per a given genomic feature we mapped all real FAM-hits (overlapping with regions obtained by CLIP) in addition to predicted FAM-hits (excluded from regions obtained by CLIP) that reside within the full span of a genomic feature. Finally, we calculate “FAM-occupancy Ratio” per each CLIP transcripts by dividing CLIP FAM-occupancy score by genomic feature-associated FAM-occupancy score.

[0390] We summarized the results of this analysis by as a series of boxplots that describe the distribution of the FAM-occupancy ratio within the four FAM groups across each of the tested genomic features. The analysis indicated that FAM2, when integrated within CLIP transcripts provides in general higher potency for transcripts to bind CBX7, as compare to than all other FAMs. This potency of FAM2 was observed across all tested genomic features.

[0391] Analysis of FAMs that Reside within the Same CLIP Fragment

[0392] We noticed that some CLIP transcripts harbor more than one FAM per a fragment (as indicated by count histogram of number of FAMs residing adjacently on the same dCLIP fiber; FIG. 3C). For analyzing these events, CLIP fragments from 3 libraries were pooled and merged to create continuous CLIP fragments. Then, by utilizing bedtools, we identified all paired FAMs residing on the same CLIP fragment, and calculated the distance between their centers. We identified all permutations of FBP pairs residing on the same CLIP fragment, and in all cases of hetero-pair (such as “FAM1-FAM2”) we distinguished between the two possible orientations, referring to all cases in which FAM2 was located downstream to FAM1 as “FAM1-FAM2_Dnstr”, and to all cases in which FAM2 was located upstream to FAM1 as “FAM1-FAM2_UpStr”. In all cases in which homo-pair were identified, for example as in the case of FAM1 residing in proximity to FAM1, the pair was reported as “FAM1-FAM1_DnStr”. We consider all FAM pairs separated by a distance of less than 6 bp as a single site, thus all reported FAM pairs resulted from this analysis were above 6 bp. We then annotated each FAM pair to the genomic feature and reported all non-annotated pairs as “No Feature”. We plotted all FAM-pairs distances as boxplots and designated by yellow dots their corresponding average in each dataset. In addition, per each of the FAM pairs, we reported in a barplot, all FAM-pair counts, grouped according to their genomic feature annotation. Since the different FAMs were represented in the entire CLIP dataset in different ratios, for example, FAM1 had much more hits at CLIP fragments compare to all other FAMs, we also reported in a barplot all the relative ratios of each FAM-pair relative to the total abundance of the FAMs that are composing it. Thus, for example In the case of the pair FAM1-FAM2 in 3UTR, we calculated the following equation in order to obtain the relative FAM-pair likelihood percentage: (count of FAM1-FAM2 in 3UTR)/(count of FAM1 in 3UTR)*(count of FAM1-FAM2 in 3UTR)/(count of FAM2 in 3UTR)*100. The analysis indicated that FAM1-FAM1 pairs have the highest likelihood to create a pair within the same CLIP fragment.

[0393] In the scope of a separated analysis we counted per all four FAMs that number of appearances within each genomic feature or outside any genomic feature (“No Feature”). We plotted these counts as a barplot, grouped by FAM type, and according to genomic features.

[0394] To assess the contribution of FAMs co-clustering on the same dCLIP transcript we split CLIP fragments into two batches, namely: Single FAMs per CLIP fiber (FAMs with zero adjacent FAMs on the same CLIP fiber), and Multiple FAMs per CLIP fiber (FAMs with one or more adjacent FAMs on the same CLIP fiber). Then, we analyzed separately the FAM-likelihood ratios per each of these two batches, for each of the four FAMs, within each genomic feature.

[0395] Metagene Analysis of FAM Pairs

[0396] To determine whether FAMs have a tendency to reside next to each other as pairs in preferential manner, we plotted per each of the four FAMs its distribution of distances from its center to the center of its paired FAM. We conducted this analysis on a single bp resolution, across a window of ±200 bp (X-axis), presenting the count number for each FAM-pair on the Y-axis.

[0397] Metagene Analysis of FAM Sites for Profiling icSHAPE Signals

[0398] To determine whether CBX7 CLIP transcripts may adopt specific secondary RNA structures, we took advantage of the publically available RNA structural signatures established via in vivo and in vitro click selective 2′-hydroxyl acetylation and profiling experiments (icSHAPE). The GRCm38/mm10 bigwig data files corresponding to in vivo and in vitro icSHAPE structural profiles were obtained from GEO database (record GSE60034) (Spitale et al., 2015), and converted to the NCBI37/mm9 assembly by employing UCSC tools, bigWigToBedGraph following by liftOver. Using in house codes, we calculated separate metagene structure profiles around an anchor position that was defined as the center of each of four FAM binding motifs. Individual structural profiles of in vivo and in vitro icSHAPE scores were generated, at single nucleotide resolution, by accumulating all icSHAPE scores detected within the limited scope of 25 nucleotides upstream and downstream. The average icSHAPE profile was then generated by division of the accumulative icSHAPE score per single nucleotide by the total number of ±25 bp FAM regions containing a total icSHAPE score higher than zero (>0). Thus, 50 bp regions that harbor no icSHAPE signal around the center of FAM motif were excluded from this analysis. For contrasting the profiles of FAM motifs that were identified in CLIP regions (“Real FAMs”), against a control cohort of FAM motifs that were not identified in CLIP regions (“Predicted FAMs”), we took advantage of the previously established motif binding sites database that contains both real and predicted motifs. As described above, per each of the enriched CLIP regions that were found by our analysis to harbor FBP binding site, we scanned for predicted FBPs throughout the entire span of the genomic feature in which the real CLIP FBP was reside in. Thus, by employing the database of predicted FAM binding sites we matched per each of the ±25 bp “Real FAM” regions an equivalent number of “Predicted FAM” regions (±25 bp) that proved to harbor icSHAPE signal within the 50 bp detection window. By employing these analytic criteria, we contrasted icSHAPE profile of “Real FBPs” cohort against icSHAPE profile of equal-size “Predicted FBPs” cohort (FIG. 7).

[0399] To further determine the contribution of co-clustering of FAMs within the same dCLIP transcript we split CLIP fragments into two batches, namely: Single FAMs per CLIP fiber (FAMs with zero adjacent FAMs on the same CLIP fiber), and Multiple FAMs per CLIP fiber (FAMs with one or more adjacent FAMs on the same CLIP fiber), and performed the distribution analysis of icSHAPE reactivity per each of these batches as depicted in FIG. 14.

[0400] The Denaturing CLIP (dCLIP) Methodology

[0401] Our original goal was to identify RNA interactomes for both canonical and non-canonical PRC1. We therefore initially used both CBX7 (canonical) and RYBP (non-canonical) as bait using conventional CLIP methodologies and CBX7-specific or RYBP-specific antibodies for the pulldown. However, all initial attempts failed due to high background, as evidenced by multiple bands that span the length of SDS PAGE gel (transferred to a CLIP membrane; FIG. 8A). Increasing washing stringency to 1 M NaCl and tagging CBX7 and RYBP with hemagglutinin (HA), for which strong antibodies have been developed over the years, did not significantly improve the outcome (FIG. 8B). The high background precluded efforts to purify specific bands corresponding to CBX7- and RYBP-RNA interactions. We concluded that higher stringency washes were necessary. To enable purification under maximal stringency, we took advantage of an existing in vivo biotin tagging system (Kim et al., 2009) and adapted the components to develop a new CLIP method that would enable purification under denaturing conditions. Indeed, biotin-streptavidin interactions have among the highest affinities and greatest specificity of any non-covalent biological interactions (Kd=10⁻¹⁵M), contrasting with K_{d}'s of 10⁻⁸-10⁻⁹ M for antigen-antibody interactions.

[0402] We introduced bio-tagged CBX7 and RYBP into ES cells stably expressing BirA biotinylase and performed “denaturing CLIP” or “dCLIP” with these features (FIG. 1A): (i) A biotin-tagged protein, (ii) in vivo UV-crosslinking to identify physiologically relevant interactions, (iii) an “RNAse protection step” to preserve the “footprint” in the RNA and trim away exposed RNA regions, (iv) a stringent denaturing purification method using streptavidin beads in the presence of 8M urea, 2% SDS, and 1M NaCl in order to eliminate RNA interactions not covalently photo-crosslinked to the protein of interest, (v) size selection in a denaturing SDS-PAGE gel with membrane transfer, and (vi) preparation of deep sequencing libraries after RNA extraction from membranes. The resulting pulldowns showed dramatically improved specificity, as evidenced by predominance of a single band for CBX7 and RYBP on the CLIP membranes and corresponding Western blots (FIG. 1B, FIG. 9A). CBX7 yielded a stronger band relative to RYBP on multiple biological replicates (FIG. 9B), potentially reflecting the evolutionary impact on RYBP's RNA binding domain (Tavares et al., 2012). Visualization of the RNA eluted from the CLIP membrane confirmed the presence of a population of CBX7-binding RNAs of heterogeneous size, reflecting the different degrees of RNase digestion (FIG. 9C). The eluted RNA was sensitive to RNase but not DNase treatment (FIG. 9C), consistent with specific elution of interacting transcripts, rather than chromatin.

[0403] Because of highly stringent denaturing conditions made possible with dCLIP, we asked if it were possible to skip the SDS-PAGE and membrane transfer steps entirely, as these steps partially served to eliminate RNA-protein interactions sensitive to denaturing SDS conditions as well. Furthermore, in principle, the exclusion of the additional steps could improve recovery of extremely limited quantities of RNA that are typically associated with epigenetic complexes. To test the possibility, we eluted RNAs directly from streptavidin beads using proteinase K treatment. However, we found that the purification by SDS-PAGE and membrane transfer was absolutely necessary in the dO ES cell samples, as direct elution from beads resulted in high background for some cellular samples (FIG. 10A). On the other hand, D7 ES cell samples fared better, with both elution methods demonstrated comparable enrichment of CBX7-binding RNAs as determined by specific sequencing tags density (FIG. 10B). On-bead elution was therefore more finicky and subject to cellular differences. We therefore prefer dCLIP performed in conjunction with SDS-PAGE purification followed by nitrocellulose membrane transfer to achieve the greatest specificity.

[0404] Elution of RYBP-interacting RNAs also produced a heterogeneous population, but lower levels of RNA were eluted overall (FIGS. 2A-C). Biotag-RYBP and -CBX7 were both expressed at physiological levels in independent clonal ES cells. For CBX7, we analyzed two clones (3E, 6F). The FPKM RNA-seq values were similar for control ES cells (FPKM=44.38) versus Biotag-CBX7-expressing cells (e.g., FPKM=46.03). Expression of Bio-tag-CBX7 also resulted in no major changes in the transcriptomic profile compared to control cells (FIG. 11A). Because of the strong enrichment of RNA for CBX7, our subsequent work focused strictly on CBX7-RNA interactions.

### Example 1

### dCLIP Defines RNA Footprints for CBX7

[0405] Peak-calling using PeakRanger Software (Feng et al., 2011) revealed 8,000-10,000 statistically significant peaks in three biological replicates (FIG. 1C, FIG. 12), among which these CBX7 binding peaks were concordant and reproducible, both at the level of comparing RefSeq transcript targets (FIG. 1D) and at the level of comparing genome-wide binding footprints (FIG. 11B). Only those appearing in at least two of three biological replicates were considered true positives. Concordant peaks mapped to 1,333 distinct transcripts, with many transcripts having multiple peaks/binding sites. Because the peaks corresponded to an RNase-protected fragment, each peak represented a CBX7 “footprint” or “binding site” in the associated RNA. The median binding site was 171 nt in length, with >90% of binding fragments falling in the range of 30-600 nt (FIG. 1E). Cis-regulatory element analysis (CEAS) indicated that a relatively small number of peaks (6.9%) mapped to intergenic transcripts (FIG. 13A). Intriguingly, although the BMI1 subunit of PRC1 was recently shown to be associated primarily with noncoding chromatin ((Ray et al., 2013; Ray et al., 2016), our CBX7 library was enriched for protein-coding messenger RNAs (mRNA). Indeed, >80% of peaks occurred within protein-coding transcripts, with the 3′ untranslated region (3′UTR) accounting for 56.7% of all dCLIP peaks and 64.6% of all peaks within coding transcripts (FIG. 13A,C). Consistent with this, metagene analysis showed major enrichment at the 3′ end of transcripts (FIG. 1F). Thus, the binding pattern for the canonical form of PRC1, as viewed through CBX7, is distinct from those of PRC2 and YY1, which tend to concentrate at the 5′ end of coding genes (Beltran et al., 2016; Kaneko et al., 2014a; Sigova et al., 2015; Zhao et al., 2010).

[0406] We compared the dCLIP tags to expression level of the respective RefSeq transcripts (input RNA-seq). Among transcripts without reproducible dCLIP binding, we identified a cohort of 2,078 transcripts that possessed similar expression levels as 1,333 transcripts with reproducible CLIP tags (green and black dots; FIG. 1G, 12), yet still lacked CBX7-binding footprints (red dots, FIG. 1G), thereby arguing against the CLIP profile being a random sampling of the ES transcriptome. Myl6, for example, was highly expressed, but no significant CBX7-binding sites were called within the transcript (FIG. 12). Conversely, the consistent enrichment of transcripts with low RNA-seq FPKM values provided strong evidence for specific enrichment of CBX7 dCLIP tags. Among the 1,333 CBX7 target transcripts, 135 were called “high binders”, due to highly enriched CLIP signals (FIG. 1G, green dots). For example, Dusp9 and Dcaf12l1 RNAs were highly enriched for CBX7 binding within its 3′UTR in three biological replicates, whereas the rest of the transcript was largely devoid of dCLIP tags (FIG. 1C). This pattern held for other CBX7-interacting transcripts, such as Calm2, for which the CBX7 binding sites were concordant within the 3′UTR among three biological replicates (FIG. 12). LncRNAs such as Tug1 were also targeted, but the binding pattern was distinct from that of coding RNAs: For lncRNAs, CBX7 interaction sites were typically observed all along the transcript, rather than concentrated at the 3′ end (FIG. 12). The reproducibility between biological replicates provides a first validation for our dCLIP methodology.

[0407] We next examined how CBX7-binding sites in the RNA (dCLIP-seq) relate to CBX7's chromatin binding sites (ChIP-seq). Previous work demonstrated that CBX7 tends to to bind large number of genomic loci in mouse ES cells {Morey, 2012 #1198}. Therefore, CBX7-RNA interactions identified by dCLIP method might theoretically arise from non-specific cross-linking between chromatin-bound CBX7 and RNAs transcribed in the vicinity. To rule out this possibility, we performed CBX7 ChIP-seq using the same ES cells (FIG. 13B,C). Among the 1,333 transcripts with CBX7 binding sites, only 12% were associated with a CBX7 ChIP peak in the same RefSeq locus (inclusive of promoter region) (FIG. 1C, blue tracks; FIG. 12, blue tracks; FIG. 13D, Table b).

TABLE b
Related to FIGS. 1E,F and FIG. 2. List of all genes for which CBX7 binds
both the transcript (dCLIP) and the locus (ChIP).
1110038B12Rik; Acaca; Acsl4; Adad1; Ado; Aebp2; Agrn; Akap11; Alg11; Amfr; Arf6;
Atp11a; Aurka; Bend4; Bmpr2; Bnc2; Calm2; Camk2b; Ccdc50; Ccng1; Cdc14b; Cfdp1;
Chsy1; Clstn1; Col4a1; Cpne3; Dag1; Dcaf12l1; Dcakd; Ddah1; Dennd1b; Dlg3; Dnmt3a;
Dpysl3; Dst; Dusp16; Dusp7; Dusp9; Egln1; Eif4e2; Esrrb; Exoc6b; Fam172a; Fam20b;
Fbxl5; Fstl1; Gab1; Git1; Gm13152; Gm37013; Grik3; Gtpbp1; Hmgn1; Hsd17b12;
Igf2bp3; Igf2r; Iqsec1; Ist1; Kars; Kcnq5; Kdm7a; Larp4; Lonrf1; Lrig1; Lrrc58; Macf1;
Man2a1; Mapk4; Mcl1; Med13l; Meg3; Mest; Mief1; Mllt10; Ndrg1; Nkain1; Nmnat2;
Nova2; Npcd; Nptx1; Nr6a1; Nudt4; Ostc; Pam; Pcdhga1; Pcdhga10; Pcdhga11; Pcdhga12;
Pcdhga2; Pcdhga3; Pcdhga4; Pcdhga5; Pcdhga6; Pcdhga7; Pcdhga8; Pcdhga9; Pcdhgb1;
Pcdhgb2; Pcdhgb4; Pcdhgb5; Pcdhgb6; Pcdhgb7; Pcdhgb8; Pcdhgc3; Pcdhgc4; Pcdhgc5;
Pde4d; Peg10; Plec; Plekha2; Podxl; Ppp2r2c; Prkaa2; Prkaca; Prkar2a; Prkd3; Ptbp3;
Pvrl1; Qk; Rac1; Rbm38; Reep1; Rere; Rimklb; Rnf187; Rsrc1; Scamp1; Sdc4; Sfmbt2;
Sfrp1; Sh3pxd2a; Slc30a1; Slc38a1; Smg1; Snd1; Snn; Socs7; Sord; Sox2ot; Spen; Spock2;
Spop; Ssh2; Stag2; Stox2; Stxbp5; Tbc1d16; Tfdp1; Tmem164; Tnfrsf21; Trim44;
Trp53inp2; Tub; Ugcg; Uggt1; Usp31; Vat1; Xist; Yes1; Zfp318; Zic2; Zmat3;

[0408] This percentage was significantly lower than that for bulk expressed transcripts in the ES cells (FIG. 13D). In fact, ChIP peaks did not generally overlap dCLIP peaks (FIG. 1C, F, 12, 13C). Whereas CBX7 dCLIP tags were enriched in the 3′UTRs of mRNAs, the CBX7 ChIP reads were enriched at the 5′ end around the transcription start site (TSS; FIG. 1F). Thus, the dCLIP profiles were strikingly different from ChIP-seq profiles arguing strongly in favor of specific CBX7-RNA interactions detected by dCLIP method.

### Example 2

### Consensus Motifs Deduced from RNA Footprints

[0409] With a median footprint of 171 nt, the short and reproducible binding sites for CBX7 raised the possibility of defining consensus motifs for CBX7-containing PRC1 complexes. To deduce consensus motifs in the RNA, we performed comparative sequence analysis of CBX7-binding peaks from three dCLIP biological replicates (FIG. 2). In brief, we developed a pipeline for de novo motif identification in which we independently searched each dCLIP library (Lib.1, 2, 3; FIG. 2A) for motifs within CBX7 peaks (see STAR Methods for details). The resulting motifs were clustered based on sequence similarity into 4 distinct Familial binding profiles associated modules (FAMs) (FIG. 2B).

[0410] If the deduced motifs represented a true CBX7 RNA-binding consensus, we should expect to see enrichment of the FAM motifs in the 3′UTR. Indeed, consistent with CEAS analysis of the dCLIP peaks (FIG. 1E, FIG. 13A,C), motifs in all four FAMs were enriched in the 3′UTR (FIG. 2C). However, not all consensus sites were necessarily occupied by CBX7 in ES cells, as determined by dCLIP (FIG. 2D). For instance, only 30% of FAM1-bearing sequences in 3′UTR regions bound CBX7. The FAM-occupancy ratio—defined as the ratio of consensus sites bound by CBX7 to all consensus sites—was typically <1.0 for the 3′UTR and introns and was, interestingly, higher for the 5′UTR and coding regions (CDs). Thus, presence of a single consensus motif was not deterministic for CBX7 binding to target transcript, as is often the case for other RNA binding proteins (Taliaferro et al., 2016; Van Nostrand et al., 2016). Additional parameters, such as presence of various protein factors, binding site accessibility, and/or other CBX7 FAM motifs, could all play a role in enabling CBX7 interactions with predicted binding sites.

[0411] Another consideration is that CBX7 could have multiple contact points within one transcript, potentially contacting different faces of the RNA via different motifs. To test the latter possibility, we asked whether the motifs have a tendency to congregate on the same CLIP fragment. Analysis of all pairwise combinations of the FAMs revealed that they co-clustered, creating motif-pairs separated by ≤50 nt (FIG. 3A,B). The FAM1-FAM1 motif pair was found to be the most prevalent pair, followed by the FAM1-FAM2 pair. Other FAM couplings were also found at relatively high frequencies (FIG. 3A,B). These findings indicate that CBX7 motifs have a tendency to cluster and make possible the idea that more than one family of binding motifs might be necessary to constitute a recognition site within a given CBX7-binding transcript. Indeed, a majority of dCLIP fibers (CBX7 footprints) contained more than one FAM (FIG. 3C). We compared the FAM occupancy ratios of fibers/footprints with one FAM versus those of fibers/footprints containing multiple FAMs (FIG. 3D). Interestingly, for the 3′UTR, CBX7 footprints harboring clustered motifs demonstrated higher FAM occupancy ratios than those harboring only a single motif. Thus, to CBX7 is more likely to bind to the 3′UTR in vivo when FAM motifs are clustered, hinting at the possibility of cooperative interactions between CBX7 and RNA.

[0412] Given that both 5′ and 3′ UTRs are typically bound by large number of proteins (Glisovic et al., 2008), we asked how the CBX7 motifs might be related to binding motifs of known RNA-binding proteins. A similarity matching analysis of the 4 FAMs against a panel of >1,000 known binding motifs uncovered significant overlap (FIG. 4A). For example, FAM1 showed significant similarity to the motif for PUMILIO, a family of proteins involved in RNA degradation and inhibition of RNA translation (Spassov and Jurecic, 2003). Also demonstrating significant similarities are motifs for the RNA splicing regulator, epithelial splicing regulatory protein 1 (ESRP1; also known as RBM35a) (Warzecha et al., 2009); the cytoplasmic poly(A) binding protein (PABPC), which mediates ribosome recruitment and translation initiation of target transcripts (Bag and Bhattacharjee, 2010)); and the serine/arginine-rich splicing factor 1 (SRSF1), another regulator of RNA splicing. Thus, CBX7 motifs appear to possess prominent characteristics that overlap those of known RNA binding proteins.

[0413] We also asked whether the binding sites possess structural features by taking advantage of structural profiles established in mouse ES cells via click selective 2′-hydroxyl acetylation and profiling experiments (icSHAPE) (Spitale et al., 2015). icSHAPE-seq allows probing of RNA secondary structure both in vivo and in vitro and favors single-stranded or flexible RNA regions. icSHAPE-seq also offers advantages over DMS-seq and Cirs-seq (Incarnato et al., 2014; Rouskin et al., 2014), as it is reactive to all four nucleotides, thereby enabling the capture of RNA secondary structures at a transcriptome-wide level at higher resolution (Spitale et al., 2015). For each of the four FAMs, icSHAPE profiles were markedly different from one another (FIG. 4B), suggesting that each FAM possesses a unique RNA secondary structure. In proximity to their center, FAM1 and FAM4 had a clear preference for more unfolded structures, whereas FAM2 preferred a folded configuration. Notably, albeit being similar by pattern, the average icSHAPE profiles of all real FAMs were found to have a higher icSHAPE signal than those of their control counterparts. Because icSHAPE signals positively correlate with unfolded (more open or reactive) conformations, greater icSHAPE signals over real FAMs in comparison to their control counterparts suggest that CBX7 gravitates towards RNAs with an unfolded conformation. Similar icSHAPE profiles were observed both in vivo versus in vitro, arguing against marked interference from RNA binding proteins in vivo.

[0414] We then repeated the analysis for dCLIP fibers with clustered FAM motifs (FIG. 14). In the case of FAM1 and FAM4 in vivo, the clustering on the dCLIP fibers correlated with higher icSHAPE reactivity in comparison to dCLIP fibers with a single FAM. FAM clustering might therefore predispose to an open conformation in vivo. Differences between in vivo and in vitro profiles (FIG. 14) likely reflect inherent folding differences dependent on multiplicity of FAMs, in addition to cellular factors/binding-proteins that are only available in vivo. Collectively, our data support the idea of CBX7-binding sites being embedded in the conformationally accessible regions of associated RNAs, of secondary structures that may be governed by linear sequence motifs, and of congregated motifs that facilitate in vivo binding of CBX7 to RNA.

### Example 3

### Biochemical Validation of CBX7-Binding Sites

[0415] Next we turned to experimental systems to validate and understand the nature of the CBX7-3′UTR interactions. First, we sought to confirm select interactions using a different method of in vivo RNA pulldown and using antibodies to a different epitope of the tagged protein (as opposed to using the biotin tag to pull down CBX7). Native RIP with qPCR confirmed the enrichment of Dusp9, Calm2, and Tug1 RNAs in multiple independent biological replicates (FIG. 5A). The negative control U1 RNA was not enriched in spite of the high abundance of this RNA used for splicing.

[0416] Second, to confirm direct interactions between CBX7 and various 3′UTRs, we performed RNA electrophoretic mobility shift assays (EMSA) using CBX7 protein purified from baculovirus and purified in vitro transcribed RNAs corresponding to dCLIP peaks. We tested three representative transcripts, Calm2, Dusp9, and Dcaf12l1 (FIG. 1C, FIG. 12). RNA probes were generated from the 3′UTR binding sites Dcaf12l1, with Calm2 harboring clustered FAM1+FAM2 motifs, Dusp9 harboring clustered FAM3+FAM4 motifs, and Dcaf12l1 harboring only FAM4 motifs. Consistent with icSHAPE and the potential for secondary structures, native gels for purified unbound Dcaf12l1, Calm2, and Dusp9 probes yielded multiple bands (green arrows, FIG. 5B), suggesting conformationally complex RNAs. Addition of CBX7 protein resulted in mobility shifts for all three RNAs (asterisk, FIG. 5B), whereas addition of a control protein GFP did not. The shift for Dcaf12l1 was especially robust (red arrow, FIG. 5B, left lanes; FIG. 5C), and the interaction was competed away by excess cold Dcaf12l1 oligos (FIG. 5D). CBX7's dissociation constants (Kd) for Dcaf12l1, Calm2, and Dusp9 3′UTRs suggested affinities in the low micromolar range (FIG. 5E), consistent with previous assessments of CBX7-RNA interactions (Bernstein et al., 2006; Yap et al., 2010). Interestingly, however, its Hill coefficients suggested the potential for positive cooperativity at 2-3 binding sites per fragment in each CBX7-3′UTR interaction in vitro (FIG. 5E). Positive cooperativity binding mode was concurrent with the gradual increase in distance between shifted and non-shifted fragments following increase in CBX7 concentration (FIG. 5C)—pattern consistent with cooperative binding mode (Wang and Bell, 1994). Notably, our FAM motif analysis suggested that co-clustering is also correlated with higher FAM occupancy rates in vivo (FIG. 3D). Thus, while the overall binding affinity of CBX7 is relatively low (Kd in the micromolar range), the potential for positive cooperativity may considerably change the dynamics in the cellular setting.

[0417] We next tested the relevance of the bioinformatically predicted FAM motifs. We turned to footprints with single FAMs in order to simplify the analysis. For the FAM3 motif in the 3′UTR of Nucks1 mRNA, CBX7 shifted the RNA fragment and the shift was reduced by Nucks1 cold competitors (FIG. 5F,G). The shift was weaker for the single motif than for the 3′UTRs of Dcaf12l1, Calm2, and Dusp9, each of which contained multiple motifs—again consistent with the idea of positive cooperativity in CBX7-RNA interactions. Nevertheless, mutating the FAM3 site reduced CBX7 binding. Similar results were obtained for a single FAM1 site in the 3′UTR of Larp1 mRNA (FIG. 5F, right lanes). Taken together these data demonstrate that CBX7 directly binds the 3′UTR domains identified by dCLIP, thereby validating dCLIP as one method of identifying RNA footprints and consensus motifs.

### Example 4

### Targeting CBX7-Binding Sites In Vivo Results in Gene Upregulation

[0418] We explored potential functions of the CBX7-3′UTR interactions. Given that PRC1 is generally involved in gene repression (Simon and Kingston, 2013), we asked whether the RNA-binding activity of CBX7 may be involved in recruiting PRC1 to silence genes. To test this idea, we attempted to block the CBX7-3′UTR interactions and designed antisense oligonucleotides (ASO) comprising interspersed DNA bases and locked nucleic acids (LNA) bases to create “LNA mixmers” that are not subject to RNaseH-mediated target degradation and can therefore stably associate with target sequences (Sarma et al., 2010). For each transcript, we designed a pool of LNA mixmers to the corresponding 3′UTR peaks (FIG. 1C, FIG. 12, orange boxes). We administered the pooled LNAs to ES cells and measured effects on gene-specific expression after 24 hours. Intriguingly, targeting the CBX7-binding sites in the 3′UTR of Calm2 and Dcaf12l1 transcripts resulted in a significant 3.67- and 2.68-fold upregulation of both transcripts, respectively (FIG. 6A). Because Calm2 and Dcaf12l1 were already highly expressed transcripts in ES cells, this degree of upregulation was substantial. The upregulation was gene-specific, as Calm2 LNAs had no effect on either Dcaf12l1 or Dusp9 expression, and Dcaf12l1 LNAs had no significant effect on Calm2 or Dusp9 expression. Moreover, a negative control LNA also resulted in no changes in gene expression. These data demonstrate that gene-specific LNAs directed at the CBX7-3′UTR interactions lead to a specific mRNA upregulation of the target gene.

[0419] The repressive activity of PRC1 has been linked to both the H2AK119 ubiquitylation function and to chromatin compaction (Simon and Kingston, 2013). To understand how LNA treatment enhanced gene activity, we performed ChIP-qPCR to ask whether there were locus-specific changes to CBX7 recruitment and H2AK119Ub. Interestingly, we observed no changes in CBX7 recruitment and H2AK119 ubiquitylation at either Calm2 or Dcaf12l1 after treatment with corresponding gene-specific LNAs (FIG. 6B). To determine whether chromatin compaction was affected, we performed Formaldehyde-assisted Isolation of Regulatory Elements (FAIRE) analysis (Giresi et al., 2007) but also found no evident differences in chromatin accessibility when measured at two sites, one corresponding to a DHS and the other to a DNaseI-resistant site (FIG. 1C, FIG. 12), within Calm2 and Dcaf12l1 (FIG. 6C). This is consistent with studies indicating that CBX7 complexes do not play a role in nucleosome compaction (Grau et al., 2011). These data suggest that the upregulation observed after LNA treatment is not a consequence of chromatin changes relating to either PRC1's chromatin compaction function or its H2AK119Ub function. LNA-mediated gene upregulation could result from either co-transcriptional (e.g., elongation, splicing) or post-transcriptional mechanisms (e.g., RNA processing, stabilization). To test this idea, we examined changes in the levels of nascent transcripts (pre-mRNA) by performing RT-qPCR using intronic primer pairs. For Calm2, nascent transcript levels did not change upon treatment with Calm2-specific LNAs, but Calm2 processed mRNA levels increased (FIG. 6D), consistent with the idea of a post-transcriptional mechanism, such as RNA stabilization. For Dcaf12l1, both nascent and processed RNA levels increased (FIG. 6D), suggesting that there could be contributions from co-transcriptional and/or post-transcriptional mechanisms.

[0420] Next, we examined the effect of LNA oligomers on CBX7 binding to target RNAs in vitro. Intriguingly, while RNA EMSA showed that pre-incubating RNA with gene-specific LNAs resulted in an upward shift of the transcripts, as expected (blue arrows, FIG. 5B), the LNA did not block or displace CBX7 binding. Rather, it supershifted the CBX7-RNA complex and substantially enhanced CBX7 binding to RNA (red arrowheads, FIG. 5B). This CBX7-3′UTR supershift occurred only when incubated with the gene-specific LNA and not with control LNA. This specificity was observed in all three cases (Dcaf12l1, Calm2, and Dusp9). Thus, LNA binding appears to stabilize CBX7 interaction with the 3′UTR, producing much more robust gel shifts between CBX7 and the 3′UTR motifs in the presence of the LNAs in vitro.

[0421] To determine whether the LNA-mediated gene upregulation depended on CBX7 in vivo, we introduced the LNAs into wildtype versus Cbx7−/− ES cells (Cheng et al., 2014; Zhen et al., 2016) (FIG. 6, 15). Using Dcaf12l1 as the test case, we observed that upregulation of nascent and processed RNA by gene-specific LNAs occurred only in the presence of CBX7, and was significantly blunted when CBX7 was deleted (FIG. 6E). No effects were seen with negative control LNAs (LNA-Calm2, LNA-CtrlA). Thus, LNA-mediated gene upregulation is indeed a CBX7-dependent process. It is known that CBX8 is upregulated in ES cells when CBX7 is depleted, in order to maintain stem cell self-renewal (Morey et al., 2012; O'Loghlen et al., 2012) (FIG. 15B). The functional compensation by CBX8 is consistent with the lack of Dcaf12l1 downregulation in Cbx7−/− cells. Interestingly, however, the gene upregulation effect by the LNA was specific to CBX7. Taken together, these data demonstrate that the LNA-mediated gene upregulation is a CBX7-dependent process (FIG. 6E, 15), most likely involving both co-transcriptional and post-transcriptional mechanisms (FIG. 6D). It may also involve enhanced binding of CBX7 to the 3′UTR (FIG. 6B). Thus, CBX7—when bound to the 3′UTR—may paradoxically enhance expression of the target transcript. Consistent with this idea, analysis of probability density function revealed that transcripts bound by CBX7 (dCLIP) have a higher likelihood of expression (FPKM) than transcripts not targeted by CBX7 (FIG. 6F).

[0422] The localization of CBX7 to the 3′UTR (FIG. 1, 12) in close proximity to motifs for regulators of transcript stability (PUM) and nuclear-cytoplasmic RNA localization (PolyA-binding protein (PABPC)) (FIG. 4A) might suggest a post-transcriptional component in the LNA-mediated gene upregulation. To determine whether there was a concomitant increase at the protein level, we developed a quantitative Western blot analysis for DCAF12L1 protein and measured protein upregulation in the linear range of the assay (FIG. 6G). When Dcaf12l1-specific LNAs were administered to ES cells, we observed a 50-100% upregulation of DCAF12L1 protein in multiple biological replicates (FIG. 6H,I). Thus, although no chromatin changes were evident, the increase in mRNA levels was mirrored by an increase in protein expression. These observations are consistent with a co-transcriptional and/or post-transcriptional mechanism of gene regulation by CBX7, with enhancement of upregulation following administration LNAs targeting FAM motifs.

### Example 5

### dCLIP Analysis of Human CBX7 (hCBX7) Identifies Shared Consensus Motifs

[0423] Next, we applied dCLIP methodology to human CBX7 protein to assess whether the human orthologue shares RNA binding potential and to determine whether consensus motifs can be independently deduced from the human RNA-protein interactions. Although hCBX7 and mouse CBX7 (mCBX7) share CD and PC boxes, hCBX7 is 58 amino acids longer than mCBX7 and is therefore epitopically different (FIG. 16A,B). Nevertheless, the dCLIP methodology could be applied because the biotag rendered the baits equivalent. We performed dCLIP in human embryonic kidney cells (HEK293) and followed the same analysis pipeline developed for mCBX7 (FIG. 2A). hCBX7 indeed also bound a family of RNAs. We identified 4,772 binding peaks total, corresponding to 3,729 RefSeq transcripts. The average hCBX7 footprint size was 183 nt (FIG. 7A). CEAS analysis showed that hCBX7 also preferentially bound 3′UTRs of mRNAs (FIG. 7B, 16C,D). The representative gene, IRAK1, illustrated the 3′ preference of hCBX7 for mRNA (FIG. 7C). Because the hCBX7 footprints were also small (FIG. 7A), application of our bioinformatic pipeline enabled deduction of 9 families of consensus motifs (FIG. 7D). Intriguingly, out of 9 hCBX7 FBPs, 4 FBPs co-clustered with (bore similarity to) mouse FBPs, whereas 5 FBPs were hCBX7-specific. We confirmed select transcripts for binding to hCBX7 by UV-RIP-qPCR and observed concordant results (FIG. 7E). As was the case for mCBX7 (FIG. 4A), enriched RNA motifs for hCBX7 shared similarities with motifs for PUMILIO, and SRSF1 (FIG. 7F). Thus, hCBX7 and mCBX7 share consensus motifs for RNA binding. Notably, these motifs were independently deduced by separate dCLIP and bioinformatic analyses. Nonetheless, 5 FBPs were hCBX7-specific, consistent with its having an extra 58 amino acids that could in principle confer additional binding activities.

[0424] Finally, we examined the relationship between mCBX7/hCBX7 transcripts as defined by dCLIP and BMI1 transcripts as defined by gradient RNA immunoprecipitation (GRIP) in human HeLa cells (Ray et al., 2016). GRIP method involves formaldehyde cross-linking and gradient purification of chromatin fraction with subsequent immunoprecipitation of chromatin-bound RNAs using antibodies against the BMI1 subunit of PRC1. Despite substantial differences in methodology, there was considerable overlap, with 1,777 transcripts shared between hCBX7 and hBMI1 (Table C). This represented to nearly half of hCBX7-interacting transcripts—the 3′UTR of IRAK1 being one example (FIG. 7C). Taken together, these data validate the dCLIP methodology and pipeline and provide proof-of-concept that the technique can be applied to different epitopes in different species.

TABLE c
Related to FIG. 7. List of genes that produced specific dCLIP CBX7
binding in human HEK293 cells and GRIP BMI1 binding in human
HeLa cells (GRIP data adopted from (Ray et al., 2016).

| Refseq | Ensembl | Gene Name |
|---|---|---|
| NM_005885 | ENSG00000145495 | membrane associated ring finger 6 |
| NM_006640 | ENSG00000184640 | septin 9 |
| NM_004996 | ENSG00000103222 | ABCC1 |
| NM_001171 | ENSG00000091262 | ABCC6 |
| NM_018358 | ENSG00000161204 | ABCF3 |
| NM_022437 | ENSG00000143921 | ABCG8 |
| NM_198147 | ENSG00000168792 | ABHD15 |
| NM_021214 | ENSG00000136379 | ABHD17C |
| NM_025097 | ENSG00000164074 | ABHD18 |
| NM_005470 | ENSG00000136754 | ABIl |
| NM_005157 | ENSG00000097007 | ABL1 |
| NM_005158 | ENSG00000143322 | ABL2 |
| NM_002313 | ENSG00000099204 | ABLIM1 |
| NM_001092 | ENSG00000159842 | ABR |
| NM_145804 | ENSG00000166016 | ABTB2 |
| NM_001093 | ENSG00000076555 | ACACB |
| NM_000019 | ENSG00000075239 | ACAT1 |
| NM_022735 | ENSG00000182827 | ACBD3 |
| NM_014977 | ENSG00000100813 | ACIN1 |
| NM_004457 | | ACSL3 |
| NM_001101 | ENSG00000075624 | ACTB |
| NM_024855 | ENSG00000101442 | ACTR5 |
| NM_006988 | ENSG00000154734 | ADAMTS1 |
| NM_012091 | | ADAT1 |
| NM_182503 | ENSG00000189007 | ADAT2 |
| NM_020247 | ENSG00000163050 | ADCK3 |
| NR_110007 | ENSG00000259456 | ADNP-AS1 |
| NR_040107 | ENSG00000260898 | ADPGK-AS1 |
| NM_032550 | ENSG00000169129 | AFAP1L2 |
| NM_005935 | ENSG00000172493 | AFF1 |
| NM_012154 | ENSG00000123908 | AGO2 |
| NM_017629 | ENSG00000134698 | AGO4 |
| NM_020132 | ENSG00000160216 | AGPAT3 |
| NM_024929 | ENSG00000279355 | AGPAT4-IT1 |
| NM_015239 | ENSG00000135049 | AGTPBP1 |
| NM_015328 | ENSG00000158467 | AHCYL2 |
| NM_017651 | ENSG00000135541 | AHI1 |
| NM_005858 | ENSG00000105127 | AKAP8 |
| NM_014371 | ENSG00000011243 | AKAP8L |
| NM_024595 | ENSG00000174574 | AKIRIN1 |
| NR_002796 | | AKR7A2P1 |
| NM_000034 | ENSG00000149925 | ALDOA |
| NM_006982 | ENSG00000180318 | ALX1 |
| NM_000479 | ENSG00000104899 | AMH |
| NM_030943 | ENSG00000166126 | AMN |
| NM_016238 | ENSG00000196510 | ANAPC7 |
| NM_000037 | ENSG00000029534 | ANK1 |
| NM_015114 | ENSG00000176915 | ANKLE2 |
| NM_032217 | ENSG00000132466 | ANKRD17 |
| NM_144994 | ENSG00000163126 | ANKRD23 |
| NM_014915 | ENSG00000107890 | ANKRD26 |
| NM_015199 | ENSG00000206560 | ANKRD28 |
| NR_026844 | ENSG00000214262 | ANKRD36BP1 |
| NM_016466 | ENSG00000213337 | ANKRD39 |
| NM_152326 | ENSG00000156381 | ANKRD9 |
| NM_006401 | ENSG00000136938 | ANP32B |
| NM_030920 | ENSG00000143401 | ANP32E |
| NM_004039 | ENSG00000182718 | ANXA2 |
| NM_001153 | ENSG00000196975 | ANXA4 |
| NM_001154 | ENSG00000164111 | ANXA5 |
| NM_001158 | ENSG00000131480 | AOC2 |
| NM_004068 | ENSG00000161203 | AP2M1 |
| NM_003664 | ENSG00000132842 | AP3B1 |
| NM_001163 | ENSG00000107282 | APBA1 |
| NM_006051 | ENSG00000113108 | APBB3 |
| NM_030642 | ENSG00000128313 | APOL5 |
| NM_000484 | ENSG00000142192 | APP |
| NM_015242 | ENSG00000186635 | ARAP1 |
| NM_001658 | ENSG00000143761 | ARF1 |
| NM_004308 | ENSG00000175220 | ARHGAP1 |
| NM_021226 | ENSG00000128805 | ARHGAP22 |
| NR_046816 | ENSG00000230789 | ARHGAP26-IT1 |
| NM_004309 | ENSG00000141522 | ARHGDIA |
| NM_033415 | ENSG00000105676 | ARMC6 |
| NM_003976 | ENSG00000117407 | ARTN |
| NM_139058 | ENSG00000004848 | ARX |
| NM_019893 | ENSG00000188611 | ASAH2 |
| NR_002765 | | ASAP1-IT1 |
| NM_017873 | ENSG00000148331 | ASB6 |
| NM_001672 | ENSG00000101440 | ASIP |
| NM_004318 | ENSG00000198363 | ASPH |
| NM_015338 | ENSG00000171456 | ASXL1 |
| NM_032810 | ENSG00000138138 | ATAD1 |
| NM_007041 | ENSG00000107669 | ATE1 |
| NM_005171 | ENSG00000123268 | ATF1 |
| NM_018179 | ENSG00000171681 | ATF7IP |
| NM_033388 | ENSG00000168010 | ATG16L2 |
| NM_006395 | ENSG00000197548 | ATG7 |
| NM_001940 | ENSG00000111676 | ATN1 |
| NM_024524 | ENSG00000133657 | ATP13A3 |
| NM_000701 | ENSG00000163399 | ATP1A1 |
| NM_032766 | ENSG00000203865 | ATP1A1-AS1 |
| NM_001681 | ENSG00000174437 | ATP2A2 |
| NM_001682 | ENSG00000070961 | ATP2B1 |
| NM_014382 | ENSG00000017260 | ATP2C1 |
| NM_000705 | ENSG00000186009 | ATP4B |
| NM_001686 | ENSG00000110955 | ATP5B |
| NM_001688 | | ATP5F1 |
| NM_001685 | ENSG00000154723 | ATP5J |
| NM_004889 | ENSG00000241468 | ATP5J2 |
| NM_001697 | ENSG00000241837 | ATP5O |
| NM_001694 | ENSG00000185883 | ATP6V0C |
| NM_003945 | | ATP6V0E1 |
| NM_000489 | ENSG00000085224 | ATRX |
| NM_001698 | ENSG00000148090 | AUH |
| NM_015060 | ENSG00000105778 | AVL9 |
| NM_021732 | ENSG00000119986 | AVPI1 |
| NM_003502 | ENSG00000103126 | AXIN1 |
| NM_152490 | ENSG00000162885 | B3GALNT2 |
| NM_012200 | ENSG00000149541 | B3GAT3 |
| NM_004776 | ENSG00000158470 | B4GALT5 |
| NM_020064 | ENSG00000125492 | BARHL1 |
| NM_023005 | ENSG00000009954 | BAZ1B |
| NM_013449 | ENSG00000076108 | BAZ2A |
| NM_014567 | ENSG00000050820 | BCAR1 |
| NM_003567 | ENSG00000137936 | BCAR3 |
| NM_000633 | | BCL2 |
| NM_014739 | ENSG00000029363 | BCLAF1 |
| NM_004327 | ENSG00000186716 | BCR |
| NM_004459 | ENSG00000171634 | BPTF |
| NM_004333 | ENSG00000157764 | BRAF |
| NM_014577 | ENSG00000100425 | BRD1 |
| NM_023924 | ENSG00000028310 | BRD9 |
| NM_032043 | ENSG00000136492 | BRIP1 |
| NM_153252 | ENSG00000165288 | BRWD3 |
| NM_014962 | ENSG00000132640 | BTBD3 |
| NM_001207 | ENSG00000145741 | BTF3 |
| NM_003939 | ENSG00000166167 | BTRC |
| NM_004725 | ENSG00000154473 | BUB3 |
| NM_032024 | ENSG00000148655 | C10orf11 |
| NM_024541 | ENSG00000120029 | C10orf76 |
| NM_170746 | ENSG00000211450 | C11orf31 |
| NM_004894 | ENSG00000156411 | C14orf2 |
| NM_032366 | ENSG00000130731 | C16orf13 |
| NM_025108 | ENSG00000162062 | C16orf59 |
| NM_181655 | ENSG00000186665 | C17orf58 |
| NM_001085430 | ENSG00000214226 | C17orf67 |
| NM_031446 | ENSG00000141428 | C18orf21 |
| NM_024038 | ENSG00000123144 | C19orf43 |
| NM_178830 | ENSG00000160392 | C19orf47 |
| NM_138358 | ENSG00000142444 | C19orf52 |
| NM_001025495 | ENSG00000162913 | C1orf145 |
| NM_017891 | ENSG00000131591 | C1orf159 |
| NM_001010979 | | C1orf189 |
| NM_001212 | ENSG00000108561 | C1QBP |
| NM_030945 | | C1QTNF3 |
| NM_001014442 | | C1QTNF9B-AS1 |
| NM_080828 | ENSG00000125975 | C20orf173 |
| NM_018840 | ENSG00000101084 | C20orf24 |
| NM_017874 | ENSG00000101220 | C20orf27 |
| NM_058180 | ENSG00000160298 | C21orf58 |
| NM_032561 | ENSG00000128346 | C22orf23 |
| NM_017880 | ENSG00000115998 | C2orf42 |
| NM_173649 | ENSG00000239605 | C2orf61 |
| NM_023073 | ENSG00000197603 | C5orf42 |
| NM_001277348 | | C5orf66 |
| NM_178508 | ENSG00000186577 | C6orf1 |
| NM_001029863 | | C6orf120 |
| NM_030939 | | C6orf62 |
| NM_001130929 | ENSG00000243317 | C7orf73 |
| NM_001080482 | | C9orf172 |
| NM_018956 | ENSG00000165698 | C9orf9 |
| NM_138375 | ENSG00000134508 | CABLES1 |
| NM_020898 | ENSG00000012822 | CALCOCO1 |
| NM_004342 | ENSG00000122786 | CALD1 |
| NM_001743 | ENSG00000143933 | CALM2 |
| NM_005184 | ENSG00000160014 | CALM3 |
| NM_033429 | ENSG00000129007 | CALML4 |
| NM_001745 | ENSG00000164615 | CAMLG |
| NM_015447 | ENSG00000130559 | CAMSAP1 |
| NM_015215 | ENSG00000171735 | CAMTA1 |
| NM_018448 | | CAND1 |
| NM_001746 | ENSG00000127022 | CANX |
| NM_000070 | ENSG00000092529 | CAPN3 |
| NM_004291 | ENSG00000164326 | CARTPT |
| NM_020764 | ENSG00000167971 | CASKIN1 |
| NR_132322 | ENST00000428155 | CASP16P |
| NM_005189 | ENSG00000173894 | CBX2 |
| NM_014292 | ENSG00000183741 | CBX6 |
| NM_145045 | ENSG00000198003 | CCDC151 |
| NR_034089 | | CCDC18-AS1 |
| NM_001282544 | ENSG00000166329 | CCDC182 |
| NM_005436 | ENSG00000108091 | CCDC6 |
| NM_001144995 | | CCDC85C |
| NM_018318 | ENSG00000123106 | CCDC91 |
| NM_052848 | ENSG00000142039 | CCDC97 |
| NM_001243212 | ENSG00000262484 | CCER2 |
| NM_005190 | ENSG00000112237 | CCNC |
| NM_053056 | ENSG00000110092 | CCND1 |
| NM_006835 | ENSG00000118816 | CCNI |
| NM_003858 | | CCNK |
| NM_030937 | ENSG00000221978 | CCNL2 |
| NM_145012 | ENSG00000108100 | CCNY |
| NM_006430 | ENSG00000115484 | CCT4 |
| NM_012073 | ENSG00000150753 | CCT5 |
| NM_006429 | ENSG00000135624 | CCT7 |
| NM_006016 | ENSG00000135535 | CD164 |
| NM_139286 | ENSG00000176386 | CDC26 |
| NM_020240 | ENSG00000158985 | CDC42SE2 |
| NM_080668 | ENSG00000146670 | CDCA5 |
| NM_022124 | ENSG00000107736 | CDH23 |
| NM_006201 | ENSG00000102225 | CDK16 |
| NM_004642 | ENSG00000111328 | CDK2AP1 |
| NM_016082 | ENSG00000101391 | CDK5RAP1 |
| NM_001261 | ENSG00000136807 | CDK9 |
| NM_017774 | ENSG00000145996 | CDKAL1 |
| NM_003948 | | CDKL2 |
| NM_003818 | ENSG00000101290 | CDS2 |
| NM_004824 | ENSG00000153046 | CDYL |
| NM_005195 | | CEBPD |
| NM_001806 | ENSG00000153879 | CEBPG |
| NM_006560 | ENSG00000149187 | CELF1 |
| NM_018455 | ENSG00000166451 | CENPN |
| NM_024322 | ENSG00000138092 | CENPO |
| NM_018140 | ENSG00000112877 | CEP72 |
| NM_013384 | ENSG00000143418 | CERS2 |
| NM_013242 | ENSG00000070761 | CFAP20 |
| NM_005507 | ENSG00000172757 | CFL1 |
| NM_024111 | ENSG00000128965 | CHAC1 |
| NM_001273 | ENSG00000111642 | CHD4 |
| NM_015557 | ENSG00000116254 | CHD5 |
| NM_020920 | ENSG00000100888 | CHD8 |
| NM_001275 | ENSG00000100604 | CHGA |
| NM_000390 | ENSG00000188419 | CHM |
| NM_024591 | ENSG00000176108 | CHMP6 |
| NM_152272 | ENSG00000147457 | CHMP7 |
| NM_017444 | ENSG00000104472 | CHRAC1 |
| NM_012125 | | CHRM5 |
| NM_020402 | ENSG00000129749 | CHRNA10 |
| NM_000748 | ENSG00000160716 | CHRNB2 |
| NM_004273 | ENSG00000122863 | CHST3 |
| NM_004804 | | CIAO1 |
| NM_006384 | ENSG00000185043 | CIB1 |
| NM_015125 | ENSG00000079432 | CIC |
| NM_152480 | | CIRBP-AS1 |
| NM_004143 | ENSG00000125931 | CITED1 |
| NM_006825 | ENSG00000136026 | CKAP4 |
| NM_001827 | ENSG00000123975 | CKS2 |
| NM_015282 | ENSG00000074054 | CLASP1 |
| NM_015097 | ENSG00000163539 | CLASP2 |
| NM_005602 | | CLDN11 |
| NM_014343 | ENSG00000106404 | CLDN15 |
| NM_001111319 | ENSG00000177300 | CLDN22 |
| NM_015226 | ENSG00000038532 | CLEC16A |
| NM_001080511 | ENSG00000236279 | CLEC2L |
| NM_014666 | ENSG00000113282 | CLINT1 |
| NM_001291 | ENSG00000176444 | CLK2 |
| NM_024769 | | CLMP |
| NM_018941 | ENSG00000182372 | CLN8 |
| NM_001833 | ENSG00000122705 | CLTA |
| NM_001835 | ENSG00000070371 | CLTCL1 |
| NM_144601 | ENSG00000140931 | CMTM3 |
| NM_182553 | ENSG00000174871 | CNIH2 |
| NM_016284 | ENSG00000125107 | CNOT1 |
| NM_014515 | ENSG00000111596 | CNOT2 |
| NM_018224 | ENSG00000106603 | COA1 |
| NM_001008215 | ENSG00000183513 | COA5 |
| NM_015198 | ENSG00000106078 | COBL |
| NM_153603 | ENSG00000168434 | COG7 |
| NM_032518 | ENSG00000188517 | COL25A1 |
| NM_000495 | ENSG00000188153 | COL4A5 |
| NM_024656 | ENSG00000130309 | COLGALT1 |
| NM_000754 | ENSG00000093010 | COMT |
| NM_016128 | ENSG00000181789 | COPG1 |
| NM_144576 | ENSG00000135469 | COQ10A |
| NM_001302 | ENSG00000241563 | CORT |
| NM_016468 | ENSG00000133983 | COX16 |
| NM_001865 | ENSG00000112695 | COX7A2 |
| NM_014912 | ENSG00000107864 | CPEB3 |
| NM_003915 | ENSG00000214078 | CPNE1 |
| NR_002763 | ENSG00000280837 | CPS1-IT1 |
| NM_006693 | ENSG00000160917 | CPSF4 |
| NM_004380 | ENSG00000005339 | CREBBP |
| NM_021212 | | CREBZF |
| NM_016441 | ENSG00000150938 | CRIM1 |
| NM_001312 | ENSG00000182809 | CRIP2 |
| NM_015986 | ENSG00000176390 | CRLF3 |
| NM_006371 | ENSG00000170275 | CRTAP |
| NM_001316 | ENSG00000124207 | CSE1L |
| NR_027320 | | CSNK1A1P1 |
| NM_001893 | ENSG00000141551 | CSNK1D |
| NM_001894 | ENSG00000213923 | CSNK1E |
| NM_004384 | ENSG00000151292 | CSNK1G3 |
| NM_006574 | ENSG00000114646 | CSPG5 |
| NM_030809 | ENSG00000110925 | CSRNP2 |
| NM_000100 | | CSTB |
| NM_001326 | ENSG00000176102 | CSTF3 |
| NM_001329 | | CTBP2 |
| NM_003798 | ENSG00000119326 | CTNNAL1 |
| NM_001904 | ENSG00000168036 | CTNNB1 |
| NM_001331 | ENSG00000198561 | CTNND1 |
| NM_005231 | ENSG00000085733 | CTTN |
| NM_206833 | ENSG00000178531 | CTXN1 |
| NM_003588 | ENSG00000158290 | CUL4B |
| NM_015089 | ENSG00000112659 | CUL9 |
| NM_001913 | ENSG00000257923 | CUX1 |
| NM_018294 | ENSG00000095485 | CWF19L1 |
| NM_019885 | ENSG00000003137 | CYP26B1 |
| NM_000786 | ENSG00000001630 | CYP51A1 |
| NM_001554 | ENSG00000142871 | CYR61 |
| NM_004762 | ENSG00000108669 | CYTH1 |
| NM_004393 | ENSG00000173402 | DAG1 |
| NM_139179 | ENSG00000164535 | DAGLB |
| NM_018114 | ENSG00000178149 | DALRD3 |
| NR_130730 | ENSG00000235244 | DANT2 |
| NM_018959 | ENSG00000071626 | DAZAP1 |
| NR_027642 | | DCAF13P3 |
| NM_024819 | ENSG00000172992 | DCAKD |
| NM_152624 | ENSG00000172795 | DCP2 |
| NM_004082 | ENSG00000204843 | DCTN1 |
| NM_004398 | ENSG00000178105 | DDX10 |
| NM_006386 | ENSG00000100201 | DDX17 |
| NM_018332 | ENSG00000168872 | DDX19A |
| NM_004728 | ENSG00000165732 | DDX21 |
| NM_001356 | ENSG00000215301 | DDX3X |
| NM_014829 | ENSG00000145833 | DDX46 |
| NM_004396 | ENSG00000108654 | DDX5 |
| NM_020936 | ENSG00000111364 | DDX55 |
| NM_020664 | ENSG00000242612 | DECR2 |
| NM_003472 | ENSG00000124795 | DEK |
| NM_015213 | ENSG00000184014 | DENND5A |
| NR_046909 | ENSG00000255867 | DENND5B-AS1 |
| NM_024295 | ENSG00000136986 | DERL1 |
| NM_198512 | ENSG00000184210 | DGAT2L6 |
| NM_003648 | ENSG00000077044 | DGKD |
| NM_014762 | ENSG00000116133 | DHCR24 |
| NM_014681 | ENSG00000134815 | DHX34 |
| NM_020865 | ENSG00000174953 | DHX36 |
| NM_005219 | ENSG00000131504 | DIAPH1 |
| NR_046539 | ENSG00000227528 | DIAPH3-AS1 |
| NM_014388 | ENSG00000117597 | DIEXF |
| NM_015151 | ENSG00000160305 | DIP2A |
| NM_001931 | ENSG00000150768 | DLAT |
| NM_005887 | ENSG00000176124 | DLEU1 |
| NM_004087 | ENSG00000075711 | DLG1 |
| NM_001364 | ENSG00000150672 | DLG2 |
| NR_046586 | ENSG00000231651 | DLG3-AS1 |
| NR_024585 | | DLG5-AS1 |
| NM_001933 | ENSG00000119689 | DLST |
| NM_001373 | ENSG00000185842 | DNAH14 |
| NM_001539 | | DNAJA1 |
| NM_005494 | ENSG00000105993 | DNAJB6 |
| NM_003315 | ENSG00000168259 | DNAJC7 |
| NM_005223 | | DNASE1 |
| NM_032482 | ENSG00000104885 | DOT1L |
| NM_080750 | | DPH3P1 |
| NM_013379 | ENSG00000176978 | DPP7 |
| NM_145038 | ENSG00000157856 | DRC1 |
| NM_013235 | ENSG00000113360 | DROSHA |
| NM_024918 | ENSG00000149636 | DSN1 |
| NM_021907 | ENSG00000138101 | DTNB |
| NM_022156 | | DUS1L |
| NM_030640 | ENSG00000111266 | DUSP16 |
| NM_001394 | ENSG00000120875 | DUSP4 |
| NM_001376 | ENSG00000197102 | DYNC1H1 |
| NM_005225 | ENSG00000101412 | E2F1 |
| NM_001949 | ENSG00000112242 | E2F3 |
| NM_203394 | ENSG00000165891 | E2F7 |
| NM_018029 | ENSG00000255423 | EBLN2 |
| NM_003797 | ENSG00000074266 | EED |
| NM_001960 | ENSG00000104529 | EEF1D |
| NM_018100 | ENSG00000096093 | EFHC1 |
| NM_001962 | ENSG00000184349 | EFNA5 |
| NM_004429 | ENSG00000090776 | EFNB1 |
| NM_017555 | ENSG00000269858 | EGLN2 |
| NM_014601 | ENSG00000024422 | EHD2 |
| NM_001039765 | ENSG00000281796 | EHMT1-IT1 |
| NM_014335 | ENSG00000255302 | EID1 |
| NM_001008394 | ENSG00000255150 | EID3 |
| NM_003758 | ENSG00000104131 | EIF3J |
| NM_001417 | ENSG00000063046 | EIF4B |
| NM_004095 | ENSG00000187840 | EIF4EBP1 |
| NM_003760 | ENSG00000075151 | EIF4G3 |
| NM_024930 | ENSG00000164181 | ELOVL7 |
| NM_006067 | ENSG00000131148 | EMC8 |
| NM_000117 | ENSG00000102119 | EMD |
| NM_152463 | ENSG00000154920 | EME1 |
| NM_001423 | | EMP1 |
| NM_001424 | ENSG00000213853 | EMP2 |
| NM_020193 | ENSG00000158636 | EMSY |
| NM_001242699 | ENSG00000188316 | ENO4 |
| NM_017512 | ENSG00000132199 | ENOSF1 |
| NM_004436 | ENSG00000143420 | ENSA |
| NM_004437 | ENSG00000159023 | EPB41 |
| NM_013333 | ENSG00000063245 | EPN1 |
| NM_178039 | ENSG00000082805 | ERC1 |
| NM_000122 | ENSG00000163161 | ERCC3 |
| NM_015966 | ENSG00000125991 | ERGIC3 |
| NM_207332 | ENSG00000104714 | ERICH1 |
| NM_006459 | | ERLIN1 |
| NM_024896 | ENSG00000099219 | ERMP1 |
| NM_015292 | ENSG00000139641 | ESYT1 |
| NM_031279 | ENSG00000164089 | ETNPPL |
| NM_018166 | ENSG00000142694 | EVA1B |
| NM_015189 | ENSG00000144036 | EXOC6B |
| NM_014285 | ENSG00000130713 | EXOSC2 |
| NM_058219 | | EXOSC6 |
| NM_004456 | ENSG00000106462 | EZH2 |
| NR_102425 | | EZR-AS1 |
| NM_182705 | ENSG00000183688 | FAM101B |
| NM_019018 | | FAM105A |
| NM_144635 | ENSG00000175182 | FAM131A |
| NM_152789 | ENSG00000234545 | FAM133B |
| NM_014883 | ENSG00000138640 | FAM13A |
| NM_015159 | ENSG00000054965 | FAM168A |
| NM_001009993 | ENSG00000152102 | FAM168B |
| NM_001105282 | ENSG00000164556 | FAM183BP |
| NM_032130 | ENSG00000135436 | FAM186B |
| NM_003704 | ENSG00000125386 | FAM193A |
| NM_207368 | ENSG00000225663 | FAM195B |
| NM_001039762 | ENSG00000188916 | FAM196A |
| NM_207318 | ENSG00000123575 | FAM199X |
| NM_015224 | ENSG00000163946 | FAM208A |
| NM_017782 | ENSG00000108021 | FAM208B |
| NM_021806 | ENSG00000071889 | FAM3A |
| NM_001013622 | ENSG00000174137 | FAM53A |
| NR_120630 | | FAM53B-AS1 |
| NM_016255 | ENSG00000137414 | FAM8A1 |
| NM_000135 | ENSG00000187741 | FANCA |
| NM_152633 | ENSG00000181544 | FANCB |
| NM_018062 | ENSG00000115392 | FANCL |
| NM_014808 | ENSG00000006607 | FARP2 |
| NM_004104 | ENSG00000169710 | FASN |
| NM_005245 | ENSG00000083857 | FAT1 |
| NM_022452 | ENSG00000156860 | FBRS |
| NM_012158 | ENSG00000005812 | FBXL3 |
| NM_032807 | ENSG00000134452 | FBXO18 |
| NR_003136 | | FBXO22-AS1 |
| NM_012176 | ENSG00000151876 | FBXO4 |
| NM_012347 | ENSG00000112146 | FBXO9 |
| NM_022039 | ENSG00000107829 | FBXW4 |
| NM_138782 | ENSG00000157107 | FCHO2 |
| NM_004111 | ENSG00000168496 | EEN1 |
| NM_002005 | ENSG00000182511 | FES |
| NM_004113 | ENSG00000114279 | FGF12 |
| NM_004114 | ENSG00000129682 | FGF13 |
| NM_000142 | ENSG00000068078 | FGFR3 |
| NM_001449 | ENSG00000022267 | FHL1 |
| NM_007076 | ENSG00000198855 | FICD |
| NR_026975 | ENSG00000213468 | FIRRE |
| NM_021939 | ENSG00000141756 | FKBP10 |
| NM_004470 | ENSG00000173486 | FKBP2 |
| NM_002014 | ENSG00000004478 | FKBP4 |
| NM_024301 | ENSG00000181027 | FKRP |
| NM_001456 | ENSG00000196924 | FLNA |
| NM_001457 | ENSG00000136068 | FLNB |
| NM_052905 | ENSG00000157827 | FMNL2 |
| NM_002024 | ENSG00000102081 | FMR1 |
| NM_014923 | ENSG00000102531 | FNDC3A |
| NM_004514 | ENSG00000141568 | FOXK2 |
| NM_005197 | ENSG00000053254 | FOXN3 |
| NM_002015 | ENSG00000150907 | FOXO1 |
| NM_020875 | ENSG00000138759 | FRAS1 |
| NM_174938 | ENSG00000172159 | FRMD3 |
| NM_032135 | ENSG00000189139 | FSCB |
| NM_002032 | ENSG00000167996 | FTH1 |
| NM_003902 | ENSG00000162613 | FUBP1 |
| NM_032664 | ENSG00000172728 | FUT10 |
| NM_005087 | ENSG00000114416 | FXR1 |
| NM_002040 | ENSG00000154727 | GABPA |
| NM_015973 | ENSG00000069482 | GAL |
| NM_022087 | ENSG00000178234 | GALNT11 |
| NM_052917 | ENSG00000144278 | GALNT13 |
| NM_002046 | ENSG00000111640 | GAPDH |
| NM_006478 | ENSG00000185340 | GAS2L1 |
| NM_032638 | ENSG00000179348 | GATA2 |
| NM_017660 | ENSG00000167491 | GATAD2A |
| NM_004564 | ENSG00000059691 | GATB |
| NM_176818 | ENSG00000257218 | GATC |
| NM_020944 | ENSG00000070610 | GBA2 |
| NM_001485 | ENSG00000168505 | GBX2 |
| NM_005811 | ENSG00000135414 | GDF11 |
| NM_000514 | ENSG00000168621 | GDNF |
| NM_015044 | ENSG00000103365 | GGA2 |
| NR_130107 | ENSG00000281189 | GHET1 |
| NM_021081 | ENSG00000118702 | GHRH |
| NR_004431 | ENSG00000240288 | GHRLOS |
| NM_006541 | ENSG00000108010 | GLRX3 |
| NM_006877 | ENSG00000137198 | GMPR |
| NM_007353 | ENSG00000146535 | GNA12 |
| NM_004297 | ENSG00000156049 | GNA14 |
| NM_002072 | ENSG00000156052 | GNAQ |
| NM_000516 | ENSG00000087460 | GNAS |
| NM_006098 | ENSG00000204628 | GNB2L1 |
| NM_019067 | | GNL3L |
| NM_017600 | ENSG00000238105 | GOLGA2P5 |
| NM_005895 | ENSG00000090615 | GOLGA3 |
| NM_014498 | ENSG00000173905 | GOLIM4 |
| NM_022130 | ENSG00000113384 | GOLPH3 |
| NM_015530 | ENSG00000115806 | GORASP2 |
| NM_004871 | ENSG00000108587 | GOSR1 |
| NM_002079 | ENSG00000120053 | GOT1 |
| NM_004488 | | GP5 |
| NM_016363 | ENSG00000088053 | GP6 |
| NM_174931 | ENSG00000152133 | GPATCH11 |
| NM_018040 | ENSG00000092978 | GPATCH2 |
| NM_017926 | ENSG00000089916 | GPATCH2L |
| NM_001002909 | | GPATCH8 |
| NM_170699 | ENSG00000179921 | GPBAR1 |
| NM_022913 | ENSG00000062194 | GPBP1 |
| NM_004466 | ENSG00000179399 | GPC5 |
| NM_001505 | ENSG00000164850 | GPER1 |
| NM_014373 | ENSG00000173890 | GPR160 |
| NM_000581 | ENSG00000233276 | GPX1 |
| NM_001012642 | ENSG00000175318 | GRAMD2 |
| NM_181711 | ENSG00000161835 | GRASP |
| NM_012203 | ENSG00000137106 | GRHPR |
| NM_017551 | ENSG00000182771 | GRID1 |
| NR_033368 | ENSG00000156273 | GRIK1-A52 |
| NM_014619 | ENSG00000149403 | GRIK4 |
| NM_002087 | ENSG00000030582 | GRN |
| NM_014615 | ENSG00000131149 | GSE1 |
| NM_144675 | ENSG00000169181 | GSG1L |
| NM_002093 | ENSG00000082701 | GSK3B |
| NM_001512 | ENSG00000170899 | GSTA4 |
| NM_001514 | ENSG00000137947 | GTF2B |
| NM_002095 | ENSG00000197265 | GTF2E2 |
| NM_002097 | ENSG00000122034 | GTF3A |
| NM_012341 | | GTPBP4 |
| NM_176791 | ENSG00000124196 | GTSF1L |
| NM_033553 | ENSG00000197273 | GUCA2A |
| NM_207331 | ENSG00000183666 | GUSBP1 |
| NM_002105 | ENSG00000188486 | H2AFX |
| NM_004893 | ENSG00000113648 | H2AFY |
| NR_002315 | | H3F3AP4 |
| NM_001010915 | | HACD4 |
| NM_021175 | | HAMP |
| NM_005333 | ENSG00000004961 | HCCS |
| NR_046608 | | HCFC1-AS1 |
| NM_001194 | ENSG00000099822 | HCN2 |
| NM_015401 | ENSG00000061273 | HDAC7 |
| NM_018486 | ENSG00000147099 | HDAC8 |
| NM_005336 | ENSG00000115677 | HDLBP |
| NM_018063 | ENSG00000119969 | HELLS |
| NM_004667 | ENSG00000128731 | HERC2 |
| NM_138820 | ENSG00000146066 | HIGD2A |
| NM_003325 | ENSG00000100084 | HIRA |
| NM_005319 | ENSG00000187837 | HIST1H1C |
| NM_005321 | ENSG00000168298 | HIST1H1E |
| NM_021063 | ENSG00000158373 | HIST1H2BD |
| NM_080593 | | HIST1H2BK |
| NM_003530 | | HIST1H3D |
| NM_003545 | ENSG00000276966 | HIST1H4E |
| NM_003543 | ENSG00000158406 | HIST1H4H |
| NM_002114 | ENSG00000095951 | HIVEP1 |
| NM_024567 | ENSG00000147421 | HMBOX1 |
| NM_144655 | ENSG00000148357 | HMCN2 |
| NM_002129 | | HMGB2 |
| NR_002944 | | HNRNPA1P10 |
| NM_002137 | ENSG00000122566 | HNRNPA2B1 |
| NM_004499 | ENSG00000197451 | HNRNPAB |
| NM_002138 | | HNRNPD |
| NM_005463 | ENSG00000152795 | HNRNPDL |
| NM_005520 | ENSG00000169045 | HNRNPH1 |
| NM_004501 | ENSG00000153187 | HNRNPU |
| NM_007040 | ENSG00000105323 | HNRNPUL1 |
| NR_037946 | ENSG00000234857 | HNRNPUL2-BSCL2 |
| NR_033201 | ENSG00000233101 | HOXB-AS3 |
| NM_016287 | ENSG00000127483 | HP1BP3 |
| NM_012262 | ENSG00000153936 | HS2ST1 |
| NM_005114 | | HS3ST1 |
| NM_147175 | ENSG00000171004 | HS6ST2 |
| NM_005348 | ENSG00000080824 | HSP90AA1 |
| NM_006597 | ENSG00000109971 | HSPA8 |
| NM_006644 | ENSG00000120694 | HSPH1 |
| NM_031407 | ENSG00000086758 | HUWE1 |
| NM_006389 | ENSG00000149428 | HYOU1 |
| NM_016400 | ENSG00000140264 | HYPK |
| NM_015325 | ENSG00000164151 | ICE1 |
| NM_012405 | ENSG00000116237 | ICMT |
| NM_002166 | ENSG00000115738 | ID2 |
| NM_004907 | ENSG00000160888 | IER2 |
| NM_001170820 | ENSG00000244242 | IFITM10 |
| NM_000629 | ENSG00000142166 | IFNAR1 |
| NM_001550 | ENSG00000006652 | IFRD1 |
| NM_016004 | ENSG00000101052 | IFT52 |
| NM_006546 | ENSG00000159217 | IGF2BP1 |
| NM_006547 | ENSG00000136231 | IGF2BP3 |
| NM_018725 | ENSG00000056736 | IL17RB |
| NM_144717 | ENSG00000174564 | IL20RB |
| NM_152899 | ENSG00000104951 | IL4I1 |
| NM_033416 | ENSG00000136718 | IMP4 |
| NM_032727 | ENSG00000148798 | INA |
| NM_020238 | ENSG00000149503 | INCENP |
| NM_016162 | ENSG00000111653 | ING4 |
| NM_017759 | ENSG00000114933 | INO80D |
| NM_019892 | ENSG00000148384 | INPP5E |
| NM_005542 | ENSG00000186480 | INSIG1 |
| NM_020748 | ENSG00000108506 | INTS2 |
| NM_016291 | ENSG00000068745 | IP6K2 |
| NM_002271 | ENSG00000065150 | IPO5 |
| NR_121669 | | IQCJ-SCHIP1-AS1 |
| NM_014869 | ENSG00000144711 | IQSEC1 |
| NM_001569 | ENSG00000184216 | IRAK1 |
| NM_182972 | ENSG00000168264 | IRF2BP2 |
| NM_032643 | ENSG00000128604 | IRF5 |
| NM_001572 | ENSG00000185507 | IRF7 |
| NM_003749 | ENSG00000185950 | IRS2 |
| NM_003604 | ENSG00000133124 | IRS4 |
| NM_024710 | ENSG00000063241 | ISOC2 |
| NM_000419 | ENSG00000005961 | ITGA2B |
| NM_012278 | ENSG00000147166 | ITGB1BP2 |
| NM_002223 | ENSG00000123104 | ITPR2 |
| NM_003024 | ENSG00000205726 | ITSN1 |
| NM_006469 | ENSG00000116679 | IVNS1ABP |
| NM_004973 | ENSG00000008083 | JARID2 |
| NR_034097 | | JAZF1-AS1 |
| NM_004241 | ENSG00000171988 | JMJD1C |
| NM_006694 | ENSG00000143543 | JTB |
| NM_005354 | ENSG00000130522 | JUND |
| NM_030929 | | KAZALD1 |
| NR_126346 | ENSG00000253696 | KBTBD11-OT1 |
| NM_016506 | ENSG00000123444 | KBTBD4 |
| NM_003636 | ENSG00000069424 | KCNAB2 |
| NM_012284 | ENSG00000135519 | KCNH3 |
| NM_002247 | ENSG00000156113 | KCNMA1 |
| NM_024076 | ENSG00000153885 | KCTD15 |
| NM_016121 | ENSG00000136636 | KCTD3 |
| NM_198404 | | KCTD4 |
| NM_006801 | ENSG00000105438 | KDELR1 |
| NM_006855 | ENSG00000100196 | KDELR3 |
| NM_014663 | ENSG00000066135 | KDM4A |
| NM_002035 | ENSG00000119537 | KDSR |
| NM_006559 | ENSG00000121774 | KHDRBS1 |
| NM_014686 | ENSG00000166398 | KIAA0355 |
| NM_001080398 | ENSG00000136813 | K1AA0368 |
| NM_020910 | ENSG00000122778 | KIAA1549 |
| NM_030650 | ENSG00000144320 | KIAA1715 |
| NM_032435 | ENSG00000143674 | KIAA1804 |
| NM_153369 | | KIAA1919 |
| NM_133465 | ENSG00000165185 | KIAA1958 |
| NM_015074 | ENSG00000054523 | KIF1B |
| NM_194313 | ENSG00000186638 | KIF24 |
| NM_018012 | ENSG00000162849 | KIF26B |
| NM_006845 | ENSG00000142945 | KIF2C |
| NM_012310 | ENSG00000090889 | KIF4A |
| NM_004521 | ENSG00000170759 | KIF5B |
| NM_005552 | ENSG00000126214 | KLC1 |
| NM_007249 | ENSG00000118922 | KLF12 |
| NM_016270 | ENSG00000127528 | KLF2 |
| NM_014997 | ENSG00000128607 | KLHDC10 |
| NM_014315 | ENSG00000165516 | KLHDC2 |
| NM_017566 | ENSG00000104731 | KLHDC4 |
| NM_018143 | | KLHL11 |
| NM_014851 | ENSG00000162413 | KLHL21 |
| NM_032775 | ENSG00000099910 | KLHL22 |
| NM_025067 | ENSG00000119771 | KLHL29 |
| NM_017415 | ENSG00000146021 | KLHL3 |
| NM_005933 | ENSG00000118058 | KMT2A |
| NM_014727 | ENSG00000272333 | KMT2B |
| NM_021230 | ENSG00000055609 | KMT2C |
| NM_003482 | ENSG00000167548 | KMT2D |
| NM_002265 | | KPNB1 |
| NM_015478 | ENSG00000185513 | L3MBTL1 |
| NM_002286 | ENSG00000089692 | LAG3 |
| NM_018407 | ENSG00000104341 | LAPTM4B |
| NM_004737 | ENSG00000133424 | LARGE |
| NM_015155 | ENSG00000107929 | LARP4B |
| NR_048543 | | LARS2-AS1 |
| NM_004690 | ENSG00000131023 | LATS1 |
| NM_002296 | ENSG00000143815 | LBR |
| NM_182551 | ENSG00000172954 | LCLAT1 |
| NM_003893 | ENSG00000198728 | LDB1 |
| NM_002300 | ENSG00000111716 | LDHB |
| NM_002301 | ENSG00000166796 | LDHC |
| NM_004338 | ENSG00000168675 | LDLRAD4 |
| NM_181336 | ENSG00000161904 | LEMD2 |
| NM_198988 | ENSG00000275183 | LENG9 |
| NM_005567 | ENSG00000108679 | LGALS3BP |
| NM_014564 | ENSG00000107187 | LHX3 |
| NR_037642 | ENSG00000230124 | LHX4-AS1 |
| NM_002311 | ENSG00000005156 | LIG3 |
| NR_033947 | | LIMD1-AS1 |
| NM_022165 | ENSG00000104863 | LIN7B |
| NR_033376 | ENSG00000203801 | LINC00222 |
| NR_103753 | | LINC00491 |
| NR_033876 | ENSG00000227036 | LINC00511 |
| NR_027103 | ENSG00000224514 | LINC00620 |
| NR_038970 | ENSG00000258441 | LINC00641 |
| NR_028138 | ENSG00000271614 | LINC00936 |
| NR_038292 | ENSG00000281706 | LINC01012 |
| NR_024423 | ENSG00000250056 | LINC01018 |
| NR_132375 | | LINC01078 |
| NM_178529 | ENSG00000279873 | LINC01126 |
| NR_103791 | | LINC01127 |
| NR_015360 | ENSG00000245937 | LINC01184 |
| NR_110616 | | LINC01355 |
| NR_109928 | | LINC01424 |
| NR_033917 | ENSG00000230176 | LINC01433 |
| NR_110218 | ENSG00000237877 | LINC01473 |
| NM_175616 | ENSG00000236882 | LINC01554 |
| NR_039999 | ENSG00000262468 | LINC01569 |
| NR_120371 | ENSG00000245479 | LINC01585 |
| NR_125410 | ENSG00000272138 | LINC01607 |
| NM_001256373 | ENSG00000257242 | LINC01619 |
| NM_032808 | ENSG00000169783 | LINGO1 |
| NM_004140 | ENSG00000131899 | LLGL1 |
| NR_110945 | ENSG00000260439 | LMF1-AS1 |
| NM_005572 | ENSG00000160789 | LMNA |
| NM_005573 | ENSG00000113368 | LMNB1 |
| NM_005358 | ENSG00000136153 | LMO7 |
| NR_027406 | | LOC100129034 |
| NR_045112 | | LOC100129617 |
| NM_001242698 | | LOC100130357 |
| NM_001272086 | | LOC100130370 |
| NR_046285 | | LOC100130744 |
| NM_001243523 | | LOC100130880 |
| NR_024594 | ENSG00000267882 | LOC100131496 |
| NR_027069 | ENSG00000231609 | LOC100132215 |
| NM_001242885 | | LOC100287036 |
| NR_033175 | | LOC100289673 |
| NR_038333 | ENSG00000246422 | LOC100505658 |
| NR_038982 | | LOC100507346 |
| NR_038244 | ENSG00000235652 | LOC100507557 |
| NM_001278082 | ENSG00000275765 | LOC100652758 |
| NR_110102 | ENSG00000242687 | LOC101927550 |
| NR_110808 | ENSG00000266100 | LOC101927557 |
| NR_110931 | | LOC101927817 |
| NR_125892 | | LOC101928279 |
| NR_125858 | | LOC101928461 |
| NR_110092 | ENSG00000258274 | LOC101928731 |
| NR_105012 | | LOC101929154 |
| NR_123739 | ENSG00000230550 | LOC101929441 |
| NR_120366 | | LOC101929679 |
| NR_120665 | ENSG00000227495 | LOC102724009 |
| NR_120674 | ENSG00000231964 | LOC102724323 |
| NR_120684 | ENSG00000260917 | LOC103344931 |
| NR_131227 | | LOC105616981 |
| NR_033921 | ENSG00000265533 | LOC643542 |
| NR_034179 | ENSG00000231305 | LOC653712 |
| NR_003671 | | LOC728024 |
| NM_004793 | ENSG00000196365 | LONP1 |
| NM_031490 | | LONP2 |
| NM_006726 | ENSG00000198589 | LRBA |
| NM_153377 | ENSG00000139263 | LRIG3 |
| NM_002335 | ENSG00000162337 | LRP5 |
| NM_002336 | ENSG00000070018 | LRP6 |
| NM_052888 | ENSG00000185158 | LRRC37B |
| NM_018103 | ENSG00000171492 | LRRC8D |
| NM_006309 | ENSG00000093167 | LRRFIP2 |
| NM_024652 | ENSG00000154237 | LRRK1 |
| NM_152344 | ENSG00000161654 | LSM12 |
| NM_012321 | ENSG00000130520 | LSM4 |
| NM_019839 | ENSG00000213906 | LTB4R2 |
| NM_000428 | ENSG00000119681 | LTBP2 |
| NM_021070 | ENSG00000168056 | LTBP3 |
| NM_032860 | ENSG00000135521 | LTV1 |
| NM_016019 | ENSG00000146963 | LUC7L2 |
| NM_005583 | ENSG00000104903 | LYL1 |
| NM_020466 | ENSG00000083099 | LYRM2 |
| NM_003550 | ENSG00000002822 | MAD1L1 |
| NR_002819 | ENSG00000251562 | MALAT1 |
| NM_014757 | ENSG00000161021 | MAML1 |
| NM_006699 | ENSG00000198162 | MAN1A2 |
| NM_022818 | ENSG00000140941 | MAP1LC3B |
| NM_030662 | ENSG00000126934 | MAP2K2 |
| NM_004721 | ENSG00000073803 | MAP3K13 |
| NM_003188 | ENSG00000135341 | MAP3K7 |
| NM_024871 | ENSG00000180834 | MAP6D1 |
| NM_004759 | ENSG00000162889 | MAPKAPK2 |
| NM_012325 | ENSG00000101367 | MAPRE1 |
| NM_023009 | ENSG00000175130 | MARCKSL1 |
| NM_002380 | ENSG00000132561 | MATN2 |
| NM_021038 | ENSG00000152601 | MBNL1 |
| NM_018388 | ENSG00000076770 | MBNL3 |
| NM_022132 | ENSG00000131844 | MCCC2 |
| NM_006739 | ENSG00000100297 | MCM5 |
| NM_005915 | ENSG00000076003 | MCM6 |
| NM_005916 | ENSG00000166508 | MCM7 |
| NM_005918 | ENSG00000146701 | MDH2 |
| NM_002393 | ENSG00000198625 | MDM4 |
| NM_004991 | ENSG00000085276 | MECOM |
| NM_004992 | ENSG00000169057 | MECP2 |
| NM_032286 | ENSG00000133398 | MED10 |
| NM_005121 | ENSG00000108510 | MED13 |
| NM_005481 | ENSG00000175221 | MED16 |
| NM_004269 | ENSG00000160563 | MED27 |
| NM_015955 | ENSG00000162959 | MEMO1 |
| NM_000244 | ENSG00000133895 | MEN1 |
| NM_006838 | ENSG00000111142 | METAP2 |
| NM_001010977 | ENSG00000139780 | METTL21C |
| NM_024109 | ENSG00000067365 | METTL22 |
| NM_019852 | ENSG00000165819 | METTL3 |
| NM_016626 | ENSG00000176624 | MEX3C |
| NM_203304 | ENSG00000181588 | MEX3D |
| NM_004225 | ENSG00000147324 | MFHAS1 |
| NM_001120 | ENSG00000109736 | MFSD10 |
| NM_033055 | ENSG00000156875 | MFSD14A |
| NM_002413 | ENSG00000085871 | MGST2 |
| NM_033386 | ENSG00000100139 | MICALL1 |
| NM_139162 | ENSG00000177427 | MIEF2 |
| NM_002415 | | MIF |
| NM_021933 | ENSG00000116691 | MIIP |
| NR_031611 | | MIR1206 |
| NR_031595 | ENSG00000221585 | MIR1226 |
| NR_031596 | ENSG00000221411 | MIR1227 |
| NR_036262 | | MIR1244-2 |
| NR_031658 | ENSG00000221417 | MIR1257 |
| NR_031692 | | MIR1279 |
| NR_029682 | ENSG00000207708 | MIR141 |
| NR_029525 | ENSG00000198987 | MIR16-2 |
| NR_038975 | ENSG00000224020 | MIR181A2HG |
| NR_031750 | ENSG00000253030 | MIR2116 |
| NR_036056 | ENSG00000276326 | MIR2909 |
| NR_036068 | ENSG00000264358 | MIR3122 |
| NR_036075 | ENSG00000265396 | MIR3128 |
| NR_036091 | ENSG00000265623 | MIR3139 |
| NR_036117 | ENSG00000265014 | MIR3160-1 |
| NR_036152 | ENSG00000266189 | MIR3186 |
| NR_130463 | ENSG00000265306 | MIR3195 |
| NR_039851 | ENSG00000265371 | MIR3198-2 |
| NR_029506 | ENSG00000207698 | MIR32 |
| NR_029896 | | MIR324 |
| NR_029507 | ENSG00000207932 | MIR33A |
| NR_037415 | ENSG00000264944 | MIR3620 |
| NR_037424 | ENSG00000281156 | MIR3651 |
| NR_037425 | ENSG00000265072 | MIR3652 |
| NR_037427 | | MIR3654 |
| NR_037430 | ENSG00000266370 | MIR3657 |
| NR_037431 | | MIR3658 |
| NR_037450 | ENSG00000263813 | MIR3679 |
| NR_037465 | ENSG00000264818 | MIR3714 |
| NR_039667 | ENSG00000263361 | MIR378H |
| NR_037486 | ENSG00000264897 | MIR3921 |
| NR_037498 | ENSG00000266509 | MIR3934 |
| NR_030398 | | MIR421 |
| NR_036177 | ENSG00000264763 | MIR4295 |
| NR_036197 | ENSG00000265195 | MIR4312 |
| NR_039624 | | MIR4426 |
| NR_039626 | ENSG00000266262 | MIR4428 |
| NR_039646 | ENSG00000263721 | MIR4444-1 |
| NR_039662 | ENSG00000263670 | MIR4457 |
| NR_039664 | ENSG00000265421 | MIR4459 |
| NR_039666 | ENSG00000263963 | MIR4461 |
| NR_039676 | ENSG00000271899 | MIR4466 |
| NR_039685 | ENSG00000264941 | MIR4474 |
| NR_039719 | ENSG00000266704 | MIR4498 |
| NR_030255 | ENSG00000207726 | MIR455 |
| NR_039787 | ENSG00000266245 | MIR4644 |
| NR_039790 | ENSG00000265700 | MIR4647 |
| NR_039814 | ENSG00000266315 | MIR4668 |
| NR_039819 | ENSG00000263979 | MIR4672 |
| NR_039849 | ENSG00000265455 | MIR4700 |
| NR_039902 | ENSG00000263409 | MIR4747 |
| NR_039903 | ENSG00000265879 | MIR4748 |
| NR_039915 | ENSG00000265329 | MIR4758 |
| NR_039964 | ENSG00000265080 | MIR4800 |
| NR_039967 | ENSG00000264099 | MIR4803 |
| NR_039968 | ENSG00000263593 | MIR4804 |
| NR_030166 | | MIR491 |
| NR_039912 | | MIR499B |
| NR_039969 | ENSG00000266241 | MIR5047 |
| NR_049816 | ENSG00000266307 | MIR5093 |
| NR_039973 | ENSG00000266270 | MIR5096 |
| NR_036088 | ENSG00000265981 | MIR544B |
| NR_030258 | ENSG00000207820 | MIR545 |
| NR_039621 | ENSG00000264419 | MIR548AC |
| NR_039629 | ENSG00000265301 | MIR548AD |
| NR_049853 | | MIR548AU |
| NR_031677 | ENSG00000221537 | MIR548H1 |
| NR_036071 | ENSG00000265056 | MIR548S |
| NR_036103 | ENSG00000265520 | MIR548V |
| NR_049846 | ENSG00000263540 | MIR5582 |
| NR_049851 | ENSG00000263629 | MIR5586 |
| NR_049866 | ENSG00000264056 | MIR5685 |
| NR_049880 | ENSG00000266721 | MIR5695 |
| NR_106713 | ENSG00000276162 | MIR5739 |
| NR_030305 | ENSG00000207956 | MIR579 |
| NR_030313 | ENSG00000207769 | MIR586 |
| NR_030318 | ENSG00000207973 | MIR589 |
| NR_030321 | ENSG00000207741 | MIR590 |
| NR_030324 | ENSG00000207588 | MIR593 |
| NR_030333 | ENSG00000207693 | MIR602 |
| NR_106718 | ENSG00000278433 | MIR6070 |
| NR_030343 | ENSG00000273834 | MIR612 |
| NR_106745 | ENSG00000273500 | MIR6129 |
| NR_106748 | ENSG00000275870 | MIR6132 |
| NR_030351 | ENSG00000207967 | MIR620 |
| NR_030356 | ENSG00000207766 | MIR626 |
| NR_030366 | ENSG00000207556 | MIR636 |
| NR_030374 | ENSG00000207997 | MIR644A |
| NR_106997 | ENSG00000281678 | MIR6516 |
| NR_106773 | ENSG00000275466 | MIR6716 |
| NR_106778 | ENSG00000275859 | MIR6720 |
| NR_106786 | ENSG00000274258 | MIR6728 |
| NR_106805 | ENSG00000276102 | MIR6747 |
| NR_106824 | ENSG00000275101 | MIR6766 |
| NR_106840 | ENSG00000275107 | MIR6782 |
| NR_106841 | ENSG00000278223 | MIR6783 |
| NR_106845 | ENSG00000275505 | MIR6787 |
| NR_106850 | ENSG00000273657 | MIR6792 |
| NR_106854 | ENSG00000275652 | MIR6796 |
| NR_106865 | ENSG00000275924 | MIR6807 |
| NR_106877 | ENSG00000278420 | MIR6819 |
| NR_106909 | ENSG00000274673 | MIR6850 |
| NR_106914 | ENSG00000276124 | MIR6855 |
| NR_106916 | ENSG00000278204 | MIR6857 |
| NR_106929 | ENSG00000276741 | MIR6869 |
| NR_106937 | ENSG00000273932 | MIR6877 |
| NR_106938 | | MIR6878 |
| NR_106940 | ENSG00000275967 | MIR6880 |
| NR_106946 | ENSG00000273892 | MIR6886 |
| NR_106948 | ENSG00000275141 | MIR6888 |
| NR_106949 | ENSG00000274552 | MIR6889 |
| NR_106960 | ENSG00000275891 | MIR7110 |
| NR_106981 | ENSG00000278571 | MIR7161 |
| NR_031757 | ENSG00000211524 | MIR718 |
| NR_106988 | | MIR7641-2 |
| NR_107030 | ENSG00000277202 | MIR8063 |
| NR_107035 | ENSG00000273912 | MIR8068 |
| NR_107042 | ENSG00000277942 | MIR8075 |
| NR_024391 | ENSG00000267374 | MIR924HG |
| NR_030760 | ENSG00000216083 | MIR936 |
| NR_030637 | | MIR941-1 |
| NR_030640 | ENSG00000215930 | MIR942 |
| NR_030641 | ENSG00000216105 | MIR943 |
| NR_029484 | ENSG00000208012 | MIRLET7F2 |
| NM_018353 | ENSG00000129534 | MIS18BP1 |
| NM_002417 | ENSG00000148773 | MKI67 |
| NM_020831 | ENSG00000196588 | MKL1 |
| NM_017572 | ENSG00000099875 | MKNK2 |
| NM_014160 | ENSG00000075975 | MKRN2 |
| NM_014730 | ENSG00000110917 | MLEC |
| NM_000249 | ENSG00000076242 | MLH1 |
| NM_014381 | ENSG00000119684 | MLH3 |
| NM_004641 | ENSG00000078403 | MLLT10 |
| NM_032951 | ENSG00000009950 | MLXIPL |
| NR_102705 | | MMP24-AS1 |
| NM_198468 | ENSG00000146263 | MMS22L |
| NM_002430 | ENSG00000169184 | MN1 |
| NM_006791 | ENSG00000185787 | MORF4L1 |
| NM_012286 | ENSG00000123562 | MORF4L2 |
| NM_020963 | ENSG00000155363 | MOV10 |
| NM_002434 | ENSG00000103152 | MPG |
| NM_005792 | ENSG00000135698 | MPHOSPH6 |
| NM_138701 | | MPLKIP |
| NM_001932 | ENSG00000161647 | MPP3 |
| NM_015134 | ENSG00000133030 | MPRIP |
| NM_033296 | ENSG00000179010 | MRFAP1 |
| NM_152301 | ENSG00000178988 | MRFAP1L1 |
| NM_018270 | | MRGBP |
| NM_014078 | ENSG00000172172 | MRPL13 |
| NM_032111 | ENSG00000180992 | MRPL14 |
| NM_024540 | ENSG00000143314 | MRPL24 |
| NR_002208 | | MRPL42P5 |
| NM_016640 | ENSG00000112996 | MRPS30 |
| NM_020662 | ENSG00000124532 | MRS2 |
| NM_001012982 | | MSANTD1 |
| NM_006745 | ENSG00000052802 | MSMO1 |
| NM_002444 | ENSG00000147065 | MSN |
| NR_024117 | | MSTO2P |
| NM_002451 | ENSG00000099810 | MTAP |
| NM_025198 | ENSG00000120832 | MTERF2 |
| NM_007358 | ENSG00000143033 | MTF2 |
| NM_138419 | ENSG00000146410 | MTFR2 |
| NM_015440 | ENSG00000120254 | MTHFD1L |
| NM_145808 | ENSG00000105887 | MTPN |
| NM_000254 | ENSG00000116984 | MTR |
| NM_138383 | ENSG00000132613 | MTSS1L |
| NM_020749 | ENSG00000129422 | MTUS1 |
| NR_046378 | | MTUS2-AS1 |
| NM_005961 | ENSG00000184956 | MUC6 |
| NM_005115 | ENSG00000013364 | MVP |
| NM_002466 | ENSG00000101057 | MYBL2 |
| NM_002467 | ENSG00000136997 | MYC |
| NR_046716 | ENSG00000236051 | MYCBP2-AS1 |
| NM_002474 | ENSG00000133392 | MYH11 |
| NM_021019 | ENSG00000092841 | MYL6 |
| NM_018657 | ENSG00000085274 | MYNN |
| NM_005379 | ENSG00000166866 | MYO1A |
| NM_004145 | ENSG00000099331 | MYO9B |
| NM_025146 | ENSG00000121579 | NAA50 |
| NM_005594 | ENSG00000196531 | NACA |
| NM_052876 | ENSG00000160877 | NACC1 |
| NM_199461 | ENSG00000188613 | NANOS1 |
| NM_004537 | ENSG00000187109 | NAP1L1 |
| NM_145201 | ENSG00000147813 | NAPRT |
| NM_024662 | ENSG00000135372 | NAT10 |
| NM_145117 | ENSG00000166833 | NAV2 |
| NM_198945 | ENSG00000144426 | NBEAL1 |
| NM_022346 | ENSG00000109805 | NCAPG |
| NM_017760 | ENSG00000146918 | NCAPG2 |
| NM_018553 | | NCBP3 |
| NM_016453 | ENSG00000213672 | NCKIPSD |
| NM_014071 | ENSG00000198646 | NCOA6 |
| NM_030808 | ENSG00000166579 | NDEL1 |
| NM_014434 | ENSG00000188566 | NDOR1 |
| NM_020465 | ENSG00000103034 | NDRG4 |
| NM_016013 | ENSG00000137806 | NDUFAF1 |
| NR_002802 | | NEAT1 |
| NM_018090 | ENSG00000157191 | NECAP2 |
| NM_133494 | ENSG00000151414 | NEK7 |
| NM_004713 | | NEMF |
| NM_018092 | ENSG00000171208 | NETO2 |
| NR_120675 | ENSG00000235470 | NEURL1-AS1 |
| NM_004555 | ENSG00000072736 | NFATC3 |
| NM_003204 | ENSG00000082641 | NFE2L1 |
| NR_104180 | ENSG00000237853 | NFIA-AS1 |
| NM_005597 | ENSG00000141905 | NFIC |
| NM_002501 | ENSG00000008441 | NFIX |
| NM_002504 | ENSG00000086102 | NFX1 |
| NM_015514 | ENSG00000129460 | NGDN |
| NM_014380 | ENSG00000166681 | NGFRAP1 |
| NM_016350 | ENSG00000100503 | NIN |
| NM_015384 | ENSG00000164190 | NIPBL |
| NM_020202 | | NIT2 |
| NM_173522 | ENSG00000233382 | NKAPP1 |
| NM_016231 | ENSG00000087095 | NLK |
| NM_002512 | ENSG00000011052 | NME2 |
| NM_022787 | ENSG00000173614 | NMNAT1 |
| NM_005386 | ENSG00000053438 | NNAT |
| NM_022451 | ENSG00000173145 | NOC3L |
| NM_016167 | | NOL7 |
| NM_004741 | ENSG00000166197 | NOLC1 |
| NM_003703 | ENSG00000087269 | NOP14 |
| NM_002517 | ENSG00000130751 | NPAS1 |
| NM_000271 | ENSG00000141458 | NPC1 |
| NM_015392 | ENSG00000107281 | NPDC1 |
| NM_017921 | ENSG00000182446 | NPLOC4 |
| NM_002520 | ENSG00000181163 | NPM1 |
| NM_002522 | ENSG00000171246 | NPTX1 |
| NM_021724 | ENSG00000126368 | NR1D1 |
| NM_005126 | ENSG00000174738 | NR1D2 |
| NM_003889 | ENSG00000144852 | NR1I2 |
| NR_024046 | | NRADDP |
| NM_002524 | ENSG00000213281 | NRAS |
| NM_002525 | ENSG00000078618 | NRDC |
| NM_005011 | ENSG00000106459 | NRF1 |
| NM_173685 | ENSG00000156831 | NSMCE2 |
| NM_014595 | ENSG00000125458 | NT5C |
| NM_020201 | ENSG00000205309 | NT5M |
| NM_173474 | ENSG00000157045 | NTAN1 |
| NM_014064 | ENSG00000148335 | NTMT1 |
| NM_030952 | ENSG00000163545 | NUAK2 |
| NR_046633 | ENSG00000235191 | NUCB1-AS1 |
| NM_022731 | ENSG00000069275 | NUCKS1 |
| NM_032869 | ENSG00000120526 | NUDCD1 |
| NM_015332 | | NUDCD3 |
| NM_020772 | ENSG00000108256 | NUFIP2 |
| NM_015231 | ENSG00000030066 | NUP160 |
| NM_024923 | ENSG00000132182 | NUP210 |
| NM_005085 | ENSG00000126883 | NUP214 |
| NM_007172 | ENSG00000093000 | NUP50 |
| NM_138459 | ENSG00000153989 | NUS1 |
| NM_006362 | ENSG00000162231 | NXF1 |
| NM_022463 | ENSG00000167693 | NXN |
| NM_004152 | ENSG00000104904 | OAZ1 |
| NM_015311 | ENSG00000124006 | OBSL1 |
| NM_152635 | ENSG00000138315 | OIT3 |
| NM_025136 | ENSG00000125741 | OPA3 |
| NM_001708 | ENSG00000128617 | OPN1SW |
| NM_000607 | ENSG00000229314 | ORM1 |
| NM_014182 | | ORMDL2 |
| NR_049771 | ENSG00000232490 | OSBPL10-AS1 |
| NM_017670 | ENSG00000167770 | OTUB1 |
| NM_002560 | ENSG00000135124 | P2RX4 |
| NM_002568 | ENSG00000070756 | PABPC1 |
| NM_030979 | | PABPC3 |
| NM_004643 | | PABPN1 |
| NM_145048 | ENSG00000163138 | PACRGL |
| NM_000430 | ENSG00000007168 | PAFAH1B1 |
| NM_016480 | ENSG00000120727 | PAIP2 |
| NM_000919 | ENSG00000145730 | PAM |
| NM_006999 | ENSG00000112941 | PAPD7 |
| NM_173462 | ENSG00000100767 | PAPLN |
| NM_019619 | ENSG00000148498 | PARD3 |
| NM_018622 | ENSG00000175193 | PARL |
| NM_001618 | ENSG00000143799 | PARP1 |
| NM_017851 | ENSG00000138617 | PARP16 |
| NM_013327 | ENSG00000188677 | PARVB |
| NM_002583 | | PAWR |
| NM_022129 | ENSG00000108187 | PBLD |
| NM_002585 | ENSG00000185630 | PBX1 |
| NM_006195 | ENSG00000167081 | PBX3 |
| NM_025245 | ENSG00000105717 | PBX4 |
| NR_109828 | | PCBP2-OT1 |
| NM_018929 | ENSG00000240764 | PCDHGC5 |
| NM_032373 | ENSG00000180628 | PCGF5 |
| NM_020357 | ENSG00000081154 | PCNP |
| NM_006031 | ENSG00000160299 | PCNT |
| NM_032346 | ENSG00000126249 | PDCD2L |
| NM_004708 | ENSG00000105185 | PDCD5 |
| NM_013374 | ENSG00000170248 | PDCD6IP |
| NM_002599 | ENSG00000186642 | PDE2A |
| NM_000921 | ENSG00000172572 | PDE3A |
| NM_002605 | ENSG00000073417 | PDE8A |
| NM_006849 | ENSG00000185615 | PDIA2 |
| NM_015200 | ENSG00000121892 | PDS5A |
| NM_003681 | ENSG00000160209 | PDXK |
| NM_173791 | | PDZD8 |
| NM_002567 | ENSG00000089220 | PEBP1 |
| NM_138575 | ENSG00000247077 | PGAM5 |
| NM_000291 | | PGK1 |
| NM_006667 | ENSG00000101856 | PGRMC1 |
| NM_024419 | ENSG00000087157 | PGS1 |
| NM_014660 | ENSG00000106443 | PHF14 |
| NM_015651 | ENSG00000119403 | PHF19 |
| NM_005392 | ENSG00000197724 | PHF2 |
| NM_016436 | ENSG00000025293 | PHF20 |
| NM_024297 | ENSG00000040633 | PHF23 |
| NM_006608 | ENSG00000116793 | PHTF1 |
| NM_174933 | ENSG00000175287 | PHYHD1 |
| NM_153370 | ENSG00000164530 | PI16 |
| NM_017933 | ENSG00000153823 | PID1 |
| NM_002645 | ENSG00000011405 | PIK3C2A |
| NR_126366 | ENSG00000231789 | PIK3CD-AS2 |
| NM_005027 | ENSG00000105647 | PIK3R2 |
| NM_014602 | ENSG00000196455 | PIK3R4 |
| NR_003571 | | PIN4P1 |
| NM_003559 | ENSG00000276293 | PIP4K2B |
| NM_012417 | ENSG00000154217 | PITPNC1 |
| NM_001199924 | ENSG00000260804 | PKI55 |
| NM_003706 | ENSG00000105499 | PLA2G4C |
| NM_021796 | ENSG00000170965 | PLAC1 |
| NM_001029869 | ENSG00000173261 | PLAC8L1 |
| NM_178836 | ENSG00000179598 | PLD6 |
| NM_000445 | ENSG00000178209 | PLEC |
| NM_019012 | ENSG00000052126 | PLEKHA5 |
| NM_015993 | ENSG00000102934 | PLLP |
| NM_022737 | ENSG00000105520 | PLPPR2 |
| NM_005032 | ENSG00000102024 | PLS3 |
| NM_032242 | ENSG00000114554 | PLXNA1 |
| NM_002673 | ENSG00000164050 | PLXNB1 |
| NM_002676 | ENSG00000100417 | PMM1 |
| NM_015160 | ENSG00000165688 | PMPCA |
| NM_002687 | ENSG00000100941 | PNN |
| NM_015720 | ENSG00000114631 | PODXL2 |
| NM_015227 | ENSG00000186866 | POFUT2 |
| NM_017542 | | POGK |
| NM_015100 | ENSG00000143442 | POGZ |
| NM_021173 | ENSG00000175482 | POLD4 |
| NM_002693 | ENSG00000140521 | POLG |
| NM_019014 | ENSG00000125630 | POLR1B |
| NM_006232 | ENSG00000163882 | POLR2H |
| NM_138338 | ENSG00000100413 | POLR3H |
| NM_017739 | ENSG00000085998 | POMGNT1 |
| NM_006237 | ENSG00000152192 | POU4F1 |
| NM_153216 | ENSG00000248483 | POU5F2 |
| NM_006903 | ENSG00000138777 | PPA2 |
| NM_133263 | ENSG00000155846 | PPARGC1B |
| NM_002706 | ENSG00000138032 | PPM1B |
| NM_020700 | ENSG00000111110 | PPM1H |
| NM_144641 | ENSG00000164088 | PPM1M |
| NM_002710 | ENSG00000186298 | PPP1CC |
| NM_002481 | ENSG00000077157 | PPP1R12B |
| NM_001007533 | ENSG00000182676 | PPP1R27 |
| NM_002716 | ENSG00000137713 | PPP2R1B |
| NM_021132 | ENSG00000107758 | PPP3CB |
| NM_005605 | ENSG00000120910 | PPP3CC |
| NM_005134 | ENSG00000154845 | PPP4R1 |
| NM_014678 | ENSG00000100239 | PPP6R2 |
| NM_018312 | ENSG00000110075 | PPP6R3 |
| NM_017765 | ENSG00000040487 | PQLC2 |
| NM_032152 | ENSG00000133246 | PRAM1 |
| NR_051984 | ENSG00000258725 | PRC1-AS1 |
| NM_013388 | ENSG00000138073 | PREB |
| NM_006553 | ENSG00000141391 | PRELID3A |
| NM_153026 | ENSG00000139174 | PRICKLE1 |
| NM_002733 | ENSG00000181929 | PRKAG1 |
| NM_002734 | ENSG00000108946 | PRKAR1A |
| NM_002735 | ENSG00000188191 | PRKAR1B |
| NR_110822 | | PRKCA-AS1 |
| NM_005400 | ENSG00000171132 | PRKCE |
| NM_003891 | ENSG00000126231 | PROZ |
| NM_018061 | ENSG00000134186 | PRPF38B |
| NM_017892 | ENSG00000196504 | PRPF40A |
| NM_012469 | ENSG00000101161 | PRPF6 |
| NM_020719 | ENSG00000126464 | PRR12 |
| NM_013318 | ENSG00000130723 | PRRC2B |
| NM_015172 | ENSG00000117523 | PRRC2C |
| NM_145239 | ENSG00000167371 | PRRT2 |
| NM_000021 | ENSG00000080815 | PSEN1 |
| NM_021144 | ENSG00000164985 | PSIP1 |
| NM_002788 | ENSG00000100567 | PSMA3 |
| NM_002789 | ENSG00000041357 | PSMA4 |
| NM_002795 | ENSG00000277791 | PSMB3 |
| NM_002796 | ENSG00000159377 | PSMB4 |
| NM_002799 | ENSG00000136930 | PSMB7 |
| NM_002805 | ENSG00000087191 | PSMC5 |
| NM_002815 | ENSG00000108671 | PSMD11 |
| NM_002816 | | PSMD12 |
| NM_002808 | ENSG00000175166 | PSMD2 |
| NM_003720 | ENSG00000183527 | PSMG1 |
| NM_001128591 | ENSG00000180822 | PSMG4 |
| NM_030664 | ENSG00000165983 | PTER |
| NM_020440 | ENSG00000134247 | PTGFRN |
| NM_005607 | ENSG00000169398 | PTK2 |
| NM_003463 | ENSG00000112245 | PTP4A1 |
| NM_003479 | ENSG00000184007 | PTP4A2 |
| NM_002834 | ENSG00000179295 | PTPN11 |
| NM_014369 | ENSG00000072135 | PTPN18 |
| NM_015466 | ENSG00000076201 | PTPN23 |
| NM_002850 | ENSG00000105426 | PTPRS |
| NM_004339 | ENSG00000183255 | PTTG1IP |
| NM_015317 | ENSG00000055917 | PUM2 |
| NM_013357 | ENSG00000172733 | PURG |
| NM_031292 | ENSG00000129317 | PUS7L |
| NM_012293 | ENSG00000130508 | PXDN |
| NM_002859 | ENSG00000089159 | PXN |
| NR_038924 | ENSG00000255857 | PXN-AS1 |
| NM_002863 | ENSG00000100504 | PYGL |
| NM_005609 | ENSG00000068976 | PYGM |
| NM_015617 | ENSG00000171016 | PYGO1 |
| NM_198180 | ENSG00000188710 | QRFP |
| NM_002826 | ENSG00000116260 | QSOX1 |
| NM_014925 | ENSG00000179912 | R3HDM2 |
| NM_025151 | ENSG00000156675 | RAB11FIP1 |
| NM_016322 | ENSG00000119396 | RAB14 |
| NM_014999 | | RAB21 |
| NM_004249 | ENSG00000157869 | RAB28 |
| NM_001031834 | | RAB40AL |
| NM_004637 | ENSG00000075785 | RAB7A |
| NM_005370 | | RAB8A |
| NM_006908 | ENSG00000136238 | RAC1 |
| NM_005053 | ENSG00000179262 | RAD23A |
| NM_002874 | ENSG00000119318 | RAD23B |
| NM_134422 | ENSG00000002016 | RAD52 |
| NM_006550 | ENSG00000197275 | RAD54B |
| NM_015106 | ENSG00000164080 | RAD54L2 |
| NR_130894 | ENSG00000237328 | RAI1-AS1 |
| NM_006266 | ENSG00000160271 | RALGDS |
| NM_002884 | ENSG00000116473 | RAP1A |
| NM_015646 | ENSG00000127314 | RAP1B |
| NM_016340 | ENSG00000158987 | RAPGEF6 |
| NM_016339 | ENSG00000108352 | RAPGEFL1 |
| NM_005055 | ENSG00000165917 | RAPSN |
| NM_020320 | ENSG00000146282 | RARS2 |
| NM_006506 | ENSG00000155903 | RASA2 |
| NM_018211 | ENSG00000162437 | RAVER2 |
| NM_006910 | ENSG00000122257 | RBBP6 |
| NM_014309 | ENSG00000100320 | RBFOX2 |
| NM_022768 | ENSG00000162775 | RBM15 |
| NM_018605 | ENSG00000139746 | RBM26 |
| NM_004902 | ENSG00000131051 | RBM39 |
| NM_002896 | ENSG00000173933 | RBM4 |
| NM_031492 | ENSG00000173914 | RBM4B |
| NM_014248 | | RBX1 |
| NM_018715 | ENSG00000179051 | RCC2 |
| NM_002902 | | RCN2 |
| NM_016606 | ENSG00000132563 | REEP2 |
| NM_001001330 | ENSG00000165476 | REEP3 |
| NM_032871 | ENSG00000054967 | RELT |
| NM_013400 | ENSG00000214022 | REPIN1 |
| NM_004726 | ENSG00000169891 | REPS2 |
| NM_020695 | ENSG00000079313 | REXO1 |
| NM_015523 | ENSG00000076043 | REXO2 |
| NM_002913 | ENSG00000035928 | RFC1 |
| NM_002915 | ENSG00000133119 | RFC3 |
| NM_002919 | ENSG00000080298 | RFX3 |
| NM_020211 | ENSG00000182175 | RGNM_ |
| NM_005614 | ENSG00000106615 | RHEB |
| NM_001252499 | ENSG00000171792 | RHNO1 |
| NM_004040 | ENSG00000143878 | RHOB |
| NM_152756 | ENSG00000164327 | RICTOR |
| NM_018151 | ENSG00000080345 | RIF1 |
| NM_012421 | ENSG00000117000 | RLF |
| NM_001013838 | ENSG00000159753 | RLTPR |
| NM_018145 | ENSG00000137824 | RMDN3 |
| NR_003051 | ENSG00000269900 | RMRP |
| NM_152470 | ENSG00000141622 | RNF165 |
| NM_001098638 | ENSG00000166439 | RNF169 |
| NR_046834 | ENSG00000237738 | RNF216-IT1 |
| NM_003958 | ENSG00000112130 | RNF8 |
| NR_023343 | ENSG00000264229 | RNU4ATAC |
| NR_125730 | ENSG00000207357 | RNU6-2 |
| NR_023344 | ENSG00000221676 | RNU6ATAC |
| NM_002941 | ENSG00000169855 | ROBO1 |
| NR_102746 | | ROPN1L-AS1 |
| NM_000975 | ENSG00000142676 | RPL11 |
| NM_002948 | ENSG00000174748 | RPL15 |
| NM_000983 | ENSG00000116251 | RPL22 |
| NM_000991 | ENSG00000108107 | RPL28 |
| NM_000992 | ENSG00000162244 | RPL29 |
| NM_000993 | ENSG00000071082 | RPL31 |
| NM_007209 | ENSG00000136942 | RPL35 |
| NM_015414 | ENSG00000130255 | RPL36 |
| NM_000998 | | RPL37A |
| NM_000999 | ENSG00000172809 | RPL38 |
| NM_021104 | ENSG00000229117 | RPL41 |
| NM_001003 | ENSG00000137818 | RPLP1 |
| NM_002950 | ENSG00000163902 | RPN1 |
| NR_002312 | ENSG00000277209 | RPPH1 |
| NM_015203 | ENSG00000163125 | RPRD2 |
| NM_005617 | ENSG00000164587 | RPS14 |
| NR_077246 | | RPS14P3 |
| NM_001019 | ENSG00000134419 | RPS15A |
| NM_001020 | ENSG00000105193 | RPS16 |
| NM_001022 | | RPS19 |
| NM_001023 | | RPS20 |
| NM_001025 | ENSG00000186468 | RPS23 |
| NM_001026 | ENSG00000138326 | RPS24 |
| NM_001032 | ENSG00000213741 | RPS29 |
| NM_001010 | ENSG00000137154 | RPS6 |
| NM_021135 | ENSG00000071242 | RPS6KA2 |
| NM_020761 | ENSG00000141564 | RPTOR |
| NM_015056 | ENSG00000160208 | RRP1B |
| NM_033112 | ENSG00000124541 | RRP36 |
| NM_007008 | ENSG00000115310 | RTN4 |
| NM_012234 | | RYBP |
| NM_002958 | ENSG00000163785 | RYK |
| NM_005979 | ENSG00000189171 | S100A13 |
| NM_014363 | ENSG00000151835 | SACS |
| NM_005500 | ENSG00000142230 | SAE1 |
| NM_174920 | ENSG00000167100 | SAMD14 |
| NM_015265 | ENSG00000119042 | SATB2 |
| NM_030962 | ENSG00000133812 | SBF2 |
| NM_014963 | ENSG00000064932 | SBNO2 |
| NM_004719 | ENSG00000139218 | SCAF11 |
| NM_020706 | ENSG00000156304 | SCAF4 |
| NM_173690 | ENSG00000173611 | SCAT |
| NM_005505 | ENSG00000073060 | SCARB1 |
| NR_004387 | ENSG00000239002 | SCARNA10 |
| NR_003012 | ENSG00000251898 | SCARNA11 |
| NR_003010 | ENSG00000238795 | SCARNA12 |
| NR_003002 | ENSG00000252481 | SCARNA13 |
| NR_004388 | ENSG00000252712 | SCARNA14 |
| NR_003023 | ENSG00000270066 | SCARNA2 |
| NR_003004 | ENSG00000249784 | SCARNA22 |
| NR_003007 | ENSG00000251869 | SCARNA23 |
| NR_132762 | | SCARNA26A |
| NR_132767 | | SCARNA26B |
| NR_003005 | ENSG00000280466 | SCARNA4 |
| NR_003008 | ENSG00000252010 | SCARNA5 |
| NR_003001 | ENSG00000238741 | SCARNA7 |
| NR_002569 | ENSG00000254911 | SCARNA9 |
| NM_016510 | ENSG00000132330 | SCLY |
| NM_014654 | | SDC3 |
| NM_033280 | ENSG00000166562 | SEC11C |
| NM_004892 | | SEC22B |
| NM_004206 | ENSG00000093183 | SEC22C |
| NM_003262 | ENSG00000008952 | SEC62 |
| NM_007214 | ENSG00000025796 | SEC63 |
| NM_031216 | ENSG00000085415 | SEH1L |
| NM_020858 | ENSG00000137872 | SEMA6D |
| NM_021627 | | SENP2 |
| NM_015640 | ENSG00000142864 | SERBP1 |
| NM_014509 | ENSG00000183569 | SERHL2 |
| NM_014445 | ENSG00000120742 | SERPI |
| NM_004568 | ENSG00000124570 | SERPINB6 |
| NM_003011 | ENSG00000119335 | SET |
| NM_012271 | ENSG00000181555 | SETD2 |
| NM_032233 | ENSG00000183576 | SETD3 |
| NM_018187 | ENSG00000168137 | SETD5 |
| NM_030648 | ENSG00000145391 | SETD7 |
| NM_015046 | ENSG00000107290 | SETX |
| NM_178860 | ENSG00000063015 | SEZ6 |
| NM_031287 | ENSG00000169976 | SF3B5 |
| NM_001018039 | ENSG00000198879 | SFMBT2 |
| NM_005066 | ENSG00000116560 | SFPQ |
| NM_144579 | ENSG00000144040 | SFXN5 |
| NM_015503 | ENSG00000178188 | SH2B1 |
| NM_020979 | ENSG00000160999 | SH2B2 |
| NM_001103160 | ENSG00000189410 | SH2D5 |
| NM_020145 | ENSG00000148341 | SH3GLB2 |
| NR_038940 | ENSG00000280693 | SH3PXD2A-AS1 |
| NM_020870 | ENSG00000154447 | SH3RF1 |
| NM_000193 | | SHH |
| NM_175908 | ENSG00000187902 | SHISA7 |
| NM_005866 | ENSG00000147955 | SIGMAR1 |
| NM_015073 | ENSG00000105738 | SIPA1L3 |
| NM_006427 | ENSG00000184990 | SIVA1 |
| NM_006930 | | SKP1 |
| NM_006527 | ENSG00000163950 | SLBP |
| NM_024628 | ENSG00000221955 | SLC12A8 |
| NR_103743 | ENSG00000226419 | SLC16A1-AS1 |
| NM_003054 | ENSG00000165646 | SLC18A2 |
| NM_005628 | ENSG00000105281 | SLC1A5 |
| NM_178526 | ENSG00000181035 | SLC25A42 |
| NM_030674 | ENSG00000111371 | SLC38A1 |
| NM_173514 | ENSG00000177058 | SLC38A9 |
| NM_173596 | ENSG00000139540 | SLC39A5 |
| NM_017836 | ENSG00000114544 | SLC41A3 |
| NM_033102 | ENSG00000158715 | SLC45A3 |
| NM_152672 | ENSG00000163959 | SLC51A |
| NM_016615 | ENSG00000010379 | SLC6A13 |
| NM_032290 | ENSG00000133302 | SLF1 |
| NM_014720 | ENSG00000065613 | SLK |
| NM_003070 | ENSG00000080503 | SMARCA2 |
| NM_003072 | ENSG00000127616 | SMARCA4 |
| NM_003075 | ENSG00000139613 | SMARCC2 |
| NM_014837 | ENSG00000116698 | SMG7 |
| NM_001136503 | | SMIM24 |
| NM_001124767 | | SMIM4 |
| NM_005871 | | SMNDC1 |
| NM_020197 | ENSG00000143499 | SMYD2 |
| NM_022743 | ENSG00000185420 | SMYD3 |
| NM_014390 | ENSG00000197157 | SND1 |
| NM_007241 | | SNF8 |
| NR_117096 | ENSG00000267322 | SNHG22 |
| NR_132782 | | SNORA100 |
| NR_002954 | ENSG00000212464 | SNORA12 |
| NR_002922 | ENSG00000238363 | SNORA13 |
| NR_002956 | ENSG00000207181 | SNORA14B |
| NR_002975 | ENSG00000276161 | SNORA17B |
| NR_002576 | ENSG00000199293 | SNORA21 |
| NR_002962 | ENSG00000201998 | SNORA23 |
| NR_002964 | ENSG00000272533 | SNORA28 |
| NR_002966 | ENSG00000206755 | SNORA30 |
| NR_002967 | ENSG00000199477 | SNORA31 |
| NR_002969 | ENSG00000206948 | SNORA36A |
| NR_002970 | ENSG00000207233 | SNORA37 |
| NR_002977 | ENSG00000212607 | SNORA3B |
| NR_002978 | ENSG00000207493 | SNORA46 |
| NR_003014 | ENSG00000238961 | SNORA47 |
| NR_002980 | ENSG00000206952 | SNORA50A |
| NR_003015 | ENSG00000212443 | SNORA53 |
| NR_002982 | ENSG00000207008 | SNORA54 |
| NR_002983 | ENSG00000201457 | SNORA55 |
| NR_002984 | ENSG00000206693 | SNORA56 |
| NR_004390 | ENSG00000206597 | SNORA57 |
| NR_002985 | | SNORA58 |
| NR_003025 | ENSG00000239149 | SNORA59A |
| NR_002919 | ENSG00000206838 | SNORA5A |
| NR_002325 | ENSG00000206760 | SNORA6 |
| NR_002326 | ENSG00000207405 | SNORA64 |
| NR_000012 | ENSG00000207166 | SNORA68 |
| NR_002910 | ENSG00000235408 | SNORA71B |
| NR_004404 | | SNORA73B |
| NR_002915 | ENSG00000200959 | SNORA74A |
| NR_002921 | ENSG00000206885 | SNORA75 |
| NR_002996 | ENSG00000200792 | SNORA80A |
| NR_028374 | ENSG00000206633 | SNORA80B |
| NR_132769 | | SNORA87 |
| NR_002952 | ENSG00000277184 | SNORA9 |
| NR_132772 | | SNORA90 |
| NR_132774 | | SNORA92 |
| NR_132778 | | SNORA98 |
| NR_003066 | | SNORD103C |
| NR_003079 | ENSG00000221066 | SNORD111 |
| NR_003030 | ENSG00000212304 | SNORD12 |
| NR_003685 | ENSG00000238886 | SNORD121A |
| NR_102369 | ENSG00000238793 | SNORD124 |
| NR_003693 | | SNORD126 |
| NR_132752 | | SNORD128 |
| NR_132972 | | SNORD129 |
| NR_132756 | | SNORD135 |
| NR_003045 | ENSG00000212232 | SNORD17 |
| NR_002441 | ENSG00000200623 | SNORD18A |
| NR_000008 | ENSG00000277194 | SNORD22 |
| NR_002602 | ENSG00000206775 | SNORD37 |
| NR_002751 | ENSG00000209702 | SNORD41 |
| NR_000013 | ENSG00000238423 | SNORD42B |
| NR_002439 | ENSG00000263764 | SNORD43 |
| NR_002741 | ENSG00000265145 | SNORD53 |
| NR_002738 | ENSG00000226572 | SNORD57 |
| NR_002736 | ENSG00000206630 | SNORD60 |
| NR_002913 | ENSG00000206989 | SNORD63 |
| NR_003054 | ENSG00000277512 | SNORD65 |
| NR_003055 | ENSG00000212158 | SNORD66 |
| NR_002450 | | SNORD68 |
| NR_003057 | ENSG00000212452 | SNORD69 |
| NR_000007 | ENSG00000208797 | SNORD73A |
| NR_002579 | | SNORD74 |
| NR_004398 | ENSG00000202400 | SNORD82 |
| NR_002598 | ENSG00000254341 | SNORD87 |
| NR_003073 | ENSG00000275084 | SNORD91B |
| NR_003074 | ENSG00000264994 | SNORD92 |
| NR_004378 | ENSG00000208772 | SNORD94 |
| NR_002592 | ENSG00000272296 | SNORD96A |
| NR_004379 | ENSG00000208883 | SNORD96B |
| NR_004403 | ENSG00000238622 | SNORD97 |
| NR_003076 | | SNORD98 |
| NR_003077 | ENSG00000221539 | SNORD99 |
| NM_014014 | ENSG00000144028 | SNRNP200 |
| NM_007020 | | SNRNP35 |
| NM_152551 | ENSG00000168566 | SNRNP48 |
| NM_003089 | ENSG00000104852 | SNRNP70 |
| NM_013322 | ENSG00000086300 | SNX10 |
| NM_020468 | ENSG00000135317 | SNX14 |
| NM_000454 | ENSG00000142168 | SOD1 |
| NM_080627 | ENSG00000149639 | SOGA1 |
| NM_006943 | ENSG00000177732 | SOX12 |
| NM_003111 | ENSG00000172845 | SP3 |
| NM_003116 | ENSG00000061656 | SPAG4 |
| NM_006461 | ENSG00000076382 | SPAG5 |
| NM_182513 | | SPC24 |
| NM_020675 | ENSG00000152253 | SPC25 |
| NM_012391 | ENSG00000124664 | SPDEF |
| NM_015001 | ENSG00000065526 | SPEN |
| NM_006542 | | SPHAR |
| NM_020126 | ENSG00000063176 | SPHK2 |
| NM_032566 | ENSG00000145879 | SPINK7 |
| NM_020148 | ENSG00000134278 | SPIRE1 |
| NM_139015 | ENSG00000157837 | SPPL3 |
| NM_181784 | ENSG00000198369 | SPRED2 |
| NM_025106 | ENSG00000171621 | SPSB1 |
| NM_003900 | ENSG00000161011 | SQSTM1 |
| NM_018079 | ENSG00000068784 | SRBD1 |
| NM_004599 | ENSG00000198911 | SREBF2 |
| NM_003131 | ENSG00000112658 | SRF |
| NM_003132 | ENSG00000116649 | SRM |
| NM_182691 | ENSG00000135250 | SRPK2 |
| NM_006924 | | SRSF1 |
| NM_003017 | | SRSF3 |
| NM_005626 | ENSG00000116350 | SRSF4 |
| NM_006275 | ENSG00000124193 | SRSF6 |
| NM_003144 | ENSG00000124783 | SSR1 |
| NM_003145 | ENSG00000163479 | SSR2 |
| NM_007107 | ENSG00000114850 | SSR3 |
| NM_014188 | ENSG00000160075 | SSU72 |
| NM_021978 | ENSG00000149418 | ST14 |
| NM_006100 | ENSG00000064225 | ST3GAL6 |
| NM_001037228 | | STARD7-AS1 |
| NM_007315 | ENSG00000115415 | STAT1 |
| NM_014393 | ENSG00000040341 | STAU2 |
| NM_004760 | ENSG00000164543 | STK17A |
| NM_003576 | ENSG00000102572 | STK24 |
| NM_030906 | ENSG00000130413 | STK33 |
| NM_005563 | ENSG00000117632 | STMN1 |
| NM_004099 | ENSG00000148175 | STOM |
| NM_153335 | ENSG00000266173 | STRADA |
| NM_018387 | ENSG00000165209 | STRBP |
| NM_003763 | ENSG00000124222 | STX16 |
| NM_005819 | ENSG00000135823 | STX6 |
| NM_022491 | ENSG00000111707 | SUDS3 |
| NM_014884 | ENSG00000064607 | SUGP2 |
| NM_015411 | ENSG00000129103 | SUMF2 |
| NM_025154 | ENSG00000164828 | SUN1 |
| NM_007192 | ENSG00000092201 | SUPT16H |
| NM_017503 | ENSG00000148291 | SURF2 |
| NM_006753 | | SURF6 |
| NM_153694 | ENSG00000139351 | SYCP3 |
| NM_004819 | ENSG00000125755 | SYMPK |
| NM_006372 | ENSG00000135316 | SYNCRIP |
| NM_015180 | ENSG00000054654 | SYNE2 |
| NM_032431 | ENSG00000162298 | SYVN1 |
| NM_004606 | ENSG00000147133 | TAF1 |
| NM_006284 | | TAF10 |
| NM_005643 | ENSG00000064995 | TAF11 |
| NM_005679 | ENSG00000103168 | TAF1C |
| NM_031923 | ENSG00000165632 | TAF3 |
| NM_005642 | ENSG00000178913 | TAF7 |
| NM_004783 | ENSG00000149930 | TAOK2 |
| NM_007375 | | TARDBP |
| NM_152295 | ENSG00000113407 | TARS |
| NM_025150 | ENSG00000143374 | TARS2 |
| NM_001097643 | | TAS2R30 |
| NM_020773 | ENSG00000132405 | TBC1D14 |
| NM_144628 | ENSG00000125875 | TBC1D20 |
| NM_014832 | ENSG00000136111 | TBC1D4 |
| NM_005993 | ENSG00000141556 | TBCD |
| NM_014726 | ENSG00000198933 | TBKBP1 |
| NM_005647 | ENSG00000101849 | TBL1X |
| NM_024665 | ENSG00000177565 | TBL1XR1 |
| NR_125749 | ENSG00000267280 | TBX2-AS1 |
| NM_005996 | ENSG00000135111 | TBX3 |
| NM_006706 | ENSG00000113649 | TCERG1 |
| NM_014972 | ENSG00000141002 | TCF25 |
| NM_003214 | ENSG00000007866 | TEAD3 |
| NR_001566 | ENSG00000270141 | TERC |
| NM_017746 | ENSG00000136891 | TEX10 |
| NM_018469 | ENSG00000136478 | TEX2 |
| NM_015926 | ENSG00000164081 | TEX264 |
| NR_033910 | | TFAP2A-AS1 |
| NM_178548 | ENSG00000116819 | TFAP2E |
| NM_014553 | ENSG00000115112 | TFCP2L1 |
| NM_003234 | ENSG00000072274 | TFRC |
| NM_003243 | ENSG00000069702 | TGFBR3 |
| NM_022065 | ENSG00000115970 | THADA |
| NM_138350 | ENSG00000041988 | THAP3 |
| NM_020449 | ENSG00000125676 | THOC2 |
| NM_024817 | ENSG00000187720 | THSD4 |
| NM_022037 | ENSG00000116001 | TIA1 |
| NM_003252 | | TIAL1 |
| NM_152259 | ENSG00000140534 | TICRR |
| NM_020375 | | TIGAR |
| NM_030953 | ENSG00000164296 | TIGD6 |
| NM_012458 | ENSG00000099800 | TIMM13 |
| NM_001001563 | ENSG00000105197 | TIMM50 |
| NM_153375 | ENSG00000223573 | TINCR |
| NM_004614 | ENSG00000166548 | TK2 |
| NM_001064 | ENSG00000163931 | TKT |
| NM_003260 | ENSG00000065717 | TLE2 |
| NM_012465 | ENSG00000095587 | TLL2 |
| NM_020123 | ENSG00000077147 | TM9SF3 |
| NM_003217 | ENSG00000139644 | TMBIM6 |
| NM_017905 | ENSG00000150403 | TMCO3 |
| NM_015348 | ENSG00000075568 | TMEM131 |
| NM_032928 | ENSG00000244187 | TMEM141 |
| NM_017814 | ENSG00000064545 | TMEM161A |
| NM_018475 | ENSG00000134851 | TMEM165 |
| NM_012264 | ENSG00000198792 | TMEM184B |
| NM_001003682 | ENSG00000253304 | TMEM200B |
| NM_016499 | ENSG00000187049 | TMEM216 |
| NM_001145529 | ENSG00000204278 | TMEM235 |
| NM_001114748 | | TMEM240 |
| NM_152261 | ENSG00000151135 | TMEM263 |
| NM_001256829 | ENSG00000080603 | TMEM265 |
| NM_018112 | ENSG00000095209 | TMEM38B |
| NM_014698 | ENSG00000196187 | TMEM63A |
| NM_016456 | ENSG00000116857 | TMEM9 |
| NM_014738 | ENSG00000177728 | TMEM94 |
| NM_020644 | ENSG00000175348 | TMEM9B |
| NR_027157 | ENSG00000257167 | TMPO-AS1 |
| NM_003840 | ENSG00000173530 | TNFRSF10D |
| NM_014452 | ENSG00000146072 | TNFRSF21 |
| NM_033396 | ENSG00000149115 | TNKS1BP1 |
| NM_025235 | ENSG00000107854 | TNKS2 |
| NM_001013722 | ENSG00000182095 | TNRC18 |
| NM_015319 | ENSG00000111077 | TNS2 |
| NM_016272 | ENSG00000183864 | TOB2 |
| NM_020243 | | TOMM22 |
| NM_001134493 | | TOMM6 |
| NM_003286 | ENSG00000198900 | TOP1 |
| NM_007027 | ENSG00000163781 | TOPBP1 |
| NM_022347 | ENSG00000169905 | TOR1AIP2 |
| NM_017723 | ENSG00000198113 | TOR4A |
| NM_000546 | ENSG00000141510 | TP53 |
| NM_017901 | ENSG00000186815 | TPCN1 |
| NM_005079 | ENSG00000076554 | TPD52 |
| NM_000365 | ENSG00000111669 | TPI1 |
| NM_000547 | ENSG00000115705 | TPO |
| NM_003292 | ENSG00000047410 | TPR |
| NM_004593 | | TRA2B |
| NM_003300 | ENSG00000131323 | TRAF3 |
| NR_034108 | ENSG00000231889 | TRAF3IP2-AS1 |
| NM_014965 | ENSG00000182606 | TRAK1 |
| NM_016292 | ENSG00000126602 | TRAP1 |
| NM_014408 | ENSG00000054116 | TRAPPC3 |
| NM_018415 | ENSG00000124496 | TRERF1 |
| NM_025195 | ENSG00000173334 | TRIB1 |
| NM_014818 | ENSG00000166436 | TRIM66 |
| NM_030912 | ENSG00000171206 | TRIM8 |
| NM_021820 | ENSG00000066651 | TRMT11 |
| NM_024950 | ENSG00000155275 | TRMT44 |
| NM_018006 | ENSG00000100416 | TRMU |
| NM_016000 | ENSG00000072756 | TRNT1 |
| NM_017636 | ENSG00000130529 | TRPM4 |
| NM_173485 | ENSG00000182463 | TSHZ2 |
| NR_028393 | ENSG00000270106 | TSNAX-DISC1 |
| NM_005724 | | TSPAN3 |
| NM_006675 | ENSG00000011105 | TSPAN9 |
| NR_002781 | ENSG00000235217 | TSPY26P |
| NM_003309 | | TSPYL1 |
| NM_022117 | ENSG00000184205 | TSPYL2 |
| NM_003310 | ENSG00000032389 | TSSC1 |
| NM_032037 | ENSG00000178093 | TSSK6 |
| NM_173500 | ENSG00000128881 | TTBK2 |
| NM_024525 | ENSG00000143643 | TTC13 |
| NM_001080441 | | TTC36 |
| NM_138376 | | TTC5 |
| NM_144596 | ENSG00000165533 | TTC8 |
| NM_015644 | | TTLL3 |
| NM_006082 | ENSG00000123416 | TUBA1B |
| NM_032704 | ENSG00000167553 | TUBA1C |
| NM_006088 | ENSG00000188229 | TUBB4B |
| NM_032525 | ENSG00000176014 | TUBB6 |
| NR_002323 | | TUG1 |
| NM_003322 | ENSG00000112041 | TULP1 |
| NM_020245 | ENSG00000130338 | TULP4 |
| NM_022830 | ENSG00000149016 | TUT1 |
| NM_175852 | ENSG00000084652 | TXLNA |
| NM_005499 | ENSG00000126261 | UBA2 |
| NM_016172 | ENSG00000130560 | UBAC1 |
| NM_177967 | ENSG00000134882 | UBAC2 |
| NM_018449 | ENSG00000137073 | UBAP2 |
| NM_021009 | ENSG00000150991 | UBC |
| NM_003343 | ENSG00000184787 | UBE2G2 |
| NM_005339 | ENSG00000078140 | UBE2K |
| NM_003969 | ENSG00000130725 | UBE2M |
| NM_021988 | ENSG00000244687 | UBE2V1 |
| NM_000462 | ENSG00000114062 | UBE3A |
| NM_198920 | ENSG00000118420 | UBE3D |
| NM_016936 | ENSG00000118900 | UBN1 |
| NM_172070 | ENSG00000144357 | UBR3 |
| NM_020765 | ENSG00000127481 | UBR4 |
| NM_015902 | ENSG00000104517 | UBR5 |
| NM_014233 | ENSG00000108312 | UBTF |
| NM_015562 | | UBXN7 |
| NM_031432 | ENSG00000130717 | UCK1 |
| NM_012474 | | UCK2 |
| NM_003355 | | UCP2 |
| NM_020120 | ENSG00000136731 | UGGT1 |
| NM_013282 | ENSG00000276043 | UHRF1 |
| NM_017979 | ENSG00000140553 | UNC45A |
| NM_001080419 | ENSG00000132478 | UNK |
| NM_006830 | ENSG00000127540 | UQCR11 |
| NM_003715 | ENSG00000138768 | USO1 |
| NM_005153 | ENSG00000103194 | USP10 |
| NR_046547 | | USP12-AS1 |
| NM_020718 | ENSG00000103404 | USP31 |
| NM_032582 | | USP32 |
| NM_014709 | ENSG00000115464 | USP34 |
| NM_025090 | ENSG00000055483 | USP36 |
| NR_038408 | | UST-AS1 |
| NM_006649 | ENSG00000156697 | UTP14A |
| NM_020368 | ENSG00000132467 | UTP3 |
| NM_003373 | ENSG00000035403 | VCL |
| NM_001001888 | ENSG00000205642 | VCX3B |
| NM_014667 | ENSG00000144560 | VGLL4 |
| NR_108060 | ENSG00000229124 | VIM-AS1 |
| NM_018445 | ENSG00000131871 | VIMP |
| NM_030938 | ENSG00000062716 | VMP1 |
| NM_173858 | | VN1R5 |
| NM_015378 | ENSG00000048707 | VPS13D |
| NM_022916 | | VPS33A |
| NM_015303 | ENSG00000156931 | VPS8 |
| NM_003384 | ENSG00000100749 | VRK1 |
| NR_026703 | ENSG00000199990 | VTRNA1-1 |
| NM_152718 | ENSG00000167992 | VWCE |
| NM_015045 | ENSG00000062650 | WAPL |
| NM_017883 | ENSG00000101940 | WDR13 |
| NM_144574 | ENSG00000140153 | WDR20 |
| NM_025160 | ENSG00000162923 | WDR26 |
| NM_182552 | ENSG00000184465 | WDR27 |
| NM_006784 | | WDR3 |
| NM_052844 | ENSG00000119333 | WDR34 |
| NM_018669 | ENSG00000160193 | WDR4 |
| NM_018268 | ENSG00000164253 | WDR41 |
| NM_019613 | ENSG00000141580 | WDR45B |
| NM_032118 | ENSG00000005448 | WDR54 |
| NM_007331 | ENSG00000109685 | WHSC1 |
| NM_017778 | ENSG00000147548 | WHSC1L1 |
| NM_015610 | ENSG00000157954 | WIPI2 |
| NM_004626 | ENSG00000085741 | WNT11 |
| NM_030753 | ENSG00000108379 | WNT3 |
| NR_126473 | ENSG00000251128 | WWC2-AS1 |
| NR_001564 | ENSG00000229807 | XIST |
| NM_003400 | ENSG00000082898 | XPO1 |
| NM_015171 | ENSG00000169180 | XPO6 |
| NM_001127438 | | XRCC6P5 |
| NM_003651 | ENSG00000060138 | YBX3 |
| NM_006555 | ENSG00000106636 | YKT6 |
| NM_014263 | ENSG00000136758 | YME1L1 |
| NM_006761 | ENSG00000108953 | YWHAE |
| NM_003406 | ENSG00000164924 | YWHAZ |
| NM_180990 | ENSG00000186919 | ZACN |
| NM_175907 | | ZADH2 |
| NM_001079 | ENSG00000115085 | ZAP70 |
| NM_003443 | ENSG00000116809 | ZBTB17 |
| NM_145166 | | ZBTB47 |
| NM_015898 | ENSG00000178951 | ZBTB7A |
| NM_024824 | ENSG00000100722 | ZC3H14 |
| NM_018471 | ENSG00000065548 | ZC3H15 |
| NM_021943 | ENSG00000156639 | ZFAND3 |
| NR_002438 | ENSG00000248492 | ZFAT-AS1 |
| NM_006885 | ENSG00000140836 | ZFHX3 |
| NM_004926 | ENSG00000185650 | ZFP36L1 |
| NM_133458 | ENSG00000184939 | ZFP90 |
| NR_125796 | | ZFPM2-AS1 |
| NM_003410 | ENSG00000005889 | ZFX |
| NM_015346 | ENSG00000072121 | ZFYVE26 |
| NM_144588 | ENSG00000155256 | ZFYVE27 |
| NM_003439 | ENSG00000106261 | ZKSCAN1 |
| NM_006956 | ENSG00000164631 | ZNF12 |
| NM_003434 | ENSG00000125846 | ZNF133 |
| NM_007152 | ENSG00000005801 | ZNF195 |
| NM_003455 | ENSG00000166261 | ZNF202 |
| NM_152287 | ENSG00000158805 | ZNF276 |
| NM_003575 | ENSG00000170265 | ZNF282 |
| NM_003421 | ENSG00000075407 | ZNF37A |
| NM_017757 | ENSG00000215421 | ZNF407 |
| NM_181489 | ENSG00000185219 | ZNF445 |
| NM_133464 | ENSG00000173258 | ZNF483 |
| NM_014930 | ENSG00000081386 | ZNF510 |
| NM_145806 | | ZNF511 |
| NM_152909 | ENSG00000188785 | ZNF548 |
| NM_024341 | ENSG00000130544 | ZNF557 |
| NM_152477 | ENSG00000196357 | ZNF565 |
| NM_152600 | | ZNF579 |
| NM_017652 | ENSG00000083828 | ZNF586 |
| NM_032828 | ENSG00000198466 | ZNF587 |
| NM_173539 | ENSG00000172748 | ZNF596 |
| NM_015042 | ENSG00000180357 | ZNF609 |
| NM_014497 | ENSG00000075292 | ZNF638 |
| NM_016620 | ENSG00000122482 | ZNF644 |
| NM_017865 | ENSG00000171163 | ZNF692 |
| NM_025069 | ENSG00000183779 | ZNF703 |
| NM_152557 | ENSG00000181220 | ZNF746 |
| NM_024702 | ENSG00000141579 | ZNF750 |
| NM_024910 | ENSG00000133624 | ZNF767P |
| NM_001137674 | ENSG00000197385 | ZNF860 |
| NM_080603 | ENSG00000168612 | ZSWIM1 |
| NM_020928 | ENSG00000130449 | ZSWIM6 |
| NM_001042697 | ENSG00000214941 | ZSWIM7 |
| NM_025112 | ENSG00000070476 | ZXDC |
| NM_015534 | ENSG00000036549 | ZZZ3 |

### REFERENCES

[0425] Aranda, S., Mas, G., and Di Croce, L. (2015). Regulation of gene transcription by Polycomb proteins. Sci Adv 1, e1500737.

[0426] Badis, G., Berger, M. F., Philippakis, A. A., Talukder, S., Gehrke, A. R., Jaeger, S. A., Chan, E. T., Metzler, G., Vedenko, A., Chen, X., et al. (2009). Diversity and complexity in DNA recognition by transcription factors. Science 324, 1720-1723.

[0427] Bag, J., and Bhattacharjee, R. B. (2010). Multiple levels of post-transcriptional control of expression of the poly (A)-binding protein. RNA Biol 7, 5-12.

[0428] Bailey, T. L., Boden, M., Buske, F. A., Frith, M., Grant, C. E., Clementi, L., Ren, J., Li, W. W., and Noble, W. S. (2009). MEME SUITE: tools for motif discovery and searching. Nucleic acids research 37, W202-208.

[0429] Beltran, M., Yates, C. M., Skalska, L., Dawson, M., Reis, F. P., Viiri, K., Fisher, C. L., Sibley, C. R., Foster, B. M., Bartke, T., et al. (2016). The interaction of PRC2 with RNA or chromatin is mutually antagonistic. Genome Res 26, 896-907.

[0430] Bernstein, E., Duncan, E. M., Masui, O., Gil, J., Heard, E., and Allis, C. D. (2006). Mouse polycomb proteins bind differentially to methylated histone H3 and RNA and are enriched in facultative heterochromatin. Molecular and cellular biology 26, 2560-2569.

[0431] Blackledge, N. P., Rose, N. R., and Klose, R. J. (2015). Targeting Polycomb systems to regulate gene expression: modifications to a complex story. Nat Rev Mol Cell Biol 16, 643-649.

[0432] Cheng, B., Ren, X., and Kerppola, T. K. (2014). KAP1 represses differentiation-inducible genes in embryonic stem cells through cooperative binding with PRC1 and derepresses pluripotency-associated genes. Mol Cell Biol 34, 2075-2091.

[0433] Feng, X., Grossman, R., and Stein, L. (2011). PeakRanger: a cloud-enabled peak caller for ChIP-seq data. BMC bioinformatics 12, 139.

[0434] Frith, M. C., Fu, Y., Yu, L., Chen, J. F., Hansen, U., and Weng, Z. (2004). Detection of functional DNA motifs via statistical over-representation. Nucleic acids research 32, 1372-1381.

[0435] Giresi, P. G., Kim, J., McDaniell, R. M., Iyer, V. R., and Lieb, J. D. (2007). FAIRE (Formaldehyde-Assisted Isolation of Regulatory Elements) isolates active regulatory elements from human chromatin. Genome Res 17, 877-885.

[0436] Glisovic, T., Bachorik, J. L., Yong, J., and Dreyfuss, G. (2008). RNA-binding proteins and post-transcriptional gene regulation. FEBS Lett 582, 1977-1986.

[0437] Grau, D. J., Chapman, B. A., Garlick, J. D., Borowsky, M., Francis, N. J., and Kingston, R. E. (2011). Compaction of chromatin by diverse Polycomb group proteins requires localized regions of high charge. Genes & development 25, 2210-2221.

[0438] Hendrickson, D., Kelley, D. R., Tenen, D., Bernstein, B., and Rinn, J. L. (2016). Widespread RNA binding by chromatin-associated proteins. Genome Biol 17, 28.

[0439] Incarnato, D., Neri, F., Anselmi, F., and Oliviero, S. (2014). Genome-wide profiling of mouse RNA secondary structures reveals key features of the mammalian transcriptome. Genome Biol 15, 491.

[0440] Jeon, Y., and Lee, J. T. (2011). YY1 tethers Xist RNA to the inactive X nucleation center. Cell 146, 119-133.

[0441] Ji, X., Li, W., Song, J., Wei, L., and Liu, X. S. (2006). CEAS: cis-regulatory element annotation system. Nucleic acids research 34, W551-554.

[0442] Kaneko, S., Bonasio, R., Saldana-Meyer, R., Yoshida, T., Son, J., Nishino, K., Umezawa, A., and Reinberg, D. (2014a). Interactions between JARID2 and noncoding RNAs regulate PRC2 recruitment to chromatin. Molecular cell 53, 290-300.

[0443] Kaneko, S., Son, J., Bonasio, R., Shen, S. S., and Reinberg, D. (2014b). Nascent RNA interaction keeps PRC2 activity poised and in check. Genes & development 28, 1983-1988.

[0444] Kaneko, S., Son, J., Shen, S. S., Reinberg, D., and Bonasio, R. (2013). PRC2 binds active promoters and contacts nascent RNAs in embryonic stem cells. Nature structural & molecular biology.

[0445] Kent, W. J., Sugnet, C. W., Furey, T. S., Roskin, K. M., Pringle, T. H., Zahler, A. M., and Haussler, D. (2002). The human genome browser at UCSC. Genome Res 12, 996-1006.

[0446] Khalil, A. M., Guttman, M., Huarte, M., Garber, M., Raj, A., Rivea Morales, D., Thomas, K., Presser, A., Bernstein, B. E., van Oudenaarden, A., et al. (2009). Many human large intergenic noncoding RNAs associate with chromatin-modifying complexes and affect gene expression. Proceedings of the National Academy of Sciences of the United States of America 106, 11667-11672.

[0447] Kim, J., Cantor, A. B., Orkin, S. H., and Wang, J. (2009). Use of in vivo biotinylation to study protein-protein and protein-DNA interactions in mouse embryonic stem cells. Nat Protoc 4, 506-517.

[0448] Kung, J. T., Kesner, B., An, J. Y., Ahn, J. Y., Cifuentes-Rojas, C., Colognori, D., Jeon, Y., Szanto, A., del Rosario, B. C., Pinter, S. F., et al. (2015). Locus-specific targeting to the X chromosome revealed by the RNA interactome of CTCF. Molecular cell 57, 361-375.

[0449] Lee, J. T., and Lu, N. (1999). Targeted mutagenesis of Tsix leads to nonrandom X inactivation. Cell 99, 47-57.

[0450] Li, H., Handsaker, B., Wysoker, A., Fennell, T., Ruan, J., Homer, N., Marth, G., Abecasis, G., Durbin, R., and Genome Project Data Processing, S. (2009). The Sequence Alignment/Map format and SAMtools. Bioinformatics 25, 2078-2079.

[0451] Ma, W., Noble, W. S., and Bailey, T. L. (2014). Motif-based analysis of large nucleotide data sets using MEME-ChIP. Nat Protoc 9, 1428-1450.

[0452] Magistri, M., Faghihi, M. A., St Laurent, G., 3rd, and Wahlestedt, C. (2012). Regulation of chromatin structure by long noncoding RNAs: focus on natural antisense transcripts. Trends in genetics : TIG 28, 389-396.

[0453] Mahony, S., and Benos, P. V. (2007). STAMP: a web tool for exploring DNA-binding motif similarities. Nucleic acids research 35, W253-258.

[0454] Marchese, D., de Groot, N. S., Lorenzo Gotor, N., Livi, C. M., and Tartaglia, G. G. (2016). Advances in the characterization of RNA-binding proteins. Wiley interdisciplinary reviews. RNA 7, 793-810.

[0455] Morey, L., Pascual, G., Cozzuto, L., Roma, G., Wutz, A., Benitah, S. A., and Di Croce, L. (2012). Nonoverlapping functions of the Polycomb group Cbx family of proteins in embryonic stem cells. Cell stem cell 10, 47-62.

[0456] Nicol, J. W., Helt, G. A., Blanchard, S. G., Jr., Raja, A., and Loraine, A. E. (2009). The Integrated Genome Browser: free software for distribution and exploration of genome-scale datasets. Bioinformatics 25, 2730-2731.

[0457] O'Loghlen, A., Munoz-Cabello, A. M., Gaspar-Maia, A., Wu, H. A., Banito, A., Kunowska, N., Racek, T., Pemberton, H. N., Beolchi, P., Lavial, F., et al. (2012). MicroRNA regulation of Cbx7 mediates a switch of Polycomb orthologs during ESC differentiation. Cell stem cell 10, 33-46.

[0458] Pinter, S. F., Sadreyev, R. I., Yildirim, E., Jeon, Y., Ohsumi, T. K., Borowsky, M., and Lee, J. T. (2012). Spreading of X chromosome inactivation via a hierarchy of defined Polycomb stations. Genome Res 22, 1864-1876.

[0459] Quinlan, A. R., and Hall, I. M. (2010). BEDTools: a flexible suite of utilities for comparing genomic features. Bioinformatics 26, 841-842.

[0460] Ramirez, F., Dundar, F., Diehl, S., Gruning, B. A., and Manke, T. (2014). deepTools: a flexible platform for exploring deep-sequencing data. Nucleic acids research 42, W187-191.

[0461] Ray, D., Kazan, H., Cook, K. B., Weirauch, M. T., Najafabadi, H. S., Li, X., Gueroussov, S., Albu, M., Zheng, H., Yang, A., et al. (2013). A compendium of RNA-binding motifs for decoding gene regulation. Nature 499, 172-177.

[0462] Ray, M. K., Wiskow, O., King, M.J., Ismail, N., Ergun, A., Wang, Y., Plys, A. J., Davis, C. P., Kathrein, K., Sadreyev, R., et al. (2016). CAT7 and cat71 long non-coding RNAs Tune Polycomb Repressive Complex 1 Function During Human and Zebrafish Development. J Biol Chem.

[0463] Rouskin, S., Zubradt, M., Washietl, S., Kellis, M., and Weissman, J. S. (2014). Genome-wide probing of RNA structure reveals active unfolding of mRNA structures in vivo. Nature 505, 701-705.

[0464] Rozowsky, J., Euskirchen, G., Auerbach, R. K., Zhang, Z. D., Gibson, T., Bjornson, R., Carriero, N., Snyder, M., and Gerstein, M. B. (2009). PeakSeq enables systematic scoring of ChIP-seq experiments relative to controls. Nat Biotechnol 27, 66-75.

[0465] Sandelin, A., Alkema, W., Engstrom, P., Wasserman, W. W., and Lenhard, B. (2004). JASPAR: an open-access database for eukaryotic transcription factor binding profiles. Nucleic acids research 32, D91-94.

[0466] Sarma, K., Levasseur, P., Aristarkhov, A., and Lee, J. T. (2010). Locked nucleic acids (LNAs) reveal sequence requirements and kinetics of Xist RNA localization to the X chromosome. Proc Natl Acad Sci USA 107, 22196-22201.

[0467] Shin, H., Liu, T., Manrai, A. K., and Liu, X. S. (2009). CEAS: cis-regulatory element annotation system. Bioinformatics 25, 2605-2606.

[0468] Sigova, A. A., Abraham, B. J., Ji, X., Molinie, B., Hannett, N. M., Guo, Y. E., Jangi, M., Giallourakis, C. C., Sharp, P. A., and Young, R. A. (2015). Transcription factor trapping by RNA in gene regulatory elements. Science 350, 978-981.

[0469] Simon, J. A., and Kingston, R. E. (2013). Occupying chromatin: Polycomb mechanisms for getting to genomic targets, stopping transcriptional traffic, and staying put. Molecular cell 49, 808-824.

[0470] Simon, J. M., Giresi, P. G., Davis, I. J., and Lieb, J. D. (2012). Using formaldehyde-assisted isolation of regulatory elements (FAIRE) to isolate active regulatory DNA. Nat Protoc 7, 256-267.

[0471] Spassov, D. S., and Jurecic, R. (2003). The PUF family of RNA-binding proteins: does evolutionarily conserved structure equal conserved function? IUBMB Life 55, 359-366.

[0472] Spitale, R. C., Flynn, R. A., Zhang, Q. C., Crisalli, P., Lee, B., Jung, J. W., Kuchelmeister, H. Y., Batista, P. J., Torre, E. A., Kool, E. T., et al. (2015). Structural imprints in vivo decode RNA regulatory mechanisms. Nature 519, 486-490.

[0473] Taliaferro, J. M., Lambert, N. J., Sudmant, P. H., Dominguez, D., Merkin, J. J., Alexis, M. S., Bazile, C., and Burge, C. B. (2016). RNA Sequence Context Effects Measured In Vitro Predict In Vivo Protein Binding and Regulation. Molecular cell 64, 294-306.

[0474] Tamura, K., Stecher, G., Peterson, D., Filipski, A., and Kumar, S. (2013). MEGA6: Molecular Evolutionary Genetics Analysis version 6.0. Mol Biol Evol 30, 2725-2729.

[0475] Tavares, L., Dimitrova, E., Oxley, D., Webster, J., Poot, R., Demmers, J., Berstarosti, K., Taylor, S., Ura, H., Koide, H., et al. (2012). RYBP-PRC1 complexes mediate H2A ubiquitylation at polycomb target sites independently of PRC2 and H3K27 me3. Cell 148, 664-678.

[0476] Trapnell, C., Roberts, A., Goff, L., Pertea, G., Kim, D., Kelley, D. R., Pimentel, H., Salzberg, S. L., Rinn, J. L., and Pachter, L. (2012). Differential gene and transcript expression analysis of RNA-seq experiments with TopHat and Cufflinks. Nat Protoc 7, 562-578.

[0477] Van Nostrand, E. L., Pratt, G. A., Shishkin, A. A., Gelboin-Burkhart, C., Fang, M. Y., Sundararaman, B., Blue, S. M., Nguyen, T. B., Surka, C., Elkins, K., et al. (2016). Robust transcriptome-wide discovery of RNA-binding protein binding sites with enhanced CLIP (eCLIP). Nat Methods 13, 508-514.

[0478] Vierstra, J., Rynes, E., Sandstrom, R., Zhang, M., Canfield, T., Hansen, R. S., Stehling-Sun, S., Sabo, P. J., Byron, R., Humbert, R., et al. (2014). Mouse regulatory DNA landscapes reveal global principles of cis-regulatory evolution. Science 346, 1007-1012.

[0479] Wang, J., and Bell, L. R. (1994). The Sex-lethal amino terminus mediates cooperative interactions in RNA binding and is essential for splicing regulation. Genes & development 8, 2072-2085.

[0480] Wang, X., Goodrich, K. J., Gooding, A. R., Naeem, H., Archer, S., Paucek, R. D., Youmans, D. T., Cech, T. R., and Davidovich, C. (2017). Targeting of Polycomb Repressive Complex 2 to RNA by Short Repeats of Consecutive Guanines. Molecular cell 65, 1056-1067 e1055.

[0481] Warzecha, C. C., Sato, T. K., Nabet, B., Hogenesch, J. B., and Carstens, R. P. (2009). ESRP1 and ESRP2 are epithelial cell-type-specific regulators of FGFR2 splicing. Molecular cell 33, 591-601.

[0482] Wei, G. H., Badis, G., Berger, M. F., Kivioja, T., Palin, K., Enge, M., Bonke, M., Jolma, A., Varjosalo, M., Gehrke, A. R., et al. (2010). Genome-wide analysis of ETS-family DNA-binding in vitro and in vivo. EMBO J 29, 2147-2160.

[0483] Woo, C. J., Maier, V. K., Davey, R., Brennan, J., Li, G., Brothers, J., 2nd, Schwartz, B., Gordo, S., Kasper, A., Okamoto, T. R., et al. (2017). Gene activation of SMN by selective disruption of lncRNA-mediated recruitment of PRC2 for the treatment of spinal muscular atrophy. Proc Natl Acad Sci USA 114, E1509-E1518.

[0484] Xie, Z., Hu, S., Blackshaw, S., Zhu, H., and Qian, J. (2010). hPDI: a database of experimental human protein-DNA interactions. Bioinformatics 26, 287-289.

[0485] Yap, K. L., Li, S., Munoz-Cabello, A. M., Raguz, S., Zeng, L., Mujtaba, S., Gil, J., Walsh, M. J., and Zhou, M. M. (2010). Molecular interplay of the noncoding RNA ANRIL and methylated histone H3 lysine 27 by polycomb CBX7 in transcriptional silencing of INK4a. Molecular cell 38, 662-674.

[0486] Zhang, Y., Liu, T., Meyer, C. A., Eeckhoute, J., Johnson, D. S., Bernstein, B. E., Nusbaum, C., Myers, R. M., Brown, M., Li, W., et al. (2008). Model-based analysis of ChIP-Seq (MACS). Genome Biol 9, R137.

[0487] Zhao, J., Ohsumi, T. K., Kung, J. T., Ogawa, Y., Grau, D. J., Sarma, K., Song, J. J., Kingston, R. E., Borowsky, M., and Lee, J. T. (2010). Genome-wide identification of polycomb-associated RNAs by RIP-seq. Molecular cell 40, 939-953.

[0488] Zhen, C. Y., Tatavosian, R., Huynh, T. N., Duc, H. N., Das, R., Kokotovic, M., Grimm, J. B., Lavis, L. D., Lee, J., Mejia, F. J., et al. (2016). Live-cell single-molecule tracking reveals co-recognition of H3K27 me3 and DNA targets polycomb Cbx7-PRC1 to chromatin. Elife 5.

[0489] Zovoilis, A., Cifuentes-Rojas, C., Chu, H. P., Hernandez, A. J., and Lee, J. T. (2016). Destabilization of B2 RNA by EZH2 Activates the Stress Response. Cell 167, 1788-1802 e1713.
[0490] Chen, B., Yun, J., Kim, M. S., Mendell, J. T., and Xie, Y. (2014). PIPE-CLIP: a comprehensive online tool for CLIP-seq data analysis. Genome biology 15, R18.
[0491] Ray, M. K., Wiskow, O., King, M. J., Ismail, N., Ergun, A., Wang, Y., Plys, A. J., Davis, C. P., Kathrein, K., Sadreyev, R., et al. (2016). CAT7 and cat71 long non-coding RNAs Tune Polycomb Repressive Complex 1 Function During Human and Zebrafish Development. The Journal of biological chemistry.
[0492] Spitale, R. C., Flynn, R. A., Zhang, Q. C., Crisalli, P., Lee, B., Jung, J. W., Kuchelmeister, H. Y., Batista, P. J., Torre, E. A., Kool, E. T., et al. (2015). Structural imprints in vivo decode RNA regulatory mechanisms. Nature 519, 486-490.

### Other Embodiments

[0493] It is to be understood that while the invention has been described in conjunction with the detailed description thereof, the foregoing description is intended to illustrate and not limit the scope of the invention, which is defined by the scope of the appended claims. Other aspects, advantages, and modifications are within the scope of the following claims.

What is claimed is:

1. A process of preparing an inhibitory nucleic acid that specifically binds, or is complementary to, a region of an RNA comprising a motif as shown in TABLE 1, wherein the RNA is known to bind to Polycomb repressive complex 1 (PRC1), selected from the group consisting of SEQ ID NOs:1 to 5893 (human), 5894 to 17415 (human), and 17416 to 36368 (mouse), the process comprising the step of designing and/or synthesizing an inhibitory nucleic acid of between 5 and 40 bases in length, that specifically binds to a region of the RNA that binds PRC1.

2. The process of claim 1, wherein the sequence of the designed and/or synthesized inhibitory nucleic acid is a nucleic acid sequence that is complementary to said region comprising a motif as described herein sequence that binds to PRC1, or is complementary to a portion thereof, said portion having a length of from 5 to 40 contiguous base pairs.

3. The process of claim 1, wherein the inhibitory nucleic acid modulates expression of a gene and the region of the RNA comprising the motif as described herein can be in 3′UTR, 5′UTR, coding region, or introns of a coding gene.

4. An inhibitory nucleic acid of about 10 to 50 bases in length that specifically binds, or is complementary to, a fragment of at least seven consecutive bases comprising a motif as shown in TABLE 1 within any of SEQ ID NOs:1 to 5893 (human) or 5894 to 17415 (human) or 17416 to 36368 (mouse), wherein the inhibitory nucleic acid comprises one or more modifications and modulates expression of a gene targeted by the RNA.

5. A composition comprising the inhibitory nucleic acid of claim 4.

6. The composition of claim 5, which is for parenteral administration.

7. The composition of claim 5, wherein the RNA sequence is in the 3′UTR of a gene, and the inhibitory nucleic acid is capable of upregulating expression of a gene targeted by the RNA.

8. A method of modulating gene expression in a cell or a mammal comprising administering to the cell or the mammal the composition of claim 5.

9. The inhibitory nucleic acid of claim 4, wherein the inhibitory nucleic acid comprises one or more modifications comprising: a modified sugar moiety, a modified internucleoside linkage, a modified nucleotide and/or combinations thereof.

10. The inhibitory nucleic acid of claim 4, wherein the inhibitory nucleic acid is an antisense oligonucleotide, LNA molecule, PNA molecule, ribozyme or siRNA.

11. The inhibitory nucleic acid of claim 4, wherein the inhibitory nucleic acid is double stranded and comprises an overhang at one or both termini.

12. The inhibitory nucleic acid of claim 4, wherein the inhibitory nucleic acid is a single- or double-stranded RNA interference (RNAi) compound.

13. The inhibitory nucleic acid of claim 4, wherein the RNAi compound is selected from the group consisting of short interfering RNA (siRNA); or a short, hairpin RNA (shRNA); small RNA-induced gene activation (RNAa); and small activating RNAs (saRNAs).

14. The inhibitory nucleic acid of claim 9, wherein the modified internucleoside linkage comprises at least one of: alkylphosphonate, phosphorothioate, phosphorodithioate, alkylphosphonothioate, phosphoramidate, carbamate, carbonate, phosphate triester, acetamidate, carboxymethyl ester, or combinations thereof.

15. The inhibitory nucleic acid of claim 9, wherein the modified sugar moiety comprises a 2′-O-methoxyethyl modified sugar moiety, a 2′-methoxy modified sugar moiety, a 2′-O-alkyl modified sugar moiety, or a bicyclic sugar moiety.

16. The inhibitory nucleic acid of claim 9, comprising: 2′-OMe, 2′-F, LNA, PNA, FANA, ENA or morpholino modifications.

17. A method for treating a subject with MECP2 Duplication Syndrome, the method comprising administering a therapeutically effective amount of an inhibitory nucleic acid targeting a PRC1-binding region comprising a motif as shown in TABLE 1 in Mecp2 RNA, preferably wherein the PRC1 binding region comprises SEQ ID NO:5876 or 5877.

18. The method of claim 17, comprising administering an inhibitory nucleic acid targeting a sequence comprising a motif as shown in TABLE 1 within the 3′UTR of Mecp2.

19. A method for treating a subject with systemic lupus erythematosis, the method comprising administering a therapeutically effective amount of an inhibitory nucleic acid targeting a PRC1-binding region comprising a motif as shown in TABLE 1 in IRAK1 RNA, preferably wherein the PRC1 binding region comprises SEQ ID NO:5874 or 5875.

20. The method of claim 19, comprising administering an inhibitory nucleic acid targeting a sequence comprising a motif as described herein within the 3′UTR of IRAK1.

21. The method of any claim 17, wherein the inhibitory nucleic acid comprises at least one locked nucleotide (LNA).

22. The method of any claim 19, wherein the inhibitory nucleic acid comprises at least one locked nucleotide (LNA).

The application's sequence listing, which the Patent Office published only in electronic form, follows.

SEQUENCE LISTING (36462 sequences)

SEQ ID NO: 1 - DNA, 1171 bp, Homo sapiens
actccgccaccagggggcgccacagctcctcgcgccgccgcctcccgcaaacacaaagagccgcgcggccacgacggccgcgtgcccggagcgccggggtctttcctgggctccaaagtcaagagctcacgttccgggaggatctgtccgcggaaattcggttctgagcgtcgccggactccgccgcggggaggcgggtgaggggagggggccggagggtcgggggtgccggggggtgcgggaaggctgcgggggaggctgttggggacgttcgtggcgggggaggctgttggggacgttcgtggcgggggaggctgttggggacgttcgtggcgggggaggctgttgggtcccctccccgccccaccgcgtcccagggaaccccggcagggcacccagtgaggggggcccgggcgtccgcccattcctcactgctgtccccgcctgtgcccgaaacccccgttcacgttcaccgagaaaacagacataaacccagccaggcacatccactagaatggctgtgatttcagaaaagcggacgtaagtgctgccgaggagatggaggcgttggaccccctcgcgcattgtcggggcgggtgcagccgcggtgcaaaaggaccttcctcagaaagttgagcacgaagttcccacaggcccggaagttcccctcccgggcgctccccagagagctgaagactgggcgcgtgccggcggcaaatgttcacagcaaagggcggcccagtgcgcagctggaacatcagccccaggcggtcgctgcgacagggacgagcctgggaaacgtgaaaatgtccagaacagggaatccacagataaagaaaagacatcgtggttgccagagctcgcgggagggggcaacagggaccgactgcttaacgtgtatggttccccttcagggtgaggacgtgttctgggacgaggtcgaggtcagggttgcaggacaagatgaaagcgctaaatgccactgaattgtttgctttaacgtcattaattttgttatgtgaatttcatctcaatagaataaataggtcaagctggctgcagggcccaccccaccgcggcctggagcagggtcttctggggtgtaccacctctgccctcacccaggctccaccacgaccagcttcgtccaccccccaggagaccatgaagg

SEQ ID NO: 2 - DNA, 1099 bp, Homo sapiens
ccactgtgctccccagagggcagggtgagtgcgtggcatccttttggcgggcgtgggtgcctctgtggacctggcgtgaggcttctctgtttctgagtctcctatggaccatctgtcttctgtgtggctgctgaggaatcacactggggtggccgtgccggtggctgaatgagaacaggacccccatgctgcacagccctgcttaacgcgggggtggccccagaagcgggtgggcgaggctgggcagcagggattggctgaaatcatatgcagagcccaagaggcaggggaaaggcggcaatttcagggtccctttgttcgccaggtacctggggcccagcccgggcggcaggagggactcagcccctcgcccaggcaggaagggtcccaagcagaggcccctccctcaggcactccccagcccacacctgcagcactgggaccaagactaataaaacaccagcctcacggaagacagctttatcttgttgatcggaagtctgccagcccaatttatgatggaacataagatctctaaatctgaatttacgctctgtagcgtaacgagaggtcaataagattaaacgggggctcaggagaggaccagcgtcaggctcactgcgaggtgctgcacagaaaacccacagccagagcccctgggcccagcccaggcaagaccagaaaaggagggggcaggtgggagaccagcctggggctcccgggaagcccacgggatggaggcgggagagccaggaggcctggggcaaccctgggacggttcctggatcgaggagagcaggggggtgatgagggttccctcagggctggggagccttctcctggtctcagacccaccccccttcagctcccaagccctgggtgcccctggctctgaggacagttgggaatcttccctgaggcaggttcaaggacagagctctgaccctggcccagggctgctttgggtgcctatgaactcggcttctggctcagagcagttccctgcaccccttcctgagccctctgtcctctggaacccgtgggcagggtgagggacgggtgttccttctgggtgggggcctgggcgcccagccagcac

SEQ ID NO: 3 - DNA, 1196 bp, Homo sapiens
caaagtacgggtgggattggcaggcagatacacggagggaacgtgcgcatttgagtgcacgtccaccagcaccagccccaggccacaggcagatcccaggagacacgcaggggccctaagaagggagctgggaatgaggggccacacaagcccgggacggaggcctgtcgcacatggggtggccccgactcaggccctggagttggccaggaccctctagcatcctcaagggctgggccaaccaggctggcgtggggtggggcaggggagggctgagccagtgggcgtcgtctgtagggggatgcccaactgcggccccgtctctcggctctcctctgggtctctggccagctgtggctcctgctggccccaggcgcatcccagaggcaggtagagggaggatggctgctctgagggcacctctgccgtgcttggggctcggcctggggtgcgagaccagggcagacccccgggagatggaacggcccggtccagccccaccttcctctcctcctgccccaccttcctctcctcctgccccaccttcctctcctcctgccccaccagaaccgggggcggctggcagacaagaggacagtcgccctgcctgccgcccggaacctgaagaaggagcgaactcccagcttctctgccagcgatggtgacagcgacgggagtggccccacctgtgggcggcggccaggcttgaagcaggaggatggtccgcacatccgtatcatgaagagaaggtacttggaccagggccggacaggaaggcgcaaggctcagatggggctggagcttcaggccttcagctgctcagatgagagtgtccacaccggcctcccacaccttccctcagatgctggtctttttggggtcctgtgtgggtcgcaggcaggagctgtttcctcatctgccccctgtctggcgtcccctcccacctctgctctgcggcgctcactggcagaggcaggttggcagcagttgggacccagaggtctgcaccttcctgggccgacgctccagctacccttgctgaccgggtcccagtctggccagagagcagctctagcaacagggagctccattcaggctcgtgactggctgtgcagaagcagcctcggcccccacctgcggtacaacaggagggctcctctgagtgcacggcaacaagcaagagggagaaggggcct

SEQ ID NO: 4 - DNA, 1178 bp, Homo sapiens
ggagggcgaggaggacagcagcaactcggagggtgaatggtcttggggtgagagggtgtggccctgtgagcccatctggcgggagggcagagccacgtgggcggggggcgtggggctctgggccaggcttttccctccctgggaaggccaggccaaatgctctgttctctggcagccagcaacagggataaattaattagtgccgtgattaattagtgatgagtaacctctaaggctggcttcttcctgataaagcaaaatttatgtagcctccatctctccccgcagatggagacccagacgcagaggcggggctggcccctggggagctgcagcagctggcccaggggccggaggacgagctggaggatctgcagctctcagaggacgactgaggcagcccatctggggggcctgtaggggctgccgggctggtggccagtgtttccacctccctggcagtcaggcctagaggctggcgtctgtgcagttgggggaggcagtagacacgggacaggctttattatttatttttcagcatgaaagaccaaacgtatcgagagctgggctgggctgggctggtgtggctgctgaagccccacagctgtgggctgctgaagtcagctccgcgggggagctgaccctgacgtcagcagaccgagaccagtcccagttccagggggaggcctgcaggcccctggccccttccaccacctctgccctccgtctgcagacctcgtccatctgcaccaggctctgccttcactcccccaagtctttgaaaatttgttcctttcctttgaagtcacattttcttttaaaattttttgttttgcatccgaaaccgaaagaaataaagcggtgggaggcagggccattgtgttgagtggtggctcctggagatttgtgtggccccacccctacccccggcaacctcaacacagaggctgggaagggtcgggggcccctggaagtagagccaaggtcccattctcctgcttgggtgaagtttgaccggcaagggcgtggccccctccatagggggacgtggccgtcgtgggggacaagggctgctctcctgtgccgagttctcgctccggggcccgcagggttggtggctgcagtggcagagccacggggaagctggccacgtagaaaactcggcccaggcgcctggc

SEQ ID NO: 5 - DNA, 1137 bp, Homo sapiens
cacgcgaacgcgccctcccgccctgaggccgccggcgttgcggtcggagaaccatagagccactcggctgggcgtggcgcggcggggcggggaaaggggcggggcctgggcggcggaagtgcgcagccgcgcggcattctggggccggaagtggggtgcacgcttcgggttggtgtcatggcagctgcggggagccgcaagaggtaagccgcgggtccgagggccgatttggcctcccggtgggtgtctgtatccaagggggcttttcttgctcctctcagcggggctggggcgagctgggcgtgcgggcagctgtgactcctgcgtgacccgcaggcgcctggcggagctgacggtggacgagttcctagcttcgggctttgactccgagtccgaatccgagtccgaaaattctccacaagcggagacacgggaagcacgcgaggctgcccggagtccggataagccgggcgggagcccctcggccaggttagtggggacatgcgtgagcagaacctcttgctcgtcctgtcccaccccggttgggttgctgacctcgcctggggtctcagggccaaggcctaaggatcgccgacctctgccccccagtcctttcagcttaacttactctttcatccgatgtttactgagctcctgttccgtgccaaactctgtcctaggcagggagcgtatgttggtgagttgtgcaaaaatctcttcccgatctaggagaactctcacgttcttgggtgaaatcaccgcctgcagttcggtagaagagagataagtgctggggagggaaaggaaggacagaggggctgaagagagagttgcaggggagccgagttgctctgttagaaggagcggaggctgtgctcggtggctcacgcctgtaatgccagcactttgggaggccgaggcgggcagattacctgaggtcaggaattcgagaccagcctgaccaacacggaaaaatcatgtctctactaaaaatataaaaattagccgggcgtggtgggcacctgtaatcccaactactcgggaggctgaggcaggagaatcgcttgaacttgggaggcggaggttgcagtgagccgagatggcaccattgcattccagcctgggtgagagagtgag

SEQ ID NO: 6 - DNA, 1176 bp, Homo sapiens
agaaggcggacatcctggagatgaccgtgagacacctgcggagcctgcgtcgcgtgcaggtgacgggtgaggcgcgggcggcggcggcttggaggcggggggagggcgcgggacccccgggacccggcaccgacctctcctcctgtgtcgctcccgcagccgcgctcagcgccgaccccgccgttctgggcaagtaccgcgccggcttccacgagtgtctggcggaggtgaaccgcttcctggccggctgcgagggcgtcccggccgacgtgcgctcccgcctgctgggccacctggcagcctgcctgcgccagctgggaccctcccgccgcccggcctcgctgtccccggctgcccccgcagaggccccagcgcccgaggtctacgcgggccgcccgctgctgccatcgctcggcggccccttccctctgctcgcgccgccgctgctgccgggtctgacccgggcgctgcccgccgcccccagggcggggccgcagggcccgggtgggccctggaggccgtggctgcgctgaggctgtggccctgagactgcatcggaggcggcgccccgttctagggccgtggcctttgccgagactgtagcagagaaaacgtatttattattccagagtctgcgtcacgagttttctttctttgtcttggtgaagagttgactttgggagcgccccgcagccacgccgcgccggggtcccgccctcctcccagggccgcggtctgcaggtggctgggggcgtcgggcgggcccgggggggcgggctgggggcgggaccgaggactgagggcgacccctccgctccgcgccctccgctccgcgccctcccctccgcatccctgcagccccgcatgcgcacccgccctctgcccccgcgttgggtttgcctcgctctgcggtggcggttgtgaggggtccccccggaggctcaggtgggaagctcaacgtccctgagtgcccagaatcttcccggtgctggaaggcggtcgcgcagcatcgccgggcaagttacttttcggaggcccctttcccgactcccagtccccggaccgcggaaggcggaggctgcggtcctgagcggcgctgggatgagggcggccgcccttggccctgaagacccccgctgggttctcctgttaagtgcagagctgcccgtgcccacc

SEQ ID NO: 7 - DNA, 1143 bp, Homo sapiens
gcgcagagctgttcctgggtgtttgctgggattgtagtgacagaaggccagggctgcaggaatccaggctgccagagagagaccaggactcaggcagaagcagcagcaccaggctggtgccactgccaccccacctgcatgccttctcagcagcggtgggagctgtgtctccaagcaggatggtactggagtctccccaccctgcctgtctgggatgccctcccagcctgttcctgctcccggcaggcgctgcttttctctctgctgtaccaggacgaggtgggtgcccttgtccctcctcactggcactcccagactgctttccttttccaccaaaaccacccccgctttgtgaccagacctcactgtgttgaagtcatcggcacccctttcctgcaggaggggacacctgctccctgtcactctcccggccatgccttcaaaatccacaccagcaattctccaactttgacttcctctctttcaggggtcctgtcccctccccacttaccccactgggtcctttctcccaactgcacccctccacggtccagcctctccactctctctgcccccctcccagctcccgcctctgctgtccgccagccctgagatctcgggcagatgcacagcctgcatctgcggcttcctcctcccctgtctgttctctccttatcaagagaagcctatctggccggccattgtgtctgcccctcaccctccctccttcctgttcatgtgggcagaccacagcccgtgtggaatccctaccttcttggtggcttaagcaccacctgcctattctttccgtagtggggatcagggcagtgccagtggcttcctggggcctctcacagcctgcggccctgggccaaggtcagctgggtgggaagggcccaagggtagccatgctggacacctggggctgctgtccctcagctgccgggctctctgccagagccgtgcagcctggagtcctacccactctcagtcagcttcctcctaacacatggccagcgttccaggagggcgaagtggaagcctagggactcttgaggccaggatccagaacgcacatagtaaaatctccaccacactccatcggccaaagcaagtcacagcagccagattccagaggagtcg

SEQ ID NO: 8 - DNA, 1144 bp, Homo sapiens
gtgtaatcagcccagcctcggacgtcaacaatccatgtttcttaggaaaggcggccaacccagggtctccagtgacacgtttccgggtcatcatccggtggccacagggaatcacaggctcggtgtgactttctcagagcgccatggtgcccctgtggggtttcccagcccatcctgtcctgtgggacaggcagaggcccagccgtgtcatcggagtgacctttgagctctaaccaaagtccacgtgtcatcaggagccatgagtcactcaggtgccatccagggcggcggctgaggagtggtgactggccagatgggaaggcggggaagggtctggatttgaatgagagcgagggagtgggctgcaggctggtagactcctccagatggatgaggccagacccctgcaacagccatcccgagcaaggctcaagcctccctgagagtccagggcgccaagtcagccctgcacctggcccgggcctcggaccccgacggggctcacccacctgagatcaccctggctctgcgggaaggcaggaagctttggcatgatcctccacgggcgaggatcacgtagagacgtgtagagacgcgacgaagcacgaagacccgtgtttgacgggttgccaggtgcctacatcagagctcattaaattacacattaaatagatgcacgtgtgtgtgtcaagctcccctaattcaagttgtagaaaatcagactcagagttcttacactcgggggtgttttagcagctgcgcctcaagattctaaattcaaacgcacacggaataaaacatttcggtttatcgccaggcgcggcggctcacacctgccatcccagccctttgggaggccggggtgggtggatcacctgaggtcaggagttggagaccagcctggccaacatggtgaaaccccgtctctactaaaaatacaaagattagctgggtgtggtggtgggcgtctgtaatcccagctactcgggaggctgaggcaggagaatcgcttgaacccgggaggtaaaggttatggtgagccaagatcatgccactgcactctagcctgggcaacaagagcaaactctgtctcaaaaagaaaaagaaaagaaaaaagaaaaagtttattcccagtaaaacacgt

SEQ ID NO: 9 - DNA, 1794 bp, Homo sapiens
ctgccggagctgcccgtgggcccagcactgcccaaggcctacggcacaggctttgtgggctgcttgcgggacgtggtggtgggccggcacccgctgcacctgctggaggacgccgtcaccaagccagagctgcggccctgccccaccccatgagctggcaccagagccccgcgcccgctgtaattattttctatttttgtaaacttgttgctttttgatatgattttcttgcctgagtgttggccggagggactgctggcccggcctcccttccgtccaggcagccgtgctgcagacagacctagtgccgagggatggacaggcgaggtggcagcgtggagggctcggcgtggatggcagcctcaggacacacacccctgcctcaaggtgctgagcccccgccttgcactgcgcctgccccacggtgtccccgccgggaagcagccccggctcctgaatcaccctcgctccgtcaggcgggactcgtgtcccagagaggaaggggctgctgaggtctgatggggcccttcctccgggtgaccccacagggcctttccaagcccccatttgagctgctccttcctgtgtgtgctctgggccctgcctcggcctcctgcgccaatactgtgacttccaaacaatgttactgctgggcacagctctgcgttgctcccgtgctgcctgcgccagccccaggctgctgaggagcagaggccagaccagggccgatctgggtgtcctgaccctcagctggccctgcccagccaccctggacgtgaccgtatccctctgccacaccccaggccctgcgaggggctatcgagaggagctcactgtgggatggggttgacctctgccgcctgcctgggtatctgggcctggccatggctgtgttcttcatgtgttgattttatttgacccctggagtggtgggtctcatctttcccatctcgcctgagagcggctgagggctgcctcactgcaaatcctccccacagcgtcagtgaaagtcgtccttgtctcagaatgaccaggggccagccagtgtctgaccaaggtcaaggggcaggtgcagaggtggcagggatggctccgaagccagaaatgccttaaactgcaacgtcccgtcccttccccacccccatcccatccccacccccagccccagcccagtcctcctaggagcaggacccgatgaagcgggcggcggtggggctgggtgccgtgttactaactctagtatgtttctgtgtcaatcgctgtgaaataaagtctgaaaactttaaaagcattgcttttgtccatcctcaccagcgcgctggcccgttggcttcttgctccgctttgtggtgggagcacggacttggagctcccttgggtggccctggatggagccaggccctgcacagggatccttgtggctgatgaggccctgagtggggagcacacactgctgagcactgtgggaggcggggccgtggaggcaggaggctctctggcgtgcacgtgtgggtgcgtgtacgtgtgggggtgtgtgtgtgtgggtgcgggtacgtgtgggtgcatgtgcctgctctctggcgtgcacgtgtgggtgcgggtacgtgtgggtgcgggtacgtgtgggtgcatgtgcgtgtgggtgcgtgtgcctgctctctggcgtgcacgtgtgggtacgtgtgggtgtgggtgcgtgtgcctgctctccggcgtgcatgtatgggtgcatgtacgtgtgtgtgggtgcgtgtgcctgctctccggcgtgtatgtgtgggtgcgtgtgcgtgt

SEQ ID NO: 10 - DNA, 1151 bp, Homo sapiens
aggaaaggaggacccaccacgacagggcagacccccaatacctgctcctccttgaagtccagctccacccgaggacagacgcagccggcctccgccaggccctcctgagcagccatcgcttcagtggtgctgggtcaggcggacccaagagtcagcccggttaggacccattttatgtgcggggccacagacacaggctgagtgaccggcgcacagccacacagctccaaggccatgagcagggctcacccggcctccgtccccctgtgcagaagtctgtcatgggggcaggtgaccgtgcctttaggggacagaccgttctccatcaaggctggacgtgccccgtccctaaagcagccctgtctgcaagtgcccagcagaccccacggtgcccgagtgccccggggctgccagcttcaacagcagacctttaatctgactatcctagagttcagaagtccaaaaccaaggggcaaacaaggccacacgcttcccgaggctccggggaggacgctgtctgccttcccagcccctgccggctcaggcatctgtggctgcgttgcccgtctctgtcccctggtcccacggcgtctcccccacctctgcgtcttctctctctgcctctctctcaggtgggccctggccgttgtttcagggcctgcccggggaaccctgggcgatcacacctgagaccctgacgtaaccccctgcaaagccccttcttctaaataaggtcacattcgaggtcttgggactacggcctgcttgtcgccccctgaggtgcatgatactctgggacccacatctctgtcttcggggatcgcctggcccttgtccaggccccggggcccagggtgtaaatgagaggacacagccgggcaggaggaagccgtccctttcccgagctggagctctgagggcgccttaggggcagggggcatctgggttcccacctggtcagagtaaacagccccgggcgcctgtgccatatgcccactcccgagagcctccggtgagggctgaggcctgcactgtccctgctgtccaggtcccactctgacctcgcctgtctctgacccgtttcagtacggaagccgcgctacgtcaggcgggagcggcccctggacagggccacggatcccgctgccttc

SEQ ID NO: 11 - DNA, 1214 bp, Homo sapiens
gtgccgagacatggtggctgtggtgaacggtgctgccgagacatggtggctgtggtggacggtgctgctgagacatggtggccgtggtggatggtgctgagacatggtggctgtggtgaacggtgctgccgagacatggtggctgtggtggacggtgctgctgagacatggtggctgtggtgaacggtgccgagacatggtggctgtggtggacggtgccgagacatggtggctgtggtgaatggtgccgagacatggtggctgtggtggacggtgctgccgagacatggtggctgtggtggacggtgctgctgagacatggtggctgtggtgaacggtgtcgagacatggtggctgtggtggacggtgctgctgagacatggtggctgtggtgaacggtgccgagacatggtggctgtggtgaacagtgccaagacatggtggctgtggtggacggtgctgctgagacatggtggctgtggtgaacggtgccgagacatggtggctgtggtggacggtgctgctgagacatggtggctgtggtgaacggtgctgctgagacatggtggctgtggtgaacggtgctgctgagacatggtggctgtggtgaacggtgctgagacatggtggctgtggtggacggtgctgctgagacatggtggctgtggtgaacagtgctgagacatggggctgtggtgaatggtgctgccgagacatggtggctgtggtgaatggtgctgctaatgtgtctagaattggtggattcttggtctcactgacttcaagaatgaagccgcagaccctcgcagtgagtgttacagttcttaaagatggtgtgtccggagtttgttccttctgatgttcagatgtgtttggagtttcttccttctggtgggttcgtggtctcactggcttcaggagtgaagctgcagacctttgcagtgagtgttacagctcataaaggcagtgcagacccaaagagtgagcagcagcaagatttattgcaaagagcgaaagaacaaagcttccatagtgtggaaggggacccgagtgggttgctgctgctggctccggcagcctgcttttattcccttatctgaccccacccacatcctgttgattggcccattttacagacagctgattggtccattttatagagagctgattggtctgttttgacagggtgctgattagtgcgtttacgatccctg

SEQ ID NO: 12 - DNA, 1180 bp, Homo sapiens
aaaaacatatattttgtagacacaaggtctccccatgttgcctaggtaggtctcaaactcttggatttcagagggttcaagtgacccgctcggcctccccccgtcctggggttgcaggcgcgagtgacccgcctgccttggcctctccccatcctggggttgcaggcatgagcccctgtgcctggccttgaccttctagaatgacgcggagacttttgagcctgttggctctgcctgctcttttcccagttcacgtactcttatctggagtttggtcctgtccgttctaaatcctgcaaattggacattaaaaaaactaaaagtaagaggatctccctgtgttgcccaggctggtctcaaagtcctgggctaaagggatctgcctgccgcagcctcccagcatgccgggattacaggcacaagccccagtgcccggccaaattggacgttattacttcctttccaaaagagtggtttacattttcctccccacacacggttcgtgcctccaccccggtcccgcgttccctgctgtcctgactgcgtctttaagcttcatcccgttggtccggcctgttggcgatgtgcttggggcaggaggccttgcccgtgcccgccccccaactctgattgtgtctgtctttccttggtgccactttatttgggtcttttctgcccaggacatggcccacctggacctagagctctgtgacatttctgtgaagcctccgtctacctttgggactcagcagaggtgtgtttagaattcactctgcgttttgggggtccccatgcatgctgaggtgctgttccctgcccacccgtgtccgatccgtcttggcctccccgacctcagggtgcctaggaccccccgacctctttgggtatttggtttctggctcaggaagagcagctgccgggtcctggaggaggggcctgggaagcgctggcaggcgtcactcctgcgacctcccacccctccctgcatggctcctgcgagggtcaccgcgtgagtccgggggctgctgtcctcgcgcctcagacctgattctggggaccgcggtgaaggcgtggcaggcgggcatcactcccttcccccgcctccatcgctgcctctctctgggtctgcgtcctcttctcacagggacagcagtcgttgactctccctgatccaggaggg

SEQ ID NO: 13 - DNA, 1197 bp, Homo sapiens
gtgggaggggctgcgagcgggctgggctccggggccgacctcaccggcagccacggcctccaactccagctctgggtccagctcaccccactgggcgtcccgagtaggggaggcactgctgtcccgacagcacacactgggatgctggggccagtgtgaggccccgggccggcaactctgactccagggccctgcgtcccaggccgagtccggtcctccgccatctggagctgctggacgagtttgccagggagaacattgactccctgtacaacgtcaacctcagcaaaggcagagccgccctctccgccactgtcccccgccacgagccccccttccacctggaccgggagatccgtctgcagaggctgagccactcgggcagccgggtcagagtggggttcagactggtgagtgtcccagccggggcctgcagccatcagggccttgagctgggagcacggccctgcgctgctggtacctcgagtggggagcggggcctgggctgtagccacagagctgaccctccctcccctctcccagtgcaacagcacgggcggcgactgcttttaccgaggctacacgtcaggcgtggcggctgtccaggactggtaccacttccactatgtggatatcctggccctgctgcccgcggcatgggaggacagccacgggagccaggacggccacttcgtcctctcctgcagttacgatggcctggactgccaggcccggtgagtgtggcgggcgggggccactccttccgtcccaccccacagagcgtggccgcacccctggggtccctctggctgtatgctgggagccacccaaggctggccggaggaactttccgcagacacagggcaggccatggcccctcaggccagcgtgacgggcgcgggcagccgacattcaaggtctgagcttggcttctcattccagacagttccggaccttccaccaccccacctacggcagctgctacacggtcgatggcgtctggacagctcagcgccccggcatcacccacggtgggtgccagcccctggccggtgcgggggcaggggtgcaggtcaggtggcctcacaccagcccttggcctcccaggagtcggcctggtcctcagggttgagcagcagcctcacctccctctgctgtccacgctggccggcatcagggtcatggttcacggccgta

SEQ ID NO: 14 - DNA, 1107 bp, Homo sapiens
catgtgtgcttgattgtgtatgtgtgggtgtgcacgcgcgcgctgggtctcttgggatctgctggcaagtcagcatgtgtgtggaggcacggggagcctctgtatccctggagccctcaccaggaggctcaggagccttggagtgggaggctcagggccagccaggagagtggccgccagccctgggcagaggaactggggccatcctctgctctcccatcttctgttgctgacctgggaaaaggggttgaataacttgagcaccctaggatcctgcattgaggacccgggctgtggggaggtgtgggcatggcctccctgctgggggctggaccctggctgaagcacccaccttctccctggcccctccgtcagaagcctaatggacctcctcctccacgcagacggccctgtactgccctcttccagtcgtgtgggggtgctggaacccactcacctctgggccttctctctggtaaccggctctcatgggagcctgttacaggagccagttatgggggctgtggggctgcagtaggtgccgtagagtgactgccctgggaaagtgcctcacccctgtggggcatggactggagtggggagatgagaatggcctggcccagtgggttttggggttaggctgtgatttaactggggttcgaggggctccctgaggctgtcctgggggcaggccctaagggcgtaacttgagtttcctggcctaccgccaggttggggggccaggcagggtgggcgggaagatgtggtctgtaacgtggagcctggtcgccccagcccgggagagggggaccctgcccgcaccctcctggtctggggagggcctagtggcagcccaggtgcagtgggccggaggccaggggagcccgtgtaggggaaccgcctggcctctgttcagtgtgcccctcccctgggtggggcttcaggcgctgagtcatggctttggttggggggcagcctcaccctcctccccgtcctccaagctgctgaggaaatcctgggctgagcacagcagaggaggcctaggtccccaggactgaggaagggagagctgaggggctcccagcagtgggagcggctctcggggcc

SEQ ID NO: 15 - DNA, 1100 bp, Homo sapiens
cccctccagctgtccaggtcctgaggactcccggctgcctgcctcccgcctcaccttgccttaaaactgggggaggtgctggagctaaaatcagcacgtgacttgagggcagggccacagcccaggggcccttcctcacctgctctcctcgggggtgaccaaggggctggcttggcctggggaaacggagacccggcgcagcgttcgcacggggctcggcaccgggctgccagcggactggaaggcgctgaagtcgtgtgtgccgaggaggtgctgggcggcttcctgcatggcgaccatatccaggcagcttcagggaccagggtgaccgtcaggagggtggggccggcctgcccgccccctccccgctgtcagggccacactcactctgccgggagagtccagcataggttgcgttcaaacaccggcagctcatcacgccggtgacagccagtggccaggcggtacaggtaggtccgggacgtggctgcgtgacgagcgtggaagtcgctgggcactcggaaggcccgcaggaccctatggcggcaggtaaagctcaccggaggaacgaccccgcccgcccgcggtgtcacattggctctccttccccctcgagctccgaccagacaaggaagtctgtccagatctccagcctccgcccgcgacagatggagtcgggaaggcacagccccagggctgcttaggtcgcgggctcacctgatggccgggtgccgcaggtgtgtgttgagggcctcggccaggacctcgggcgggaagggcggccggcctgagcggcgctggacgtccaggtgcgccgcgttgctcagggcgtggaccccggcgtccgtgcggctggagatggtgaacctgaccggctccacggaattcagccgctcggcggcctcctgcaggaccgagccgcggggcgggcgggtgagcgaggccggaccccggggacgcgcgggcgggagcctcccccttacccctcaccgggcgtcccgtgaccggctgagcgcacctccaggtagttctggaccccgacggcgcgctgagtgcccctgacggccgcgaccccgctgcgggcagaagcgggcggaggt

SEQ ID NO: 16 - DNA, 1173 bp, Homo sapiens
ccgccatagggtcctgcgggccttccgagtgcccagcgacttccacgctcgtcacgcagccacgtcccggacctacctgtaccgcctggccactggctgtcaccggcgtgatgagctgccggtgtttgaacgcaacctatgctggactctcccggcagagtgagtgtggccctgacagcggggagggggcgggcaggccggccccaccctcctgacggtcaccctggtccctgaagctgcctggatatggtcgccatgcaggaagccgcccagcacctcctcggcacacacgacttcagcgccttccagtccgctggcagcccggtgccgagccccgtgcgaacgctgcgccgggtctccgtttccccaggccaagccagccccttggtcacccccgaggagagcaggtgaggaagggcccctgggctgtggccctgccctcaagtcacgtgctgattttagctccagcacctcccccagttttaaggcaaggtgaggcgggaggcaggcagccgggagtcctcaggacctggacagctggaggggattcgcccggacgccccccagcctccagctgtgccctccccccaggctggggagcggagaacagggaaggctgcttgtctctgaaaaacccctgccatgcctgatggaagaatgttggcagctactggaaaggtctcactggtgccagtggttctggtggggtggtttctgctgcccccagcactgtcccgagggccacccaccaggtggcagcttctgaccagaacctcccctattggggtgagccctgaaggggggaagaacttctgccagccccagacttctgtggcagagcagcaggtacaggactgggggtctctggcacccgcaccagccacgttcccagaccctgcaccaggaccctaggtgagggcccagggcaagcccctctgggatggccaggctacctgcccagcctccagggtcctgctgcctccttgcccaagcattgtttctctggttttaagcccctccaatgggcctcactgggggcaggagatcagccagggcccctggtggccaagctagtgggaaccaggctcgtctttaggcccaccctgtcactctcccgtccaaggccacatagtaggctgaggatggcaaacactgccccacagacacctacag

SEQ ID NO: 17 - DNA, 1172 bp, Homo sapiens
cacaatctcagctcactgcaatctccgcctcccgggttcaagtaattctgccttagcctactgagtagctgggattacaagcacccaccaccatgcccagctaacttttgtatttttagtagagacagggtttcaccgtgtcggccaggatggtcttgaactcctgacttcagatgatctgcccaccttggtctccccaagtgctgggattaaaggtgtgagccactgtgcccagcccagtatttttttgtttgtttttaccgagatggagtcccgccccattgcccaggctagagtgcagtggcgtgatctcagtacactgcaacctccacttcccaggttcaagcgattctcctgcctcagcctcctgagcagttgggattacaggcacgcacttccacacctggcttacttttgtatttttagtagagacggggtttcaccatgttggccaggctggtctccaattcctgaccccaagggatccaccttaggcctggccgccaacattctgaaccttgtcttttctctgtcatgtattcaaagtccacgctggaaactccaatttcaggtcccttcagttttttgtccgttgtctttcgttctttgtccacgttgcccgtcccttgtgaactggatgctgtgtgtgagcaacagggactgaaaagctcagtgcagtgccctcgctccccgccccgcctccctccctgcccccgcccccctcactccctgcccctgcctccctcgctgcccgcctccctccctccctccccgcccccacctccctcgctcccgcccccgccccctcgctccccttcccccacgctccccacccccgcctcccgcgcttcccgtcccccgcctccctcactccccgcccctctgctgtgaggacacagcctgagcgcagccctgtcctccacaggtagatgatgagctggagatcaaggcctactatgcaggccacgtgctgggggcagccatgttccagattaaagtgggctcagagtctgtggtctacacggtcagtggaagggcttgaggcttgggaggggctgctggggtgggaggcaccctcctcatggcatccttgatcgttcaccagggtgattataacatgaccccagaccgacacttagggtaagtaggctgaggtgtctttttgtcccgtg

SEQ ID NO: 18 - DNA, 1212 bp, Homo sapiens
atttcccgtttgcttattgccttgctagactttgagactgaaagttccagggagacagttttgtgtttgctcattactgactcttcggtactcgggatgaggcctggcgcacagcaggcgaatgaaggggccagtgacccacaagcccagagcgggggtgaaggctggggcagggtgggcccaggctgacctgtgctgcgtccccctagccacttccacctggaccactgcggggcactcccctacttcagcgagatggtgggctacgacgggcccatctacatgactcaccccacccaggccatctgccccatcttgctggaggactaccgcaagatcgccgtagacaagaagggcgaggccaacttcttcacctcccagatgatcaaagactgcatgaagaaggtggtggctgtccacctccaccagacggtccaggtcaggttcccagggccacagctggcacagtcactgcccacccccacaccaaccatgccctccgcccgttctacacagtttctggaaggctggggcctcagggtgagcccaccccacctcactcttgcgtccagcaccgtggggacaccaggaggcgtcagcgcgaggatgcgggtcccagaccagactgggcgccgacccgggagagcacgtgcagggtgggggtatgcaccggcttatgaacccaccaggctctgtccgagcggcattgaaatggccagagtgggacaggctggtgccctcagagcgcttggagcggccagagactcgctggagctcccggggtgttgccgggcagggaggcaggggctggaggggagatgggccagctctggagggtgcctggttctgggtgtgggtcagggaagaagtgaaggttaaatcagcgagtgacaggtgaaattccatttctgacaaagattatgggtttgtctgtgtctcactcgaatctctgggtattgcttttatatttcttgaaactatattaggtacctatgtattttggaacatttaattttctgattgaacttgtcaaaatgaagtatgtttatcttttttgttgtgaaactttaatttttttttttttttgacagtgtctcactttgttacccaggctggagtgtgatcttggctcactgcagcctcggcctcccgggttgaggtgatctcccacctcggcctcccaagtagctgggactacaagcatgtgcccat

SEQ ID NO: 19 - DNA, 1118 bp, Homo sapiens
ctgcaatcacagcactttggaaggcagaggtgggaggatcgcttgagcccaggagttcaagaccaacctagccaacatggcaagaccccatcactccaaaaaaaaaaaatgctaaaattggcagggcgtggtggtgtgtgcctgtggttcaagctacttgggaggctgagttgtgaggattgcttgagcccaggaggttgaggctgcagtgagccatgattgtgccactgcactccagcctgggtgacagcaaaaccatgtctcaaaagaaagtcaaagtcgtaacagtatagaacgatgtgaagaaggaaaaaattagtcaaaatccagggtctcagaaacagctggagggacatggtgttggtggccagtcatcctgatgtccttagcgttttccacaggtgcctgccctgtgctgtcctggaacctggtccttccaccgggcagggggtcgagggcaccttccagcacagacaccaggacgggattccatgtcctcccccatggcgtgagcgcttcctcggagggtgccccccgccccggtgtggacactgtgctgtgaacacccctggcctgtgcacaccccatggcattttgcagctgtttgcatgggccccactgccctcccctgctctctgggtcctccgtggggtcctcccagcctgcccctttcccatttggcctcttggctgcctgttctgcccactctctggacatctgatctttctgatctttcatgtggcttcaattacccgcaatctgtacctgggtatattctcaaggtcacctcagccaaggtatcatcaaagccgaagtcctgtttcaccgcttccctgcaccagggactgcctcgggctccgtgtccgcgctcactggaccactgctgtgtccttggggtcactcccacgccttggcctgtgtgtggctaccccccccgccgccggtccccctacccaccctgcccatccctccccaccgccggtccccccacccaccctgcccgtccctccccctgctggtcccttccctcccccctgcctgtccctccctgctgcctgtcctccctccgcccgccccgcttcttctcctcccctggaccatcccttccccaccccgtc

SEQ ID NO: 20 - DNA, 1152 bp, Homo sapiens
atggctgccccacccacccgtcctgcacgggccaccgttcctgcccggtcacctggcgggggcggttgttctggacgtggccgggcctggtgctgacaggctccttccccatcctgttctcactcccagggagcaaaagcagtgggtccacccggagcagccgccgggccccgggccgtgagaaggagcgtcgggcggcgggagctgggggcagtggcagtgaatcggatcacacggcaccgagtggggtggggagcagctggcgagagcgtccggccggccagctcagccgtggcagcagcccacgcagtcaggcctcggctaccgccccggggctccccccgccccaccccacgaccaaggcctatacagtggtgggggggccacccgggggaccccctgtccgggagctggctgccgtccccccggaattgacaggcagccgccagtccttccagaaggctatggggaacccctgcgagttcttcgtggacatcatgtgactcgtggcgcatgccccagccctgcctgaggtggggagctggcggtcctgccgcatgcagagctcgcgtgggcttgccttcgtgggggccaggacgggaggcagggtggggggcaggctggaccaccaccatctgccctggcagcctggctgctccagctcctgacagcacctgtgtctgagcagccgtgttgggggcgctccctctctgcccctcagcgagagcctcggacctcccaaccccttgtgtctggtggggatccctcctgggatgaggaagaccccctcgggctctcggctgacccccacctcctgcacagctgtgcccaggcccccagggtggtccatgcggggcaaccccctgcggtgcacaggccccctgtctggagtagggatctaatttatttatttattgcctggccggtgactcgggggaggaggcgaccctgtcatctgtcccacctgctgctgccccttggagcagcctgcaccttctctcctcccatccggcaacagtctgaaagtacgtggaggacgggaccggaagacgagagagggctggacatcctgcccaccgtgtcccagccagggcagggagggaccatggcccgcagggtcaaggggccccgatgtgcacagctgccacaggg

SEQ ID NO: 21 - DNA, 1193 bp, Homo sapiens
cagccccctccaccttcccgcagcccttctcttccccagaggtcagaagccaggcaggaagacctaagaggggctatctgttgaggccccagggagggaggaagcctgtccctgccctgagggcctgaccccaggctaggtctcaagagaggctggaagccagaggcctgaggccagtcccgttgctgacgcggatgtggtccagctggggccctgacaggtgtggccactggtgaggccagaggtaaccgggctgggaggggggtgcatcttcaagccacacctccccagaccagcctccctccctccccatccatgcttgtgtggggtccttgtgggcaactgtcaccctttcccacccccactgtcctgggaggactggaggatggggttgggtggtgacgccagcttcaagaagcagcagttagtcgctggtctgtgctgccaggaccccgggccacgggccttcctgctcccgccactcctcccaccgcctgaacttgtgctgagatcctgcacccaaccagctgatgcctgagcgggaaaggattctagggccagatccgtgctggcctggccaagactcttggaaccaccctgctgtcccgggctgtctctgctggagcctctttgctcccgccccctttgcaagtgtctgacccgcatcccactactcccgctcctcgtccctctgcctctccaagagctgtgctcccacggccttccctctggcctcacagccaccaccacgtcccccctcctcacgtccaggtcagccctcaagggaatctgaactcctccacgaccagaagccacacagaactagctcaaaggtccccttcccaggacaccgactcccagaggacccagacccagacctttcagcccaaggaatgggatgatgtcaggggttccaggtggagacgaggactcccaggcccagactcatgccttgcccagccccaggagacggagtttcagaagcatacctgggacaagtctaaaaatcagatggggactttattgtgatggtggcaggtccaccagcagatgcaaatgtggggtgctgagagtggcaacacaggccaccccaaaccaacttcactccctcccctgtcctcagccagtacagaagccaaatgtagccccagccctagactccagcccaggcagagtccaagggaggggtgtca

SEQ ID NO: 22 - DNA, 1288 bp, Homo sapiens
aagcctggacttcctgtgtcccccaccctgaagagagcagtcagtgggcttcctctgggagctgttgacttggcgcagggggaccttttcctggggagggtggagggacaggctagtgcagacttggtctgtttctccactgacattgcatcccatgggagaggggcagagaaggttctggggccgattttagcaatgcatgtgctagaaaggaaccctaaagtgcaatgtagtatttgggggattctggggattctggtgaattttttcccatggagttaagtctgtaagggtcatatttttgctgactgaattgtctggtgctatgacatgtttaatagagaacctattttgacttttcttttctgtactctttcaatcaaagggtagcctctgagggtaagtgactaagacttctcctctgctgtccaagcgctttggtgcagggacagcggcatcttcagccaatccagtgcaggctctccaccgaaggctggctctagactggtggtacgcacatagcatagccatggccgactcctgctgtggttctctgacgattgtgcttcttgttaatcctctgtcgtgctttggtaatcgtattgattagagttggtaactgtcttgacttgaattttgtccctttaaaactgctgtacctgtatgataaagatgcagtacctttctcttaaaaaaaaatgctatggaaagctgtgagaattgaagagacaaattggctgtgtcagtgtggggttatgtcatgatttctagaagccctgaagttgctcttttgagcagctttgcatgacacgctctggtaaaaggtgtgcatctttaaattatttcatggatactttgaaaaatattgtatcacttcaaatacagcaataagtttatatgttctcaagatttcatttgtttttaagaattttaagttcgtggattaatatcactacttgaatactgacagttgttgattagacaccgaaaggttactgattgttgaatgtatctgtgttagagctgtgcactggcacgcttgcatcaggggctggggccacacggccgccacacagattcccccgtgatgcctggagctgcttccagagccgggtgtctccaagaggcacctgtaggacttcccatttagaaatctcttgagtgggtttgtatgttaccttctccaaggtttatttaggacagagatattgctggaaggtcatgggtcagattccctcacaacccacctcgtctgcgggtgcagccccactccaaggctccccgttat

SEQ ID NO: 23 - DNA, 1213 bp, Homo sapiens
gtgtgagccaccgcgcccagctgggagtttatttcttagatgtgtgttaacttcagctgaggctcctgtgtgcctctgtttcatggccttcgggtgttggccgccctctactgaacgtggtccctgaggccgcagggactgtgcaaagccggatgtccaggccctgggagtccaatgggggcagtcgattctatggatggcacatcctctttgcctgccctgccctgggccctctcttggcccacttttctgggtacgtttcaggccctcatgcccagttggggccctagcatgggtcaggccctccgcctggtgtcgccttcttgcccgggctgagtctttggtttctttctttgtgggttcaatgtcgaacgctttgcgtcagtgggacttctgcaggacctgggcggcgcaggtgtccggaagatgggacaggtttctgttccgatggcgcctctctccccttcctcccgcccggcagtacttaggttcttccttcagaaaggatttccccatgacttgaagagcaggctctcgcacgcaggcccgaaacctgctcagcctccccgtggccctgagcctgtctattgaaggccccgcctcacccgccagcggctcctgtcctctcgccttgctctgagcctttgcctcgtggcactcactggcaccgtggttttgctgccggaattcaggtgggatcttgcgtccctgtgagctcatggcttggtctgtggtccctttggtcctcctcaggtcctcacagcctctggtggggcttgcaggtctagccctctgggcggggcctcacctcgcatctcctcgccaggagatccagaagggtggctgctcgctcatccttgtgtagctgaggaggctgctgctttgtccctgaagtagacatttctccttaactgaatgattcttaatttattgcctcatctacataaatagttgagaatgacgtaaaggaggaaaggacttagaactgtccaggcctcagggaagagctggccttgaacgtccatgagctctgccagccagtgacaccagtcccatccccaggagcccccacggcctcacccccggctgtgtcttgctcagggatgtgcagggagggtgatccctgtgcccaccatgaagctgccactggacccctgcaccctgaccccggttcctctccgtgagccggtccctgcacctgcccctctgcatg

SEQ ID NO: 24 - DNA, 1149 bp, Homo sapiens
caggcgtgagccaccatgctcagccctactcttgtatttttttttttttttttttttgagatggagtcagagtctcaccctgttgcccaaggtggagtgtagcggcttgatctcagctcactgcaacctccccctcccaagttcaagcgattctctgcctcagcctcccgaatagctgggattacaggcatccgctgtcatgcctggctaatttttgtatttttagtagagacgggggtttcaccatcttgaccaaactggtcttgaactcttgacctcgtgatccagctgcctcggcctctcagagtgttgggattacaggcgtgagccaccatgcctggcctcttggaatatttaataagctaaaaaattcttatacacaggtagattaattaggtagccaggagtggcccctgaaagtatgtctggcaaaacctagaactgcatcctagccatcactgtaccttctgccctccctgctgtctcctctgccagttacagttaaaaggttgtgggtgaggacgctgggcagagtcccaggcgtctgctgtcagctccccagcccggcctgcctgccgagccatctgggcgtcccacggtggagagtgtggtgcttgtgacgcggtggtgctgggagccatcctggtggcagatgtgggctctcactgcaagtcagtgtaagtccccagggactgtcagcagcacgtcctgctgcccctctctctgcagaagccctggtaacctgcgtttggaaaaatctctaaggatttctgaggagctgtcaggccatgtccttgtccaccctgtgtggggcacggcttcgacatggctctgctcccgtcgtgggctgagaaggagcaggtggggctgtgccttggaaaggaggccctcccgacatgcctttgtgcgaggtccctgtccatgctgtctccatcccggagccttacggcgatgggtggccacagagcctattccaagagtctggtttagggctgggtcttcccatcttcacctctgagtcttaggcgatgcgtgaccacgcagccccttccaggagtctggtttagggctgggtcttcccatcttcacctctgagtcttaggcggtgcatgaccacgcagccccttcccggagtctggtttagggctg

SEQ ID NO: 25 - DNA, 1204 bp, Homo sapiens
tgcccggcctagattaaaaatttgaagacatattctctactatgagccaatgaaattactcattttgtttctatcccatttgctgtcccttgcttttggaattttgtgtcttagtgtgactgtgattctttctctccttttgtctttcagcaaacggggattcagcgtccgatcctttggaacagggactcacgtgaagcttccaggaccagctcccgacaagcccaatgtttatgatttcaaaaccacatatgaccagatgtacaatgatcttcttaggaaagacaaagaactgtatcccagcgggttgccctttaaaaaccccccgtgtggtcctccctggaaggtgttacgtgtggctcgggcacaggaggcgtgtcaccctgtgcagtgcacacactggctcctctgtctttgcgagagcttggtttctattcctggtgcacgtcggatcgtccacgggttagttccagtgccacccatggcagtaggcgtggtgaggcgcacagacacggtgtggggttcaccctgacgtggttcagcagagggtcgtgacatagcgtagaccagggatgcttaggtgaggaggtggaacccacaaaatcccattgcttttcacactgcagggctgccccgttatttcctttgcaggttggtgtgcgtgcgtgtgtgcgtgcgtgcctgatacacatggagccgggctgcttcacacatctggtgaggtcgttagaaggtcagataaagaagagggcggagcttgctaaccaagctgttagaagaaataatgggagagaacattccttcatttcaggaggacacagagcaggctaggtctgccgcgaagactcctatagagagaagagtattcttaaactagattctgatggacgcaacaccagttgcataatggttatgacaatcagtgcccgggtttttgaccaggcatttcatggtcacccccacgctaatggaaagtttctggatcttattttgttatagtgagtgatttgtagttttcagaacggaggccaggccaaacgtattccaaatgaaaagagaataggtgtcaaatgctaaaccttttatcttcgtgttggcactgttgccatccccgccctctcccgacatccccgcccttgaccagcatctctggccttgcccagcattgtctatgtattggcactcttgccatccccgccctttc

SEQ ID NO: 26 - DNA, 1101 bp, Homo sapiens
tctccattctctccctctccttcccatgtatctctctgtctctgtctctggctctctctctctctctctgtttctctctctctgtttctctgtctctcttcatctctctctctccctatctctctgtccctgtctccatctccctccatctctctctgcctctctgtctccatctctctgcctctctctgtatctgtctctgtctctctccatctctctctgtccctatctctctgcctctttccctctctctgtgtctgtctctgtctccatctctttgtctctctgcctctctatctgcctctctctctccatctctctctgcctctctctgtctctgtctctctatctgcctctctctctccatctctctctgcctcactctgtctctgtctctgcctctctccatctctgtctctgcctctctttctgtctctctccatgtctctctgtccctctctgtgtctttctctatctctgtctttgtctctctgtctctgtctgtctctgtctctctgtctctccccgccctgctctctctctccgtctctgtctgcctctctctgtctctgtctctgtctctgtgtctctccccattctgctctctctgtgtctgtctgtctctctctctgtctctgtttgcctctctgtctctgtgtctctctctgtctctccctgttctgctctctctgtctgtctgtctctctgtctgcctctctctgtctctgtctctgtttctctctgtctctctgtctctccccgttctgctctctctgtgtctgtctgtctctctctgtctctgtctgcctctctctgtgtctgtctctctcgctctctgtctctgtttctccctgttctgctctctctgtgtctgtctctctctctctctctgtctgcctctctctgtctctctctctctctgtctctccctgttctgctctgtgtctgtctctctctctgtctctgtctgcctctctctgtctctctctctctgtctctccctgttctgctctgtgtctgtctgtctctctctctgtctctgtctgcctctctctgtctctgtctctgtctctgtgtctctccccattctgctctctctgt

SEQ ID NO: 27 - DNA, 1145 bp, Homo sapiens
cgtcctgcgcaaccgcagcgtcctcctgcagtggcgcctggccccggccgccgcgcgccgcgtgcgcgccttcgcgctcaactgctcgtggcgcggcgcctacacgcgcttcccgtgcgagcgcgtgctcctcggggcctcctgccgcgactacctgctgcccgacgtgcacgacagcgtcctctaccgcctgtgcctgcagccgctgccgctgcgcgctgggcccgccgccgccgcgccagagacccccgagccggccgagtgcgtggagttcaccgccgagccggccggcatgcaggacatcgtggtggccatgacggcggtgggcggctccatctgcgtcatgctggtggtcatctgcctgctggtggcctacatcaccgagaacctcatgcgcccggccctcgcgcgccccggcctgcgcagacacccctgaagcgcgaggccgcccgcccatctttgcgccacctgcctgagggcgcctgagctcccaggtcctccgcccgctctcctctcctcattcctgctgcctccttaagatccccgcggaggaggacctgccggcgacggctccggcactttggcatcatcacacgccctttccagccgggcgtcagactcccagactctggccccggattggcccctgggcttgcgctgctgtgccagccgcatccagggctctccccgctctccgcaggcctttatagaggcggccagggcatggagccccttccagcaagagccatgggcactccggctcaccccgcacctccatcctgtgccgaattgtcccagacagaccgtcgccattgctcggtcactgtgctttgcaggcctggggcgcagctctccaagcctgtcctgccccgccccaccccactgggcttaggttagcttcgtgccttagtatctcgggcccactgcaggagccaacaccctctgctgtccagggggggtctgtggccctaagattggccggcctctccatgcatctggccagcgtccccttggagacaccttcaccctcaagcgctgcagaagcatgaggtgagggcctgcagcgctctgtaccgtttagggtgttggaccagccgggagcctggcaggcctggcccagcggccagggtgagtgttctcagacc

SEQ ID NO: 28 - DNA, 1210 bp, Homo sapiens
caggtcttgggtgactgctggccctggggcaatggtgagaaagccaggcaggcagctgcaggaaggagctgaggagaaaggcggcagagcctcaaaagctgctggcggccgggcacagtggctcacacctggaatcccagcactttgggaggccgaggcgggcggatcacgaggtcaggagatcgagaccatcctggctaacacggtgaaacccccgtctctactaaaaaatagaaaaaatgagccaggtgtggtggcagacgcctgtagtcccagctactcgggaggctgaggtaggagaatggcgtgaacttgggaggcggagcttgcagtgagctgagattgcgccactgcgctccagcctgggcgacagagcgagattacgtctcaaaaaaaccaaaactgctggcccctccagagggtccaggatactgagctcctgagcctgggatccacgcgcatgtggtctgtctgcacactggcaccgcagaagggttggcaggcgggcaggcatggctggagaccccgctcagatgaggcggccactccagggcagtgccatgctggacagaagggactgccttggaagtgggacagaccccagacccttggggtgggggccctgcaggggaggccttgaggaggcgccgggtctacaggcccctgtgtgctcacatcccagcccccggggagaggtgggagtgggtgggcgcacccagctcccctgtccaggctcgtcccccttgttggggcagccctcagcaagtggggggctggttccaggcacaagaagtgaggccagggaggaagccctgcctgtgttcagcccagttgtgccccaactcaggtgggcttccatgagggacagcctctgggagggtgggggtttgtgggccagggctggagagctgcctggctgtgctaaaaataccgggcatgctgcagacaggtgccagtctggggcacaggctaccctgtctcaggctgatggccttggcactccaccccactgcccctgtgacgcgggggccgccaaggcttggtcttgattcccagaggccctgctggtgacctccccgacatctctgccctctgcccatccccccaagggcaagatttgccaaagcacaggacacattggctcacacatggggcaccctgcccctgtctttttggaaaggtccaatggcatatggccagcgggtcgggc

SEQ ID NO: 29 - DNA, 1286 bp, Homo sapiens
tgcctcttttcacatttctttaaactctgtttaaaacagcatgtggatgccatggagactggaagaccattccaacttggacgcgttaccatgagagcatatcctatccaaccgtactaacgtggacaccctacacctcccctcagaacttcaaaagggcaagatcttttttccttcacttattgctgaaaccaagagcacaattcccattgagagaaagatctctgtgctgtaaactaaaacaaattgtgcattccttccggggccatcgtctttgttttcttttttgtcttgaatgaattttaaaaggaaatatataataaaaatgttaaccagaaggtaaacttgagtgtaattgtcagacagacacacttttccaccagtgtatttgaattttagaccagtgaccctgttttgtggcattcatgcaaaacatgctgagggctttgttcatctggtcatcgtgtccaaatttcagtcatgtttgtagcaagattttggaagcattcatatttcctttttaaaatgtattcctttgtgttcaacagttaatcaaaaccagagagtctagggcagcctctctgatgttgtcaatgatgtaaattcagtccctggtttttaattttctgtctgatgtcacagatcattgttgcacacaaacgtggcatagaaaagaacatgttcagaagccatggggccaagcacatgcggggacggtctcaaatgcgtgatcagagaatccttcacctttgctgaaaagtgagctcagatccagcaccatgttcctcctgacccatcctgtctatcttctcagttgagtttttaatctcactttgggtttccttgtgaagttggagggaagtttataatagcctaacactaccccacccccaactaggaggaacctctgttttcaagagagatgcctgtcctgtgcttggatagtcagtcaattatttgtgtatgaaacaatgtacaaatcaatgttttgaaaataatgatctcagactttctaagttaaattttaaaaattttgattgtttgccatattgggtgggtttactcttagaatcgcatgctgtagaaatgctcaaaagtgcatatgggactcagtccttaggtgttctttttcttttaagaaataacctcttacagttgtaaccattgcggctctgtccacttctcgttgctgctctgtggcacatatcggaagcagtacagcgcgcggctctacacgcttgggtagcgggataagtcactgttttctttatttctttaaaaaaaaa

SEQ ID NO: 30 - DNA, 1121 bp, Homo sapiens
tgaaagcggaggaaagagactcctcccttgcctcccccttgcccaggatgcctgtgaggagcattcgggagcctcattaccactccctggtttctatttcaggatattgactgggtacagacagagaagcacgtgtttgagcaggcatccagcaaccccttcctggtcggattacactcctgcttccagacgacaagtcggtaagaaaaagaagggtatttctgatattctgcagatttcagatgtgaactgcacagaagctaagtctggtgtgatgtgtcaactgtcacctgtaaggttctcccagttgctgtacgggtgttttcaggccagcagactctctttgttgttctccttggttggtgtcatattaagtacatttcatgatctgaagttatttaattccatttacgaaatacttactggaggtatcccactgagtgcaggcattgggtcaggtgctggggctacaaaagtaagcaaaagaggtggatttctgtgcttattaaaatatgtacagcttcaccttcaagctttatatatactggaattctgtggctttgaatacatttgaaagctgatgatctaggatattaaatgtatgccctgtttaaaattttgggggccagttgactttgacctacctgatttgtttatttgaagagttattaagtatgttctgcattgagtcctcaagaccatccccaggttcgatgattggctaggaggactgctgggatcaatcatggccgcactgggggccacagctggcatactgcactggggagataaaggagacttggccaaggaaaaaggcacatggggaaaattccagaagaaaccagtcacaagctcccaagagccctctcccagttcctccagcaatgaattgtgacaactcatggtttttgtcaagggctggtcatgcaggctgcacacgaaccaaaattccagactcccagtggagagcaggtgttcagcattgcgttagtcagggttctcctgagaaacagaaccagttgtgtgcacgtgtgtgtgtgtgtgtaaagagatttattataagatactggttcatgggattatggaggctgagaaatcctataatccgccatctgcaggct

SEQ ID NO: 31 - DNA, 1127 bp, Homo sapiens
gtccatggcataccaaaagctgaatgatgacagccagtgtccccatcctgtcctccccaactttccacaggcagggacgctccccattcttgctgcatagtcttctgttgaccccatgtacctgagtgacccccacgtacctgagtgtgacaagcactatggtgcttgacctcagtccagctgcttagacctgtacctgccacagccccacgtgctgacaccttgcgtcttgagttttgataaatctatcctttggctgattaatatgactgagtggtgtcttctgaccccatttcttatctggaacactgtgtcctgacttcatttcctgtctggagcacactgtcctgacctcatttcctgtctggaacacactgtgtcctgacctcatttcctgcctggagctctctgtgtcctgacctcatttcctgtctgtgccgctctgtcctgacctcattttctgtctgtgccaccctttgtcctgacctcatttcctgtctggaacatgctgtgtcctaactgcatttcctgtctggagctctctctgtcctgacctcatttcctgtctggatctctctatgtcctgacctcatttcctgtctggaacatgctgtatcctgatatcatttcctgtctgtgccactttgtccggacctcattttctgtctggagcactctgtatcctgacctcatttcctgtttgtgccaccctttgtcctgacctcatttcctgtctggaacatgctgtgtccggattgcatttcctctctggagctctctctgtcctgacctcatttcctgtctggagccagtgacctcatttcctgtctgtgtcactctgtcctgacctcatttcctgtctgtgccactctttgtcctgacctcatttcctgtatgcaacacactgtgcccggactgcatttcctgtctggagctctctctgtcctgatctcatttcctgtcaggagcactctgtgtactgacctcatttcctgtctgtgccactcttgtgtcctgacctcttttccagtctgtgccactctgtgtcctgacctcatttcttatctgtgccactctgtgtcctgacctcatttcctgtctggagcactctgtcctgacctcatttc

SEQ ID NO: 32 - DNA, 1190 bp, Homo sapiens
atctggcctgggaagatgcagtaagggggttgccaagaccaggagctcatgcggggacgccgaggcgcgatgcggggccttgggaaagcggccctcacccgtcagggcggccaattcggccaatgggccattctggtcaccgccagaggcacaggcaagaggagggagccgggcgcagcaccttgttagccttgcagaggtggtgccgcctgcccgccgcgcctgcccctcctcgtggccctccccctgtgccgcctcgtccaccccatctcctgtctgtgcttctaaaagccgcacgggccactcgcagccgtccacagcctctgggcctggtgacagcgatggagcctctgcagcctggacaccgcccactgtgtttcagtgtttctgtgtgtttctgtgtttctctgtgtctgtgtgtctgtgtctctgtgtttgtttctgtgtttctgtttctgtgtgtttctgtgtttctgtgtttgtgttgctgtgtttctgcgtcgctgtgtttctgtgtctctgtgtctctgtgtttgtttctgtgtttctgtgtgtttctgtatttctgtgtctctgtgtttctgtgtttgtttctgtctgtgtgtttctgtgtgtttctgtgtctctgtgtttgtttctgtgtttctgtgtgtttctgtgtctctgtgtttgtttctgtgtttctgtgtgtttctgtgtgtttctgtgtctctgtgtttgtttctgtgtttctgtgtgtttctgtgtctctgtgtctctgtgtttgtttctgtctgtgtgtttctgtttctgtgtctctgtgtttctgtgtttgtttctgtgtttctgtgtgtttctgtgtgtttctgtgtctctgtgtttgtttctgtgtttctgtatttctgtgtctctgtgtttctgtcttcgtttctgtctttctgtgtgtttctgtgtgtttctgtgtctctgtgtgggcgccagtgtgtccacagcgcgcgtctgtggggacgacacaggcctcagacgtccagcgctgcagaacagccacacacagaccctgggtgaggcccgggtcgctgtgtcttcaccctgatccccagacaccaaccccgacggggaggccgagactgccaggccgatgccaggccaggcctccgaaagtcaggagggagcaggatgtgtctgcgcggtggtggcagctgctgcctcag

SEQ ID NO: 33 - DNA, 1155 bp, Homo sapiens
agcccaactgctgccagactgggtctttgtaaatgaaatcaaatacaagccacatacaatttcacgtcctgaaaccatttttaagtgtagagttcagtggcattgggtacattcacaaagttgtgcagccgtcatcatcctcatttccagtcgctccccatagcccctccccagcccctggcacccccctttctgctttcagtctctatggacgtagccactccagggacttcgtagaagtgtagtcacacaggatttgtccttttgtgaccggctgatctcacttggctcatgtcctcaaggttcagccgtgttgtcacacatgtcagagtttcccgccttttaaagactgagtcatcctgcgtcgcatggctggcccatgtctcccttgtctgttcctccgtggacagtcccagctgcttctgcctctgccacgctctctccagcagtgccctcgctctgagccttgcttctgtgctgcctgtgactcatctgcccaggggctacgggcctctttgggggttcaggacaccctctttgacctgtcttctctgtcccctcctgctgcggggctcccggcggggctgtgtggggtctgatctgatttcttccctgttccccagcagatgtgcactgggtgccttcttcgaagatccacgtgagtcagtaatggacaatgttgcctttttgttagattttactcacttttcatttgaggcttaagccccaagggatttccagggctgcagcaattcctgggtcactgtccccaccttgtccctgattggatgaggaagcagggggtggggtgagaacttcaccagcgggattgggggctctttgctgagtacttgaggacagtgactggcctccactcacacccctaaaattgggtatgtcccctgagagagccagggacatggctcctgcagatcctggggagacacgctgaggggcagcaacctagcccccagccccactcgctcctgaccctcagcctccaggcagcctcaaggggaggatggctacaccccggaccccagagctcccaagaaagaacggatccttgaaaatatccgcaaaacaaggccttttctgaaaacaaatggtggcagtgtttggaaatgagaggatggctggaggagtttctgcccc

SEQ ID NO: 34 - DNA, 1132 bp, Homo sapiens
cgggccctcccttctggtggtggagcaggtccgggtggtggatctggaagggagcctgaaggtggtgtacccgtccaaggccgacctggccactgcccctccccacgtgactgtcgtgcgctgacgccagggccgcctgtccgcgtttgtttggccggttttgcggaggtttctatgcggcaatgctgaattatccgttagattttcaccccagtttttttgttggtttttttttttgagatggagtctcgctctgtcgccaggctggagtgcagtggcgtgatctcgagtcactgcagcctgtgtctcctgggttcaagcgattctcctgcctcagcctcccaagtagctgggactacaggtgtgtgccactaagctcagctaatttttgtatttttagtagagacggggtttcaccattttgaccaggatggtcttgatctcttgacctcatgatctgtccacctctgcccctcaaagtgctgggattacgtgatccacccgcctcagcctcccaaagtgctgggattacaggcgtgagctgtgcctggcccaccccagcattttttaagatgtatgtattcgttgttctgtttttccagatgattctgtcgtaaagtgatgctatgttgtcgttacaacatcaaagtgattttacggtttttgatgggattattcaagtgtcagaattaactgttcaaaatgttctgaatcatgtagatacatggcaggtaactgtttatgggagaaaagtacagtgctgttacgtggcactgtacagtcatgtgccacgtaacagcgtctgggtcagtgacggacacttacctgacagcggatccacaatattctcgtgcagtgtgtttggaatcctggtctgggctctcgtcgttggccttgtagatcaagtaggggaagtgagtgatgttcagtcatgctgctgggacacttggttttccagatgaaaacacataaataaaactacatgcaccatcgaggcttgtgtaaagactctgtgatcacacagcagcggctaagcacacgtttctcatgtgtcactgagcgacacgtgactgtcactggttcggagacccgaaaacttgggaagccaaccgatgtgcgtttccttgaacgg

SEQ ID NO: 35 - DNA, 1224 bp, Homo sapiens
cgcgtctcacatgcataataaattgtgcagtcagcgaaaggctgaacaaagactcaaaagaatgcaccctccggtctcttctctacctgtgacctgaaagccctctcctggaattgtccagcctttctgggctgaaccaaggtacactcgcacgtgttgattgatgtctcacgtctccccaaaatgtacaaaaccaagctgcatcccaacttccctgggcaccatcgtcacgatctcctagggttgtgacactggcgtgtccttaaccttggcaaaataaactttttacatttcattgagtcctgtctcagatatttttgggttcataacccccaccctcacccctacccgcggagagagcgagccgctctccagcccctccccggctctacgcaggagaggccactctcctctatggcacgcgcggcggcactctagcagccaggtggcttctctatgggcttttccggcacaggtcggaagtggcgcgcgctgccccggaagcaccctggtgggtgggtgcctgccagcagctgaggcgccatggcggcggcagcggtgtcagagtcttggccggagctggagctggctgagcgcgagcggcggcgggagctgctgctgacggggcccgggctggaggagcgagtgcgggcggcgggtgggcagctgccgccgcggcttttcaccctgccgctgctgcactacttggaagtgagcggctgcgggagcttgcgcgcgccggggcctggcctggcgcagggcctgccgcagctgcacagcctcgtgctgcggcgcaacgcgctggggcccggcctgagccccgagctcgggccgctgcctgcccttcgggtgctcgacctgtcgggcaacgcgctggaggcgctgccgccgggccaaggcctgggccccgccgagccgccgggccttccgcagctgcagagcctcaacctcagcggcaaccggctgcgcgagctgccagccgacctggcgcgctgcgccccgcgcctgcagagcctcaacctcaccggcaattgcctagactcctttcccgccgagctctttcgccccggcgcgctgcccctgctcagtgaactggcggctgctgacaactgcctccgagaactcagccccgacatcgcccacctggcctcgctcaaggtcagcgggggctgcccgggcggggcgggatggggccttggagtagccctggagaaggaacccctc

SEQ ID NO: 36 - DNA, 1196 bp, Homo sapiens
ctgctggccactgggaggggctgcagggaggaggagcaccagccacactcccttccctgccctgcccttgcaggggaagagggaagccaagcccaggctctgcattagcaagaggcagagaaaggtgagtatcctggagaaggtttcacaaagctacttttttctttttgcagggagagtccctataacataattggacatcaaacaattatgatgtttgatatgagaaggaagcagagtccctcccatcctctgacacgtgcttgttacctgcaggcatatccacggggacagcttcaccctacccttccggctggggagacatcgcatttggaggtgacttcatcctgggaaatgctgtaccgcatgataggggccatttgctggaggagcaggggggctttcagacagcaaagagctctctgttggtgccctctgcaccttgggcacaaatcgagattggattcctggggaaactctttggaatatataaaacataacttactttttaaaccaatgacaggtagttgtatcgttatctgactggaaaacagatggtacattcaaattgcgtatttgaaaaggacttgggaaagagactattgacagagaaatgggcagtgtttggagaattactgggattcagcagccagcgtctggccctgaaaagacagaggagagagcagtttctagaacccggagatacagacagaagaatggagaaggtgcctagcggggagctgagattctcattcaggggtctctgccagcctccaggagcgccaggagggagccggtgggataaattccccagcctctctctttcccctgtttcctgcaagtgtgctctgttggccaaacccagcgggaaaggcaagaaccataaatgcggggcaacctccccaggcacacagcagagtggatgagtgggaggctcagcagaaggcatccagcaagatgaggtcttcaggttctcccaaccctggaccatctcttctcagattccttggtggagttttcttcctctaaagagctgacgttctcaggaccccaacctccgcccttctttcactctgcaggttctgattttgtcttagattttacatcaacacaaacacccaggcaacccctaagtctgtgtctcccacttaaccccctcctgagtcagaataccctactttttttctttttttttt

SEQ ID NO: 37 - DNA, 1274 bp, Homo sapiens
gaatagtgcttccagatgtggtctcccgtgtggggcccagcaatgggggcccctgatgccaagagctctggaggttcttgaaagaggggacacgaaggaggagtgactgggaagcctcccatgccaaggaggtgggaggtgccctggaaatagctgcctcatgccacttaggccatgactggatttaatgtcagtggtgtgccacagtgcagaggctagacaactgaaaggggctaccaaggctgggaaaaaaatgcaattgttgctgtgagtgactttgaaagactctggtgccttgtggtgcccttctgaaattcaaacagtaatgcaaaagtgtctgcattagaatttacggtgtctaaaattcatgtttttaaaagagcttgcctacagatggtttccacacttgaaattgtgccctgcgagttgcatagctggaagttcaatgctcagtcctaccttggctcccattaaacatttggtgctctgtggattgagttgaacgtgttgaggctttgcaatttcacttgtgttaaaggctctggcatttttccatttctatgcaaatttctttgaagcagaattgcttgcatatttcttctctgccgtcacagaaagcagagtttctttcaaacttcactgaggcatcagttgctctttggcaatgtcccttaaccatgattattaactaagtttgtggcttgagtttacaaattctacttgttgcattgatgttcccatgtagtaagtcatttttagtttggttgtgaaaaaaccctgggctgaagttggcatttcagttaaaagaaaaaaagaaactagtcccagatttgaaaacttgtaataaaattgaaactcactggttttctatgtctttttgaactcttgtaatcgagttttgatcatattttctattaaagtggctaacacctggctactcttactgtacgaggctttgttttttttaaggactggcatgtgaagaaaagctttgtcctcacgaattagttgctgtaccaacagttacgttggtctttattaggcttagaagaaaagatgtcctttatttccacttttcttcccttagttgtgctgttttgccgcagtgagattcaggggttggctgtcactgaactctgtgtagaatttctccagatccagagtctggggatcaactttgccagcaaatgccgttttctgatggggaataggtagtgtcaacttgaattccatcacaaccatgacaccagctgcgcccaaagcacactgtagac

SEQ ID NO: 38 - DNA, 1149 bp, Homo sapiens
agtgttgtaataagattctaggttttagccttaaccttgtccaagctggagtggacaggcacctagaatactttgcaactcccttcatgagaaggtggatgagacaggattaagggagatgagctaagacggatcaggaccctactctgaacatgtaggacaaggattgatttcatatgaaaattgtgggtatgcaaggcattttgtatgcctgcactctaattttggaaaaatagtatttttttgaaattgggaatgttagggcaaacaaaaggaagtgttcattttattgtggttcataaactaagagaccttcatgcctgtagagattggggagactggaaagtttgagtgagtcaagagtgctagaatgatttccccatcaaaagggcatgaccccaggccccaagcttgtacagcagcatctgccccattatacctctggcactcaggcagtgatgcctcttggccctctggcaaagggagcacacttccgttagttttgtatttgtatggacttttatacctatgacgtttctggttctgttaatcttgtttttccgactgactgaaacttcatctctgttatcatttgtgtattttcttagaaaaagcttgtggtgaaggggggcaaaaaaaagaagcaagttctgaagttcactcttgattgcacccaccctgtagaagatggaatcatggatgctgccaattttgtaagttacatccttattgccactcgggtggtcacgaacattttgagatactgttgagaaaacctactggggtacatttctgttttcaggcttataggcagcttcacaggtctggctgtatcatctcaccctgggaatgtgggcagattacttgtttgtttccaagtcttgtttcttcttgtgtgtgcaacagttgtgaggagtaaaaggagatgggcttagaataagcaagaagggctctagcacagaggtgttagaggactatcttgtttttctcctttagtttccacaaatgattttacttaaaagttacccagaaacaagccaggcacggtggctcacgcccgtaatcccaacactttaggaggctgaggcgggcagatcatgaggtcaggagttcgagaccagtctggccaacatagtgaaaccccgtctc

SEQ ID NO: 39 - DNA, 1122 bp, Homo sapiens
gggtattcctagctcaatgcttggtgttctagttcaacttttatcctgcagcaagtaagcctagataactctacacgatttggctgagtggctttgtgtgaccgtggccccaggccaaggggatcatggccctggctggctttcccgggggtctcagctcctgttgtcagtgataggcggctcaaaggagcatcagtttcttttgatccaagaagtgcttactgaatgcctgccctgtgcgtggccttaaacattgagaagtgctgctctccgtttatttgggatttgattctcattttaccatagcttatattctcaatttcaatgccagtctcagaactcttgttttctgtgttctgttctcaaaattacattgtccctcatgtcatttcaaactgttttccaaagggatttgagcatatacaactacaaatccaagcagattgactctcaaaaataatcttaaatactgcaaatagtcccaactaagattcagtcagtatgtttgttttgcaagtttgggagagtaagttggctttgagtcacacatcgaagctttaagaggtgagacgctggcttcattctggactagacaggaacttggcctcagcgtgagatcctgccatgcagtgttgcggtggcactgaagaagtgtgaatgtgaaggcggcgtcggcgcggggccagagcaccactctgctgccccaccacgcggcctgtgaggagccactaaacctttccgtgcctagacctccccatctgtggaatggggtcaataccacctacctcacaggggtgttgtgaggactgagaagaacaatgtcaaatgtttttaatactcagatgtgggagcgacatcaatgaaatctgtactgtatgaaagctacacaaaaatgggcagacatttggttaattgtgccagatacctaaaatgtatgttcagaaaagcattttatcaactcagaaatatgacttatttctagatttcatggcttaatgaattttttcattgttatatataccaaagaggcttacgggttcattgattggtttgaaaaccagacagacggccgggcgcggtggctcacgcctgtaatcccagcaatttgggaggccaaggcgg

SEQ ID NO: 40 - DNA, 1153 bp, Homo sapiens
aaaaaaaaaagttacatagctttagctcttaccatttaggtgtttgacctatcttgagttaattgttatgtgtgatgtgcggtaggggtccagctccatttgcacgtgtggacacacctctttataggctggggagcaggcattagaggtggagctacttgcttgccgtcacagctggcaagtggaggccaaagacagccgctgcatcctttctttgaactcttatacctgagggtcatttatctctgacctggaggacagaaacagaaagcccttgagcaggctgagcgcagtggctcacgcctgtaatcccagctctttgggagaccgaggtgggcggatcatgaagtcaggagatcgggaccatcctggctaacacggtgaaacccctctctactaaaaatacaaaatattagccaggcgtgatggcgggcgcctgtagtcccagctacttgggaggctgaggcaggagaatggtgtgaacccgggaggcggagcttgcagtgagccgagattgcgccactgcactccagcctgggcaacagagcaagactccgtctcaaagaaaaaaaaaagtccttgagcaataataaaactaggactctagggacattacttctcaggggcaggccacgccgtgcacctgtccacatctgtttccctccccttgctgaacaccagcccctgccctcgccagcctttctgtcctccttccctcctcctccccctaaatgttcatctgtggcttttgcctgtcccatggcacatgataggctctcgctgtctgggcctccctgggggtaggtccccacaggagaccttaccagggccatgccagacagctcagatgtctctgtgccctgccttgaatcctttggcctcagggctggaggttcagctatggcaggtcaggggctggcagctgagctgtgtgaggctgggagcttctctgagccttgggagagtaaaggaaaccaagtccctgattcaggagggccagagcattcctcttgctggctgtgtgcccatgagcccgggactgggagaaggcccaacggtacctgcccccatgggacttgttggctgggacctgggaaggcccgtggtctgtgtgctttgctgtaaaatgtatcactgggggactggaccatct

SEQ ID NO: 41 - DNA, 1194 bp, Homo sapiens
gacagagtaagaccttatcttttaaaaaagaaaagaaaaatttaaacgggtttgatagatataaatttggacccaagagcccttccttttttttaatcctgaggttttatgctgaggaaatttctttcaaatctggaaaacctcggggccaggcgcagtggctcacgcctgtaattccagcactttgggaggccaaggcaggcggttcacgaggtcaggagattgagaccatcctggctaacacagtgaaactccgtctctactaaaaatacaaaaaactagctgggcgtggtggtgggcgcctatagtcccagctactcaggaggctgaggcaggagaatggcatgaacccaggaggcggagcttgcagtgagccgaggtcacgccactgcactccagcctgggcaacaagagcaagactccatctcaaaaaaaaaaaataataatctggaaaacctcttctgggggctcttataaaagtagatttgtccaaattgacttctgatctgaggccagagacaaccacagggcagagctggagactgggctgttttgaaggaagaaggactggcagaccagctcttgggaaagctccattattgcctgtgggaggctggacctgaacttgcacctatgaacaaccctgccatttagagctttttcctgggggtgccggcggctggtgaccagactgccattctccacgttctccctggtgcttccgactctgtcctctaggttggaagtggtttgtgtaaacgggtgatgggaccaggtcacatcatttctgcatttaagacagcaggatacttcctggggctgaggttcaaactggtattgtgaccaccgctttgacagaattccatcttcccagcatgatcacattgtaagactattaggatgtgtgggttttaacacttatatacacttatacaactgttggttatcattgtctttagtattttacagtggcccctcagcacctcttagacccaacagcaaaggacttaaaataagcacaggaaaccttgctatggtgattagttttgatacctttgagacaattgagtctagcttcttagttgccccttatttatgttgaaatctggctcattcatatgatgttttactgtgctggccttgtaaagaattttaagacaatccatcaccatcaatgttttgcctttctccact

SEQ ID NO: 42 - DNA, 1134 bp, Homo sapiens
tatctaattttgttagatattcttgatttgccctcagtgattgataattgcacacagtgtagaatggttggttcaacagacttttttctcaaattgttgaaggccttgttctgttgttttctaagatccagcattgccgataggaagcctcacactaggctgcttctcttttttttttttttttttttttttgagacacagacacagtctccctctgtcgcccaggttggagtgcagtgccacagtcttgactcactgcaacctccacctcctgggttcaagcgattcttgtgcttcagcctcccaagtagctgggattacaggcgtgcaccactgcgcccagcctgcttcacatttctttatggtatctttattttcagtgttgatgaattgcaagaggacggggcccttccttcatcctcttctgtggtgagctggttccaactgagccttacctgcctcagcaagggcctgctcttcctttccttgggttgctttcccagtcctggacttcacagacctgtcttctccctcctttcaactctgtttgcatatgttctgtccgtgtgtttttgctttatgttttcagaggttgccttgacttgattctacatcactcacctggtctagagccagggcctcctgctgaatgtttcctgtgcagtcatgtcttaccaggcattttctttttctctggagtctcctgcggaggcagtgaaggctcgagagaaagcagaaactgaaaatagacgtggataacttcaggaatacagttggcaacacttgttgatgggttggattttggggcaggagacaaagggaggaaacaatttatcttctctggctcacaactgtgtgaggcttgattaatttagtactgaagaaaaaaatatgcattttttcaccttaaagtttaaattgttgatttcagagtccaactccccagattaaacctgaatatttagccttgaggtctgttggcatcagaagagagaaaaaaaggaaaggccttcagttaactgagagtaccctttcagccctggaagagttagtcaatgtttcctgtggtgagtaatacacattgatcaccctgaatgtctgtccaccagacccccagaggaagattagtcataa

SEQ ID NO: 43 - DNA, 1081 bp, Homo sapiens
tttagagaagagggcatttagactgcattttcctggttaaagaaggttaaagcaaatgtttattgccttttctagtgaactaactcgtagagatgttctcagcaggaagacagtcttagcactgtcacttagcagattgcacttaagtcccttgtgctggccagatggcgtggctggttgccttaatatgtcccaggacccctgacagggctgcctggcctctccctcgtgctcctcaagagcccagtccatacactgtggatgtcattgctgtcgggttaggaagtcttgtcctagaacgccctggctggtatgaccacagttcatggcggctcttctcgcttgggtcatggtcatcttccagcacctgctgtgctgggaaggccgaggatgggggcccagcactgtccaggcctgctggggcctggctgggagtcctgtgggcagcatggaacatgcagctgggcttcctgtgaccaggcaccctctggcactgttgcttgccctgtgccctggaccttttcctgcccttctccttcctctgctcccttggggctaccccttggcccctcctggtctgtgcaaactccctcagggagcccccctgccctgtagctctcgcttaacttcctaggggctgctgagcccacccagaggttgttggagttcagcggggcagcttgtctcccttgtcagcaggggcgtaagggctgggtttggccatacaaggttggctacgccctcaatccctgaccgttccaggcactgagctgggcacccacggaaggacatgctgtccagactgtgatgactgccagcacagggcatctcgggcttggctggtctgcgaggccttgcccctgtggaactctgggttcctgttttctcagtcttttttgcggctttgctgtggttggcagctgccgtactccaggcttgtgtcggccactcagatgagggctgtggtgcgagccagtgcaggagagctgcgcttgggattgtgccctctcctgtgtctgtcctccggacctacccaggtctccaccatcaggaccctgtctttgggtttagaagaccaagt

SEQ ID NO: 44 - DNA, 1101 bp, Homo sapiens
taacgggggcggggacctcgaagcggctgctcagtgtgtgggctgccagccaccttccaccttcctcagctgcccacctgggagcagagacgccaactagcccttgacccatgattcactcagagcccatgatttgtgccctaaaaggggggctggggccctttcacaggtagaattagagtgagcgcgttggaaactgcggcttgagtggcgggggatgaaagcagacctctacgttccagcagcagttgattttcagcagcgggtgctctgcctcgcctgggcccagccagctgctggtccgggtgactgctgagccccatcagtagaaaggtgcatgggaatggccaccttctgatcacctgcgtctgtcttttcctttacagcccacaggatcgatacagatggataaactgccaagaaccagatttttaaaaggccgcaaaaaatcttttcctgggagtctacaaatttggaaatgaaaaaacccagacatcagatgtttttattttatattattattatagaaggtggtaccattatcaattatgtgaagggacatgcagacaccccagcttttgagggtgctgggggtaggactgaggcagccccactgggaaccagactgcagcctggcccatggctgttttcccaaggatcagttcctggagggaagggctctggccctgactccgctgtgtcccgagcacacgtgctgaccgcagcccgccgccctgtagttcttggctgggtctggaggtgtctgtggagcaccctgccctcaccacaggagcgtgagccacttctgcagtccacgctgaacatgggaaacaacctgaaaagcaggcaggcctcccggtcagggagcctctgctgtgctggcttcccatgaccacctcctcttgctgaaatattactgcttgaatctggagcagattgcgggtttataaaactgctttttatctgagaacaaacgggtttggaaattagtcgtcttttttccccactcccagagctgctcaagtcattccaccggccccctcggcttgggacagggtagtgtaactcccgatcccagggcctagccctgacacaggtggc

SEQ ID NO: 45 - DNA, 1170 bp, Homo sapiens
atgtcacactcctagaactgtatatccctgtcccttctagaacgacagcagtgtcttcatttcctatatggtgggtgcagtgatgtctgtgtgagctcagataaaagaattggtggagggtaaataatacctctttcttccagaggaagatatagctgaaggagtcctagaatggagcacatggagtttattttatttatttatttattttggagacagggtcttgctctgtcttgcccagcctggagtgcggtggtgtgatctcggctcactgcagcctctgcctcctgggttcaagctattctcctgtctcaaccttccgagtagctgggactacaggcgtgtgccaccacacccagctatttttgtatttttaatagagatggggtttcaccatgttggtcaggctggtctcgaactcctgacctcaggtgatccacctgcctcggcctcccaaagtggtgagattacaggcgtgagccaccacgcctggcctattttattttactttatttttgttagagacgaggttttgttctgttgcctaggctagagtgcaatagtccgatcatagtccactgcagccttgaactcctggggtcaagcagtcctcctccctcagcctcccgaaaaactaggactacaggcgtgtgccaacatgcctggctcattgtttagttttttttagggataagttatctctatgttgcctaggctggtctcaagctcctggattcaagcagtcctcccaccttggcctcccaaagcactgagattagaagcatgagccacttcagcaagcctggagtatatgttttttgttttgagacaggtctcactttgtcaccccggctggagaatagtgatgcaatcttggctcactgcaccctcaacctcccaggctcaggtgaccctcctgagtagctgggactacaggtgtgcaccaccatgcctgactaatttttgtagagttggggtttctccttgttggccaggctggtctcttaactcctgacctcaggtgatcctcccaccttggcctcccaaagtgctggcattacaggtgtgagccactgtgcccaggcacagtggcatgaataactttcttatcaaacatgtattgtaggctgtacaaacatgtacaaacatgtacaggagttcgagaccagc

SEQ ID NO: 46 - DNA, 1217 bp, Homo sapiens
cgggaccccacgcgccagcagcggcttccccgggaacgtccttcagccccgggagcacgcgggaaaagccccagcgtgccaatgagggagcgccttcctcatgacggtcacgctcgggggcggggcttcccttcgccgctcccgagttccgggaaccccctttgattggtctggacggcctgggaaacactgtagtgacgcccaatcaaaacgccacgtctcggcctcgaggaaatattccgtgtcgggcccgtcctgattggacagttctttcgggttctggccactaggaagctttgtttaggtccggaaggcgggctttcctgggagtgggtggggagggggcgttgattcttgaccaatcctttcagtccgttgggtggtgaccagccaatgggccggatggataggacgctcctcccggagagtagtgagacccctggtgcggggcgattggcggcgggagcgatgagtggcagccgcacggcccaacgggagctgtgcgtgggccgcggggcggggccagggcgggtgcgcggcggcggcggggtggctgggccggcggcggcggcggtacgaggcgcgcgctcggggtcccggtcgcgaggaggaggaggatgtggcgcgcggaggggaaatggctgccgaaaacaagccggaaggtaagagccggagcgcgaggggctggggggcggcgcggcgggcggcgggacccggccccgccggacatcccgggcatcggcggcgccgggcgggagcgcgggggcgcggcgggcgggcgggcgggcgacccggccggggagggggccggcggggtgggggggcggagcgcggccgagtcctgaggtgactcgcggggccggcggagcgcggcgccccacaccccacccccgggggcgggctggggccggagggggcggggggctcgcggggcggggaccgggcccagcgaggaggaggagccggcggagggccggcgcctcccccacccggaccgggcatccccgccgctcccgagcccgctgcgcggcccccgcacccccggcgctgggtccacggtgggggccgcggggcggaaagtttatccgcctcgggtcctcctggccccgcgccccactgctccgggccggtccccgtcgggcggcagcggccggcgctcagccctcgccggccccctgctctccggcgggcagggccagatgtactctctccggcac

SEQ ID NO: 47 - DNA, 1197 bp, Homo sapiens
cttagttatcaatgtactgtataaaaatcaatactggttgggtgcagtggctcaggcctactctcaacacttcgggaggctaagccaggaggattgcttgagttcaggagtttgaaaccagcttgggtgaacagtgagaccccatctctaaaaacataagattaaataaataaataactctagcttgtctatataaaatacttgccttgttacagaataaaatggaagaaaaaaattccatttaaaatagcaactggggctgggcgtggtggctcatgcctgtaaccccagcactttgagaggctgaagtgggtgaatcacttgaggtcaggcgttcaagaccagcctggccaacatgacaaaatcccatctctactaaaaatacaaaaaattagcctggcatgtggtgcgcacctgtagtcccagctactcgggaggctgaggcaggagaattgcttgaacccgggaggtggaggttgcagtgagccgagatcgtgccactgcactccagcctgagcaacagagtgagacttcatctcaaaataaataaattaaaataaaataaaatagcaattggctgggccgaaggtagtgagttatctcgattgattgcccacagtcagttacagatggaactccttcctctactctttccccaaccctcactgctgcacttgactagtcttgaaaaagaaacagatattggaacaatgtttaaaaatcaagggaaaagcctaatgagacattaggccttcattacaggacccgaatgaagaggctgggtcacccagtggttaggggctcgggctctgggagctgaaagtccacgtggcgcaaatggctctacttccacaagcctcggtcgcatctcctggaaaatgttgccgcttctcttcctctttccacacgtgcgctgctgtgggcgagggaacttctaaaggggccatgccgggcgagtgctgggcttggcagagaggaagaaggacgtcggtttttaccttacgcccgtctatgagaatgcaccactttgatcattcaagaaaattagctagtaaagttcatctgggccgggcgtggtggctcatgcatgtactcccagcactttgggagaccaaggcaggcggatcacctgaggtcaggagttcaagaccagcttggccaacatggtgaaaccccatctctactaaacatacaaaa

SEQ ID NO: 48 - DNA, 1147 bp, Homo sapiens
ctcccagactcctgcatccaggcccccaccttctcggcttctggtttttctttctttttggtagaacacaacatctaccattcagttaaaccttctttatctcctcctttggcatccatttttccaaagaagagtcgagtcctctgaggtctgtgcttgaaagccgtccgaaggcattcttgttagctttgcttttctccccatatcccaaggcgaagcgctgagattcttccatctaaaaaaccctcgacccgaaaccctcaccagataaactacagtttgtttaggaggccctgaccttcatggtgtctttgaagcccaaccactcggtttccttcggattttcctccctttgttcggggtttggtttggctcctctgtgtgtgtccgtatcttgttcggtgtcctcgaggttgagcttcactccactgcggcagaggcagcgtgcacactcggatttgctacgtttctatatatcttgaagctaaatgtatatatgagtagtttgccatgagataacacagtgtaaacagtagacacccagaaatcgtgacttctgtgttctctccatttgagtattttgtaatttttttgaaatatttgtggacataaataaaaccaagctacactacaacccttgggtgtctcccgtgcactgtctcattcctggagagtgggcggggatcctggctgttaccccaggtggggaagggacagagggagagtcggctgttccctgctgctcgggaccctgtttgcatcccagagtggcttccagaaacatcctctgtctgggaagaggctttccctggtgagggtgctgtctttctttggaggctccccaagcagcgggatgggccctaagcaggcactggcattgggactaagagcatcttcccccaccccttgccattcaccccacacctctaatccgtgggcgttaccagcatgtatgggcatgtggcaccctgcctgctcaggagacacatcggaaccaccccatcctagcggcctcctgcctggcccccatctgcctccccgtggcctaccagtgcccccacaccccacccccagccacccagctctagagctgcactccaggtggaggatgcatcccaggcctaaggggctctaaccctccaaaggg

SEQ ID NO: 49 - DNA, 1240 bp, Homo sapiens
tgagccaccaggcctggcctcaactatattttttaatgtttacttaatactcatctagttttggtattgaccatgacttatattgctattgactgtcttaagagtaacactattctaataggatagctcacttaattttttagcaaatatccttaggtgaggtatcatttgcatatgtcttctttgtcaacttgttatattggaaatgtatgtgtgtttccttctttatcaatagctgttatcatctaaagacattattttgtttttttgtttattttatgcatatgtgtgtgcttcagttttactcttggtatcatgctggcactggtttactttgacactgttaagcagatattaagcagtctattgtgaaatcttctatggtgaaatgatcctgacatgtgaaataggtcagtttaaatgactcatggttttgttgttatttttctgctgtccaaggaaagagtctcagtaaaacattgtatatgttcctaaagactgcttattgagatagctctttataattaatacatgccttgattgtgacttactcatccctgtcttacaggccaaacttccagatctgcaaccatttccttctccagatggtgatacagtgacccaacatgaggaactggtctggatgcctggagttaacgactgtgacctccttatgtacttgagggcagcaaggtaataggaatctacccccatcctgctttctgaattagaccatctgaactgattataggcagtaaactttgcatttcccctgagattttatttctatattgggcgttctctgactttaagtttggttacaccctctgtaatcgggaccctggctcttcttaccagagaaaaatagtttgaagtaatttttttcatgatgaagtaatgtttttcttcttggtgtttgccccacatcaaattttggaacttttcaagaggaaaacagcttaggccatacatacagttaccaaaacctctcaatccagttgagtacttcagtcattcagctcatctgaaaaccccactacagaggggtgggggtgaggggagggagagcattaggacaaatagctaatgcattcggggcttaaaacctagatgacgggttgataggtgcagcagagcaccacggcacacatatacctaatgtaacaaaccgacacgttctgcacttgtatcctggaccttaaagtaaaatttaaaacaaaaacaaaaccctctacagatt

SEQ ID NO: 50 - DNA, 1148 bp, Homo sapiens
tcatcttttttccaaaaggggcatcaagccgcatttttagatcacaaatatcaataaacctatgcttttataactgcctacgatttaaatgcctttttgtttccataggcatatattagatttaatgatcctttgcaagttttattgagcttcttgttctttcagggatagtgcattgctctttattacttacaggcactgttaggactttcagccctgcctttcttggggtgtttcatgttttggggtttttttgttgattttacagacagggtctcactctgtcacccaggcaggggtgtagtggcaccattctggctcactgcagccccaacctcctgggctcaggtgattctcctttctcagcttctcatgtagctaggactataggtgtatgctacctaaaatttaaaaattttttaaatttttgtagagacagggtctccctatgttgcccaggctggtcttgaactcctggactcaagggatcctcctgtgtcagtaccccaaagtgctaagattacaaagccacttggcacagcccttgttccgtactagttgattgaaaaaatatctgaacagctgggtgtggtggctcatgcctataatcccagcaccttgggaggctgaggagagaggagtgcttgaggccaggagttcaagaccaggttgaactggtcagaccagtctctgaccagaccctgtctctacagaaagtaaaaaaaacaaaaacaaaaacgttaggctgggtgtggtggctcacacctataatcccagcgctttgggaggccgaggtgggtggatcacttgaagtcaggagttcgaggccaacctggccaacatggcaaaaccttgtctctactaaaaatacaaaaattagccaggcgtggtggcgggcgcctgtaatctcagctacttaggaagttgaggcaggagaatcgcttgaactcaggaggaagaggttccagtgagccgagatcacaccactgcactcaagcctgggcaacagagccagactccatctcaaaaaaaaaaaaaaaaaagccagatatggtgttgtgtggctgtgatagtaccaggctctagtaccagctacttgggaggctgaggcaggaggattacttgaactcagaagttcaaggttacag

SEQ ID NO: 51 - DNA, 1095 bp, Homo sapiens
tggaattttaacaggttttgtgtttgaactcaggagccttttaaattaaacaattggggcctgtaatcccaacattttgggaggccaaggcaggaggatcacttgagctcgggagctcaagaccagcctgggcaacatagcaagtagttgtattctgtgaagagctctgtcagagaacactaatctttctcccatcaagggaggctgaacccagtgtttcaactatgacaggagggctaagaaggtcctgggggtggaagagttcaggggagggtgagggttctcctctgtgctcttgacaaagcccaggcatggagggctttagccattaacagcccctccactgctttcctgctggcaccgaggggtaatggcattgggggttatggaaccagaaaatgggatcatgccatctgggttgttccttggcttccaggtgcaagctggcccaggccaatggttggggcgtcatggtgtctcatcgttcgggggagactgaagataccttcatcgctgacctggttgtggggctgtgcactgggcaggtaagaatgagcgtctcctcctttcttctctgacctcaacttcctaggaagacccaaaaccagtgaggctccatgtctgtccccgttttgctcatgtcccctgagtcagtgctcttgtttctgaggctgaacagaatgggggcatgagcgccctgcctgtatgttgtggcccccactttcctagcatcagatcctctagaaattctctctctgacaccacaccctctccctgccagaaatgcctgcaaagcttgtccgctgtaagcaaatggcctttcttttctcctagatcaagactggtgccccttgccgatctgagcgcttggccaagtacaaccagctcctcaggtaaggagggctcctgagaacaaggggcctgtggttcactaggtgggggcctgcactcagtgtaggcactgccctcccccaggagctcctggctctgggaacatgtacaggtgcaggtgcacagtgcagacagccaggccctgagcaggcttaggtcaggacagagttaggcctagactccccctacccacccactgcagcg

SEQ ID NO: 52 - DNA, 1099 bp, Homo sapiens
agtttggggagccaagtgtctgtccgtctgtcctgctggcagggcagcttagccatggacagcagaccctgagcctgagctctcaacggcacagcctggcgggaggatcctgccatcccgggctgcctccactgggctttctcttggaccccgcttctgctctatttaaggcctgtgccttgggacagctgatctcagctgcttactgtaactgtatcttggccaggacagctgttcctgggcactaaatttgggagcatttgtcagtgagaagggctgctttcttggaaagagagctgaatttcccattttgtatgcaccaagaactctgacccatggtttcttgccccaaagcagaaaaaaagtaactgatgtcagaactactggttggggcctgaacacctgttgatctttgtgttacagtccctgtgtagcagctgttgaagggaagttttctctgtacctacctgttttccaaacctgttgtcaccatctcttcccaggcctggagctgctgaagactgctattgggaaagctggctacactgataaggtggtcatcggcatggacgtagcggcctccgagttcttcaggtctgggaagtatgacctggacttcaagtctcccgatgaccccagcaggtacatctcgcctgaccagctggctgacctgtacaagtccttcatcaaggactacccaggtgagtgttccccgagtgccatctccctttcctgccactgacctgcagcagggcagctggagcatctggctggctggtgatggctgcaaggaggggatggggagggagtgtctgaacttccagctcccgtaggggattcaccactgggtttgcccccagttgtgcatacacagggcttcacagaggttcttgtgtagctaaggagctcgggtgccagcagcgacattgcataataagttgttcacagtcaggagcagaggcagtctgtgctccattagacaggtgagggaaccaagccttcagaatcagaacagccacttggtactgagatgtatcatgcttcctgtgagctgggaatattcattttaggctgtgtgtgtgcacaggatagagactgt

SEQ ID NO: 53 - DNA, 1183 bp, Homo sapiens
aggtcaggagatcgagaccatcctggccaacgtggtgaaaccccgtctccactaaaaaatacaaaaaattagccaggcctggtggtgggcgcctgtagtcccagcaggagaatggtcccgggcggagcttgcagtaagccaagatcctgccgctgcactgcagcctgggcaatagagtgagactctgtctcaaaaaaaaagaaaaaaaaaaattttttttgaatatcaggtgcaaaaccaggtgacaatagcctgtcagtttggttactcagaagagctttgctccttataatgaattcagcaattcctactgttggctggagttgggctctgtcttagaggggaaaagcagtggtgagtccacatagaatgctatttgtatttctagtaacagtgaaatggaggtgtgatgggggaggagatggtgcagaatacaaccctcagggcagtacagcaggagaaaagctggtgaatcagaaatgacttcattccactcggttctcttctgttctagctaagtttggtgcgaacgccattctgggggtgtcccttgccgtctgcaaagctggtgccgttgagaagggggtccccctgtaccgccacatcgctgacttggctggcaactctgaagtcatcctgccagtcccggtgagtggtttattggaacttcccaagcaaggagttgggggtttcagcttgctgttggggacccgagacctcctatgccttgatatcctaacacatgtgactctcccagcacagctctgccccttgttaagtgtgaccttgagcaggtaactcaacttgcctgtgccccaggtcctttatctgcaatggaggctcggggaggaaatgacagcagtactttccttgctaggctgtgagcattacctgacatagtcacaagtgtttctcctggtgatgatgaatttgcagttatcaaaatagacctggcgtgaactggttgcagtagcgcacacctgtagtcccagctaatcaagaggctgaggcaggaggatcacttaaacccaagagtttgagaccagcctctaggcaagaccagtatagtgaaaccctgtctctaaaaacatgagtcagagacctggtgagcatttcacagcaccctggcccctctggtgctcctcaagaagcaagtcttgggctcatctgtgagctagattgg

SEQ ID NO: 54 - DNA, 1197 bp, Homo sapiens
tgggtaagcttcggtaactagttgaatgtggggtgtagagaagggtgaagaattgcaggtgcctcgggttcccagctagtttgggggtcatcgtgaataatgacctacaggctgggggactaggtccatggaggtgctttgaacctgtcctaagtggaagtggtccaagtggacgtgtccagatggcaactgggctcaacgctcaagcaatcctcccacctcagccccccagtagctgggactatcggtgcacaccaccacccccagctaatttttaaatttctcacaaagacggtgtctccctatgttgcccaggctggtctcgaactcctgggttcaagcaatcctcccaaagtgctaggattatgggcatgagccacagcgctcaccctctgctgcttgggtgccgttgccccatcctggcttagaaagctctggccattccctgggcttcacctgcctcctgcgcccagacccatctggcattgccttccctacaggggcctctcccacttctccctctcgcccttgtggcccatctgccccctcaggagagtccctctcctcccttatagcctcagccactgtcacctatattctgctgaccccgtctcacactcttcatgctgcctggtcccgcctcggctggcccgttcctaccggctggcccataccctctcgcttcactttccaaaaccggatcccctcactcctcccctcttcccagggatgtccccttcagcaggtagccctgccatccacggtccaccctgtcacccagacacatgcaccctcagccatgccagggacagctgctgttgtgggcagcccagtgacctgtgggctccaggagggcaggacccggccggccacatggctgttgttcacggctgagtccccagtagttaggtccacagtaggttcttggacacctgtcggatgaaggagtaggtaagaccggtggcgtagtggatcctagcagggtctgggagagctcgatgtgggcccagggtgtgggtgctgggggtggggactccccgtcacggaactaaactgccaggtgttccgttctcagaccagacttccttccatgccccgtgggaggtcaggaactccgaacaagcctctgttctcaggagctgttagtgggccacttgtcattcatgcttttattcaaacatttgctgagcacctact

SEQ ID NO: 55 - DNA, 1172 bp, Homo sapiens
cataggctgggtttgactagacaggattagcgagggggaaaaagactaattacaagcagttgcgtactctggagatgctccccttagcagaagctcggtggactgtctgcagccagacctccgggcctggcggctggcgcgggaggcagaaggcggggctttcctacagggctccgtgccccgccctccccgcgccgccttccacctccggccgcgcgggggcgctccccggccggctctgtcgcttccgccgccgccccgcccacccgggctcacccctcgtcccgattggctgcgcgacgggagcgcgccgagtcagggggcgggcccgcgcccgctacaaagcggcgaaggtcacggcgcgaggaggcgcgcgtcgccgccccgcgtcccgcctgcggcccgcgcccccggcgtcaccgcctcctgcccgcctgcccgcctgcccgcctgcccgcctacccgcctacccgcctacccgcctacccccctgccggcctgccgtccttccacgcggagagccatggagggagtgagcgcgctgctggcccgctgccccacggccggcctggccggcggcctgggggtcacggcgtgcgccgcggccggcgtgttgctctaccggatcgcgcggaggtgagtgcatggttcggccccacgcggccctctgcgccgcccgccaggcccgcccccgcgccgccccggcccgctgcccccctcggccgggacccgggctgcccgcgggcgcgcggagacccccggcgcgcgccgccgccccccgagaccgggttgagactgcagtcgggaagcggctgcggagtcgagtggagcggcggggactccgggaacgtggggcgcgggcgagagcgccgcgcgggggccacaaacttcctccgggagccgcggggggctggagccggtgcgcacgggccgcccctgccctcagccccgtgctgggccccggtgcacggcgatgctggcgatcgcggctggcggttgctgctcggcatgtgacgtcccgggcgtttttctacacgcctcgcatccgcgcgtttcagagccacagcccctgcttacgctagagcagctgagggacagggaggctcagtaacttgctgttaatgagaggaatcatggtttgagccgatggaatctgcagggcagaccccgag

SEQ ID NO: 56 - DNA, 1175 bp, Homo sapiens
gattgagaatgtcttctttcctctgtcgcccaaaggttaatggctagacagatgtaaacttgtttggagcttccaaaatatacagacttccgcatgcttactgtgtaccaggcttgggacacgtgtgtgctatgcctttttgtctgcgcagtgtcttccctattaggagaagaggtgctgttggtccggaacttggtggtgtttatatcgggagcagcattgcagcccaggctcagcctctgtggagtgtcctacttcatagcacggattggggaggggaacgaattccatgtgtgtgctttcattcatcttattttgaatctaacatatgttttggcaaggaggatgtgggaaggtggaacaaaagaagcctggggttgggggtggtaaagtcacttctgggaaaaggtgattaaatacaagcttgcgtccagatgggtacatcccagagcgggatcacgagggaattttctcttcatgttttatagttggttgcttcaaacctggttttcaaggtccggtttgaagaccctaacctctcagtccttttctattgtctttgtcttgcttttccacagagttttcaggagttgaaaatgacaatgaaactgagcctgtgactgtggcctctgcaggttgctggattttttccctacattcactattgtgtttcatttaaagatgagactgattcattccacgtgtcgcatgaaacgccccagttgcattttggtcctggacaccatctgagctgcttccctgcattgcgcttccccattgcttcatggagttcccttattctgcccattctgaccccagctggagtgaggacaaatgacatctcaggcagtgcatgcatgggacttccccccccatccagtttgaccctgaccccactgcatgaggctccctgctttttcagtcttacaggcagggtttgggaggccgcctcgtgactgtcatgtggatgaaccacgagacaggaaaagacttgtttctagatattctgtcctgattgacagtaaattttaaatagacgtctctcttttttttttgttttgagatggagtcccgctctgttgtctgggctggagtgcagtggcgcggtcttggctcactgcaacctccacctcctgggtgcaagcaattctcctgcttcagcctcccaagtagct

SEQ ID NO: 57 - DNA, 1197 bp, Homo sapiens
agagcttgccccttacccttacatactgaagaaagattatgtgaggactagcaagaaggtggccatgtacaagacaggaacagagctgccaccagagaccaaattggccaaaaccttgatcttgggcttctagtctccagaatggtgacaaagtaaatttctgttgtttaagtcacccagtctgtggtattttagtatgacagcccaagcagacaaatacaccatctatatgcagatacatccaaatctctagtctgttgtatgtctgtacctctcccctgaacttggctttgttctccacttgcctacttattgtcaccacttggatatataatagatgtctcaaacttcacttctctgtaaactgaactcctgatagtcccctcaagcctactccatagacatctttctcttctcttttttttggagacagggtcttgctgtgtcgcccaggctggagtgcaatggcgtgatcatggttcactgcagccttgaactcctagacttaggtgatcctcccacctccgcctcccaagtaggatgtgagggcaacctggctgtgacatctctcaccccgttgatcaccagggttgatccggctgatctggctggctaggccggtgtctccttcctccctcactgctccatgtatatccctcccgaagctgcacactcaagtcgaagagaacgaccatccccaatagaggaggactaatcttcggtcaagggtatataagtagctgcgttcccctgctagaacctccaaacaagctctcaaggtcccaggtagctaggattacaggcacacgccatcatgcttcactatcattctcttctcaattaaaggtaatactgttcttttagctgcttaggccaaaaacttttggagtcatgcttgacttttctttctttcacagcccacatcccatccattgcaaatcacattggctgtatgttccaaatacacccagaattgagtgacatcttatcactttgctaccaccatcagggccaggtcagcatcacctgtcacctggattattgcagtagcctcccatcttatgtcttcacttgtacccttgcctctccctacattctgttttcagcttcaactgctagagagatccttaaaaatatgtcagatcatgtcactcctctgctcaaagccctgcagtggttgatgaggtctagagaatg

SEQ ID NO: 58 - DNA, 1226 bp, Homo sapiens
gtgtgaatagtcactgtaggctgggtgcaatggctcatgcctgtaatcccagcactttgggaggccaaggtgggcaaatcacgaggtcaaaagatcaagaccatcctggccaacatggtgaaaccccatctctactaaaaatacaaaagttagctgggcatggtggcaggcacctgtagtcccagctactcaggaggctgaggcaggagaatcgcttgaactttggaggcggaggtttcagtgagccgagattgtgccactgcactccagcctgggcaacacagcgaggctccatctcaagaaaaaaaaaaaaaaataggctgggcgcagtggctcatgcctgtaatcccaccattttgggaggtcgaggcgggcggatcacgaggtcaggagatcgagaccatcctggctaacatggtgaaaccccatctctactaaaaatacaaaaaaaattagccgggcatggtggcaggtgcctgtagtcccagctactcgggaggctgaggcaggagaatggcgtgaacctgggaggcggagcttgcagtgagccgagatcgcgccactgcactccagcctgggcgacagagcgagactctgtctcaaaaaaaaaaaaaagtcactgtaaactgaatgagttcaagggcactcccaaacctacttatcctgccttcccctcctcacttactgacaccagccttcacccaagatgagtttctcagcagtttctcagcggtctctttcttgctcttcttgcctctgttcagatactctccccaggcgctttatgagccctgtactcaggatattgtgatgttccttgttgtgatgttgtgcaaccagaactacatccgaaacccatatttggtggccaaactggtagaagtcatgtttatgaccaaccctgctgttcagccacgaacccagaagttttttgaaatgattgagaaccatcctctctccaccaagttgttggtaccttccctgatgaagttttatacaggtaggttgctggaacacagtgtagcacatggcaggccaacttaggtaaggtcatctaaagctagtggacgacgttgctctaagcctgttacctaatatcctgctacctgtgtgtatagcctactaacctgtggcctgcagaggatgtacttttggttcttcttgccctgagtagttaggaataggacaaccattccacctactggtctctgatgattcagcaggaa

SEQ ID NO: 59 - DNA, 1195 bp, Homo sapiens
gtatggtgaaaccccatctctactaaaaatagaaaaaaaaattaaattagccgggcatggttgcaggtgcctgtagtcccagggcggttgagggaggagaattgcttgaacccgggaggcagaagttgcagtgagccgagatcccgccactgtattccagcctgggcaagagaacaagactccgtctcaaataataataataataataataataataataataataccacttttcacctgtcaaatttatttcttaagttgaaaatacctggtacaaacatggttgtggagaagtaagctaacctgcaaaaaaacctgcttaatctaccctatagccagtgtgcagatttagtgctatgaaactctcatgagaatgcaaatttaaagcctttctgaaaggcagtttagcagcccacaccaagagccttaaaaatgcttttatcggggccaggtgcggtggctcatacctgtaatcccagcactttgggaggccgaggcgggtggatcacctgagatcaggaatttgtgaccagcctggccaacatggagaaaccccgtctctactaaaaatacaaaaattagctgggtgtggcgggcggcgcctgtcatcccagctactcaggaggccgaggcacgagaatcgagtgaacctaggaggcagaggttgcattgaactgagatcacaccagtgtgctccagcctaggagaaagggcaagactccgtctcaaaaaagaaaaaaaaaaagcactgggataacaaatagtaggtgcaggaagtagccatcttctatccctcagtctggggacccaagggaagagcctggggatctcagaacccagctgccctgatgagggcttggacggagctaggacccagtcctctgtggaaggcccttggccagtaggtgctggtgtctctctcgggggttgtgcacggttgctagctctgggggtacgagacaaagctgaaaattggaaccaactgctactgctgacagtaagtgcaaggtcctaagtcccttgtttctccttcagttttccagttctcctgcagcaccccctattggcaaccctagagagggcgggctgccaaaggaaagattctgcagtgccagccccagaatcacaaagccaactacaaagagtgcatgtgggctgggcacggtgactccagctaataatcctagcactttag

SEQ ID NO: 60 - DNA, 1134 bp, Homo sapiens
tctgtgaagcaaactttttaactttttgtttccataaactgctcttatggtcagaattgtgttccagctaaagcctggcacgaggcaggcccatggcttggtctgaatggtgctgattggagcgcttgtcctgaacttgccatgttcctgagatcgaggcctcctgcacttgttcacaggaacttctcttctccagcatgggcttaccaccccgtagttgcacagttgtagaccctgaagtgtagcttctttttttctctacgaatctggcatctccagagtctaacagaggtaggccaagctatttcagttcaccagcaagttctcattataacacgatctgcagaacagttccttagattggaggcttccagttttaaagtaagttaatatcccactttatcaatattacaggttccaatttttcttccatgcgtcagtctttgtgataaggaataactatatcagttgttttcttatctgttgtatgtggttaattatttgcattttcttggtatattggtgagtatatgcgtttttcctgttctagtctggaagaagtgttttctctccttaaaaacattgagggagtgagctaggggtgtgctggtaagcctgctctgggaagcagggtgggggagtcagcatttgctggttttccatggtgtgactgtttcctctgttgcccaatttaaggtgccaggggaatctggttataaaattctggaatatttagcacttgactgtcatcagccgtgcaaggtggctccaaataccactggaatgagcttatcataaacaatttaaaagaataacaaaatccaggccaggtgtggtggctcatctctgtaatcccaacattttgaggggctgaggtgggaggaacgcttgagcccaggagtttgagaccagccctggcaacataacaagtccctgtctctacaaaaaatacaaaagctgggcgtggtggtgtgtgcctgtagttccagctacttaggaggctgaggcaggaagattgcttgagccctggaggtcgaggatgcagtgagctgtgattgtgccactgcattccaggctgggcgacagagtgagaccctgtctcaaaaagaaacaagattaacataatctaaagag

SEQ ID NO: 61 - DNA, 1113 bp, Homo sapiens
aagacaacatactttttttttcttttctctgtttgtgatatcactttaatttttcttgggtggcttagagactaagggaggagacatctggcctttttagaacctgagaggaaaaaaagagtctttttttcccctctgtctctttttgccatggctaatccctgcatttccattcagggaaaaggtggtagtgagcatagaactgcaacagttatattctgagtcaaagttggggctttttacggcataattatggaatttttatttactggtagagaggagacgagaggctttttcagtgggcctgggacagtggctgctcttgactttgtgtgaagggaaatgccaaggatgcttctggtggacttcaggggaccccagggtttggccgtgggccgtgatggcagcaggcggtgggatgcttgtagctcctcacagcaggattcctgcccactgttttttctctgttgggagggaagctcttttctaggagtgtctcagttctgcttttggcattagtgatggtggtggtacagttggaattagtgccatgtcatacacaaatgttccacaaggcgggagtgtttcactttctggtgataaacttgatggtcattgttatgattaagataatgccgggcaggccgggcacagtggctcacgcctgtaatccaagcacttggggaggccgaggcgggcagatcacgagatcaggagttcaagaccagcctggccaatatgatgaaaccccgtctctactaaaaatacaaaattagtcgggtatggtggcacatgcctgtaattccagctgcttgggagcctgaggcaggagaactgcttgaacccaggaggcagaggttgcagtgagccaagatcgcgctattgcactccagcctgggtgacagagcaagactctgcctcagaaaaaaaaaaaaataataatgctgggtagtgaccttgtgattgttacagctccctttgatcaaagaaatatagctttcaggcataaacctggaagtctccctctgaatccagcagttgttttcattgatgcttgtcaggttgaagatgctttcagtgatgctctctatactcataaataagcaaatgtgg

SEQ ID NO: 62 - DNA, 1183 bp, Homo sapiens
cttttttatagcttattttgtaatgcctccttaattatcctttaatagaagccaccgctgataagctacctacactcatacagaagcattaatataatgccccagatgtactgtttcagggcaaaaaggaaaataatttccaacaaagtggtgtgtgtttcactgtcagatgcttgcacttacacacggaatcgctgtgcatccgacagaggctgattggcacatggggcacggggattgtcagctcaaacaccgtcagcagcgttgcccttggaaatgggatttcccagaacagtaaacgtgtctgtccttgatttacagagtagctacattcctaggaaatccagggtacattaaaactcaccatgttacccaggctggtctcaaactccaggcctcaagcaatcctcccacatcagcttcccagaattttgggattacaggcatgagccaccacacccagccagaatattttatttctgttagacacacagagcgttcgttgactcgtctgggcgttagtgttaatattctgtacttgaagcaagcccaccaagcggctgaactgggtggataatggaaaatgtcctgtggatttgggagtgagacaaaccggcttgagtctaacctctcagttagtctaaggctccaagcttgaaagggttaaatgaagtactatatttgttttgtttcgttttcgttttgtttgaggctttgctctgttgcccaggctggagtgtagtggcacaatctctgctcactgcaacctccatctcccaggttcaggcgattctcttgcctcagcctccagagtagctgggattacaggtgcccgccaccacacccggctaagttttttttggtatttttagtagacacagggtttcaccatgttggctagactggtctcaaactcctgacctcaagtgatccacctgccttggcctcccaaagtgctgggagtataggtggtgagccaccacgcctggcctaaatgaagtaccacatgaccgacagaccgacctggggaacatagcaagaccccatctctacaaaaatgtaaaaaataaaaattagccgggtgtagtggtacatgcctgtaatcctagatactcgggaggctaaggcagaaggatcacttgagcccaggagttcgaggctacaatgagctgtgatcgtgcca

SEQ ID NO: 63 - DNA, 1245 bp, Homo sapiens
ctctactaaaaatacaaaaaaaattagccagccatggtggcgggcgcctgtaatcccagctacttgggaggctgaggcaggagaatggcatgaacctgggaggcagagcttgcagtgagctgagattgcgccactgcactccagcctgggcaacagagcgagactccgtctcaaaaaaaaaaaaaaaaaaagtaattggcagtgactatgggcgcactgcctaacatttagccctgccccatatggaacatgttaaaaaaaaaaaaagccaggccgagcgtgttggctcacgcttgtaatcccagcactttgggaggccgaggcgggtggatcacgaggtcaggagatcgagaccatcctggctaacacagtgaaacgtgtttttactaaaagtacaaaaaactagctgggcgtggtggcaggagcctgtagtcccagctactcgggaggctgaggcaggagaattgcttgaaccggggaggcagaagttgcagtgagccgagattatgccactgtactccagcctgggtgacagagtgacactctgtctcaaaaaaaaaaaaaaaaaggacaggcacgacagtggctcacacctttgatcccagcactttggaggccgatgcaggcggatcacatgaggtcaggagttcaagaccaacctggccaatatggtgaaaccccgtctctactaaaaatacaaaaattagctgggcatgatggcgggtgcctgtaatcccagctactcggtaggcagaggttgcagtgagctgagagcgcaccactgcactccagcctgggtgacagagctagactccgtatctcaagaaaaaaaaaaagttttgttttgtttttttgagacagagtctcactctgtcacctagtctggagtgcagtggcacattctcggctcactgcaacccccacctcccaggttcaagcgattctcctgtttcagcctcctgagcagctgggattacaggcacgtgccaccatgcccggctaatttttgtatttttagtagagacagggttttgtcacattggccaggctggtctcaaactcctgacctcaggtgatccacccacctcagcctcccaaagtgctgggattacaggtgtgagccaccacccctggccagaaaaaaaagcttttaaataaagtaattgtcagcttaggcaacatagcaagaccctgtctctacaaaaaaaaaatttaagttagccaggcatggtggcactgacctat

SEQ ID NO: 64 - DNA, 1200 bp, Homo sapiens
aagttttgttacatgaaaggttgaaatattgagtggttgaaagtgaactgctgtttgcctgattggtaaaccaacacactacaattgatatcaaaaggtttctcctgtaatattttatccctggacttgtcaagtgaattctttgcatgttcaaaacggaaaccattgattagaactacattctttaccccttgttttaatttgaaccccaccatatggatttttttccttaagaaaatctccttttaggagatcatggtgtcacagtgtttggttcttttgttttgttttttaacacttgtctcccctcatacacaaaagtacaatatgaagccttcatttaatctctgcagttcatctcatttcaaatgtttatggaagaagcacttcattgaaagtagtgctgtaaatattctgccataggaatactgtctacatgctttctcattcaagaattcgtcatcacgcatcacaggccgcgtctttgacggtgggtgtcccatttttatccgctactctttatttcatggagtcgtatcaacgctatgaacgcaaggctgtgatatggaaccagaaggctgtctgaacttttgaaaccttgtgtgggattgatggtggtgccgaggcatgaaaggctagtatgagcgagaaaaggagagagcgcgtgcagagacttggtggtgcataatggatattttttaacttggcgagatgtgtctctcaatcctgtggctttggtgagagagtgtgcagagagcaatgatagcaaataatgtacgaatgttttttgcattcaaaggacatccacatctgttggaagacttttaagtgagtttttgttcttagataacccacattagatgaatgtgttaagtgaaatgatacttgtactccccctacccctttgtcaactgctgtgaatgctgtatggtgtgtgttctcttctgttactgatatgtaagtgtggcaatgtgaactgaagctgatgggctgagaacatggactgagcttgtggtgtgctttgcaggaggacttgaagcagagttcaccagtgagctcaggtgtctcaaagaagggtggaagttctaatgtctgttagctacccataagaatgctgtttgctgcagttctgtgtcctgtgcttggatgctttttataagagttgtcattgttggaaattcttaaataaaactgatttaa

SEQ ID NO: 65 - DNA, 1100 bp, Homo sapiens
gacaggcagtttacagaaatgccaacagccagtatgaaaagagactggctttttaaggtaatgaaatgtaatttgagcagtgacattacactgggtgggcaaagatgactgtcactctcgtggtttatgtccccttgagtcaatgggtaaggctggaattaaactggcaagtggagaaatgacagcagcctcacctggagtctgtttttttgggtggagcaacaactgccatgtccacagtaatgatgaatgcttctcgagccacgtcgctgccaaggtcttcacaggcatttctaaaaatgaagaatccttgactgcagacacgcaagttaaaaatcactaattatgttctcgatccagggaatatagttaataacttttgtgtagactccatactgacctgcttccccacaattcatggaaccccaggacactattcctcccacaaaccacctctctgtttcactatctagaaacaccagtgcccctccgctgtcacctctgcagctgtccttgcccccactttctaagccagcacaaagcatgttagcagttacacttccccttggatagggtggcttttcatatgcagcagtacatttttgatggtcaacaatcggtatgtcgacatacattagatttctagcaagaaaacccctttgggttaatccccatccagatgcagttccaatgtcatctgtcctcataaaggattcagcttcttttcttggcagacaaataggcgtgatgttgctattgattacaactttgttattcaatttaatcagtgctatgtcattgtcaaagccagcatcatgagtataaccttcatgtataaaaacagcttcagaccaggcttgtgtataatgaggtgatagtcttttcagggtgcccattcgaatgtccagggcggatgcatcatgtttttgctcatagacggcatgagcagctgttaggacccagttgtcatataaaagtgcacctgctgctgtggttccacctaatatcaggacttgccaaggaaaatcaccaggttttgccttttgccctccatatatacgccctcctgttgtgcgggctgatagtccacaaactggaga

SEQ ID NO: 66 - DNA, 1172 bp, Homo sapiens
acaaaaaaaaaaaaaattagccgggcgtggtggcgcgtacctgaggctgaggcaggagaatcacttgaacctgggagacagaggttgcagtgagctgagatgacgccactgcactccagcgtggcaacagtgagactccgtctcaaaaaaaaaaaaaaaaaagtgccccccctgatgtgcccctggcccggtccccagagcacgaacttccaggagccggtgcagccgctgacacagcagcaggtggcgcagatgcagctgaagtactacaactccgacgtgcaccgcgccgcctttgtgctgcccgagtttgcccgcaaggtgggtggcctgcggggctgggtggtgggacccagggacccagagcgccctcctgactggcctcatgtccctccaggccctgaatgatgtgagctgagcccaggcgccaccactgatgccacccaggacctcggaccttggagcctgcggggtgcctcggcccctccagccccgggccggacctcctgctggctctcgcccaccaaccaagtgttacaagccccagaatgctgcccggcctgccctgctgggcggactgtctgtgtgtctgtctctctggcgttccacctccaagcctataccagctgtgtacagcgccatctctctgccttctgttgcccctcactcaccaaacacgtgtatttatagcaaagattggagtcctgtgtctcctgaccttggctgggcccaggcagggccacattcaccattgggtgcctctggggtgagggtctgcagaggccttgctggctgacccccaagtgtctgctgcagggctgaggctgcaggcgggccatcgtggatagcctggggcacagagggtcaccgcagtcgtcacgtgggacccagagctgtcctgggaagctgacttagctgtccttttaccaagcccttcacaaggccactggtgacagccccccagggcagtggggtgggtgagatcagggtggggctgcccgggagcattctcagaaaaattggggacactcacaggtgtaagtcaggtcccatccaggtactccagggcaaatacaggaaggggtggcggggctggttaccttcggcctttttaagcacatcaggagcttaacactggcccagtgactgtgccctgactccacccggcattc

SEQ ID NO: 67 - DNA, 1179 bp, Homo sapiens
gtggttcaggagaataggcaaggcttgtttgtttgtgaggggttccttttgggttttgctgtcagtccagtgcagagatacaggaagggcgaaggaaagaaaaagctagagcagtgacagagagaaggagataaaaagacagatttatgatctgggagtctaacctcaagggccactctggggtgtgctttgattaattgcccaaggcatgcttgaaggcagaaacttgagagagcgggcgctggggaagtgtccttgcgggacctcggtgggcattagccttgactggaaatgatgagtgtgtcccatgcaattagctgtgggagagctcagggaataccctagggttgtcagaccttggccttttcattttcaagttatctgtgtaaacctttgaagaagctcaaattattaaaatattccttttctttctgccttcttaggtgccctttctggtaactggaggcccagatgtgcccatcacgttttttctgaggcttttgtactttagtaaatgcttccactaaactgaaaccatggtgagaaagtttgactttgttaaatattttgaaatgtaaatgaaaagaactactgtatattaaaagttggtttgaaccaactttctagctgctgttgaagaatatattgtcagaaacacaaggcttgatttggttcccaggacagtgaaacatagtaataccacgtaaatcaagccattcattttggggaacagaagatccataactttagaaatacgggttttgacttaactcacaagagaactcatcataagtacttgctgatggaagaatgacctagttgctcctctcaacatgggtacagcaaactcagcacagccaagaagcctcaggtcgtggagaacatggattaggatcctagactgtaaagacacagaagatgctgacctcacccctgccacctatcccaagacctcactggtctgtggacagcagcagaaatgtttgcaagataggccaaaatgagtacaaaaggtctgtcttccatcagacccagtgatgctgcgactcacacgcttcaattcaagacctgaccgctagtagggaggtttattcagatcgctggcagcctcggctgagcagatgcacagaggggatcactgtgcagtgggaccaccctcactggccttctgcagcaggg

SEQ ID NO: 68 - DNA, 1164 bp, Homo sapiens
tttccaaatgcctgtccttgctactcccattgtgccttgcagagtacctaggtcttcaggtttgtgcgtgagctcccctaggaggccgggagatcccttgaggcaagagctctctcctgctcctcttgctgtgcccttctcgcagtgcactcatagtacgttatatagttagtgctccacaaagtgagtggatcatgttgaatttagtaaaacagccatttctgagtgtctccttgaagtgtttgctttatggacacacagaacaggcaggagcagctgttcctcagcatcgaccttgcgctcctctgagccctgctgttggtcacagctccagtgtctgtccttgcctttctccccaaccaggcctggcatgcgtgggcagtgatgaacttcgaagctgtgctacactacaaacatcagaaccaagcccgcgatgagaagaagaaactgcgtcatgccagcggggccaacatcaccaacgccaccactgccgccaccacggccgccactgccaccaccactgccagcaccgagggcagcaacagtgagagcgaggccgagagcaccgagaacagccccaccccatcgccgctgcagaagaaggtcactgaggtacccttcccttcttccttattaacaaccaaccaaggtgccaggctctctgagaaatggaatcgttgttaagcttaaaaggaacctgaggctgtatctgaagtgccagatggagctggaaaatactgcctatctaccatccagcactgcctgagatagggctttgtgtgtgaatatttgtgtttggggagctgacgcagcctctatgctgaagagcaagctccttgtcaagcttccctgtggacgagctcattctctacgtgctgcacctgtgtgtgggtggctgtacacagctgcgggtccactctgaggatggggcttgggaggtccatcctctgcctttttctctccacttccacttcttccccttccccttgggctgtcagttcagaatgcgccagggccgctggcaggcccagagatccgggtgttcagagcctcagctccacctcctccctccatcctgttcaggaagccactgtcagcccaagataataacagttatgatacagttgccatttattgagtctttgctatgtgccaggtaatgat

SEQ ID NO: 69 - DNA, 1184 bp, Homo sapiens
gtttagtttctagaggcctcagtttctccatcagcttatgggatccttgtctttactgacaagaatggaatagaaatgtaaaagtactctgaaaagcaattgccctgtaacttatctagaaagaaaagaccctgagactccagaatctgctgttgccatagccccatatgtgtgaattctgcaactagccaaggctagttcctttcaattccatttaaaaaacaaaaaccagcaggtgtggtggctcatggcgtaatgggcctgcccaatgctttgggaggccaaggcaggtagatcgcttgagcccaggagtttgagacaagccctggcaacatagtgagatcccatttctacaaaaaaaaaaaaaaaaaaattagccgggtgtggtggcacacgcctgtagtctcagctactcaggtggctgaggtgggaggatcgtttgagccctggaggttgaggctgcagtgagctgtgatcgcaccactgcactctggcctgggcgacagagtgagacactgtctgagaacaaaaaacgactgaaaaaaaaaatcaccttagctttttctcttagaatcttctctaaaacgtattctttgtggcattctgaaataggattcatgatgatgcctgttgatcttagggacactacctcacctgccagtatctttggggctgtgtccttcaaggacatgtccccagactgctgtgcagtgtcattttttgtgtttggtttggtggtggcttcttcccccttgctaggctatcaacctcttatcaccacttgttggtgtcagaactaactgcttctggtctggagagggactgaccgatgcctttgggtagagagaattatgaaagaaattttggtatttttctactttatattttctgaggtttctgtaataagcatatttcacttttccaataagaaaaaaaaaaacttggcctggcgcggtggctcacacctgtaatcccagcactttgggaagtcgaggtgggaggatcacttgagttcaggagttcgagaccagcttgggcaatatggtgaaaccccgtctctactaaaaatacaaaaattagccaggcgtggtggcgtgcacttgtagtcccagctactcaggaagctgaggcgggagaatcacttgaacccgggaggcagaggttgcagtgagctgagatcactc

SEQ ID NO: 70 - DNA, 1268 bp, Homo sapiens
tcaggcgatcagcctgcctcagccacccaaagtgctgggattacaagggtgagccacggagtccagccaagataattttttttttacttttttttttaagttcaaaaaaattctttacttattaggctaattgtgcaattaaaaaaaaaaaaaaattgcaaaaaccgcaattacttttgcaccgatctaatagctcgcccactgtaagtaaagcaggtaaagtcagcctttttcttctgggaccagactctgctctgccccgcggtggtggcctcaggcgcagcgctaaaacgcatgaaccatttaaggtatttcctgaaactggagcgtgattggtgagactttatttgcatacccacaatgcattgcgcactaaataatgttcgtctttaaaattatttcccctttttccttcaacatatctttctcggaaccgagattgctgtcccagaattgtctgaagaaaaaggctgaagtcaatagctcttttgggccgaaggaaagttaccattacccgtttaggagtagccgttacctgagaactgtagtgtcgacgactgatgttatactctggtttctcttcaaatcgtataaatctttcgccttttactaaagatttccgtggagagaaacgagtgtgagtctgaaaccaattttttgaggccttgcgtttcttagcagggcttattttaagtgttttaaaaacagatgcgattccgttaaatcgcgtgtggagctatgtaaagtgtattatagaacaaatgcgagttacggtttttcagcttttcgctttgttaaggtatgtgatatcaattgtattgcatttctgagcagttataatattaagatgttggggtggcttactgcttttgaccaagaagtagggtttgttggttgattacaccagtggtttttaaccccagccactgagtgatggagggttaccgactcacaagcgagcattaacgcctgaggtccgcctgctgtcagggcagcaaggcatcagattctcctaggagcgggaaccctattgtgaactgcgtatacgaggtatctaggtgcgtgctccttttaagaatctaatggctgatgacgaggggcacagtttcaacctggaactgtccacaccccctacccaccttcccccgcccttggaaaaactgccttccatgaactgggtcccttgtgccagaaaggttggggaccgctggactatccgatcaaatgaagcagggactcggggcgagctcccccgctgctcccgccgg

SEQ ID NO: 71 - DNA, 1236 bp, Homo sapiens
ccccatctctactaaaaatacaaaaattagccgggcatggtggctcacacctgtaatcccagctactcgggaagctgaggcaggagaatcgcttgaacccaggaggcggaggttgcagtgagctgagatcgcaccacagcactccagcctgggtgacaagagcaagactccatctcaaacaaacaaaacctttctcttgtcatgtaacccatacatacacatgctatgtacccacaaacattaaaaatcagaaatttaagacaaaacaaaagcaacagaaaacctttttttgaggagtccctaaggcttcaccagtttgtcaaaattggagcttgattgctgagactttatttgcatacccacaatgcattgtgcaccaaataattttcgtctttaaaattactagtcccctttttccttcaatctatctttcctgaaactgagattgctgttccagaattgtctgaagaaaaaggcagaagtcaatagctcttttgggcagaaagaaatttaccattagcctgttgggagtagccattacctgagaactgagtgccactcatcgaagttcttactctagtttctcttcatatcgcataaatctttcgccttttactaaagatttccgtggagaggaataattctgagttttaaaccaattttttagaggtcttgcattttttagcaaggcttatttgagcgttttaaaagtagatgcccttagccattacgacggttcgtatttactctgaaacaagaaacacactcaaaactcagagaaaacattgttccctagtatttgagtctgaaggaccagagctggcttctggaggagcagctggccttgggggaaaaggacaatttaccctcctacgtagcttgaatggggctttgagtcgcatggcggggcacggcggggcacggcggggcacggcggggcacggcggggctgggctgtgggcggctgcttcagggcctgagcccggggtagatttttttttttttttttttttttttttgagacagagtctcgctctgtcgctcaggatcgagtgcagtggcgcgatctcggttcactgcaacctccgccttccaggttcaagcgattctcctgcctcagcctcccgagtggctgtgattacaggcatgcgccctcctgcccggctaatttttgtatttttagtagagacggggtttctccatgttggccaggccagtctcgaactcctgacctca

SEQ ID NO: 72 - DNA, 1135 bp, Homo sapiens
ggggtgagctgcagtcctcagatctcttccaccacagcaagctggaccccgacatggccttctgtgccaacatccggcagcaggtcagccaggagcgggcagcacaggacgccctctggatggggcaggcgggaaggtgggcctccagctctgaccctcatggtgggccgccttgtcaccgtaggcctgggagctccagagattctagcagggcatctcggaagccaccagggcctgctggaggaatgggggccgtcgggcacgagggctggtcctcaggggtctgcagggaccattttagctgacctggtttttataccatctattttatttacatttttggaatagcccaaagaaaacggaactttccacctaaaggtactccaagtgatgtgcccgagagacacctcaccctgtctctgcgccccaccccatatatttttgtgactttttttttttttttaaacatgcagcaagatgaagttttcccctgtgaccaacatttcaggaccagaacacgctccttttcttttacgcattttttctttcattctgtgttcagtcctctgggaagacttccctgatcacattcttagtgtcaggcctgggctgggccctggggacatagcggtgactgcacttggtctctgatattgggaacttcagttcggcgggtggaggaggctgcactgttgcccgtctgggagcgtgcaggggaggggtgagggcaggggaggggtgggggagcgcctcttccaccgggcctgtcctccccaggatgtgttcatgttcctgaccaaccggcacacccttggccatctgctctccctagacagctaccgcaccacccacctgcacaacgacctctgggaggtgttcagcaaccccgaggtgaggccagggtgggcacataggggctgggagcaaaggggcccagtgatcctgcagtcggagggacttccctctcagagtcttacaacagccaggacccctgtaggccacctgccaccctcccttcaccccaggaggctatagggcaggatttgggtagggagagaagggtgtccagagaggcaacaccatctattggaggagggaccaggactcaagaggcctgggtttgtggcctagatct

SEQ ID NO: 73 - DNA, 1265 bp, Homo sapiens
ggcggtgctgccagccctaagtgccatgtgggctcccccaggggcacgtgtggctcctgccccctggccactgccaagagaatgaagcacccagtctcgtaccattttgagccctccagcactacttattttcccccacctttgcctgctgttgctggaagagctggctcatacccccaaaggacactttcagcgacagctatggacagcatggtaccaaggagttaagttgaggctttttccagctttctctggttcatttgattgcttgataaggcctcaggatctcagcattgcacaatgcctcatggaagcctttgagggtatcacacagacacccccaccttcctccagcctgtgcgcacctgccctccttgcagcccagcacacctgcaggtgtaagggacgattggagtttcttcccagagagtctgtcccagaaggactgtggcttgtgtgtgtccatctcgcctgttggctcagtgcttcatcccatttgcagagcctcagacacgtcttggtggtgaggctcagttacccctgggcttaggctgaggcgggccctgtgctgggggtggtagaaaggatgctgctgaggcagctggaggagtgggagtagctcagaggggagggctgttggatgtatggggagctggcagagcaggtggcagtcactgggacaaggagggacttgcctctcttctcattattgtgtcctttgctttagtgtcagtcctggacttgtgcaggcctgttttgtgtagatctgttttggaagatggcatggtctaggtggttgaaggatgtagtagaaggatggatggtggaaggtggggacgttggtggctggctgaggtgcatgggccccacacaggacagctggagaatgggccgtccacttggcctcgttctgcgaggggctcatgggtctgagagcccccacccactaggcttgattgcatccctgttgtgccctttaagagacatgtttccaccccacccccaaccttgtcccaagtgccctggactaaatttcctgtgccagtgactgcagttggccaagggacaatgtggaaaacccagtgtccatctttccaccctccctgatctccagaaccttcgactgacccccttgtctttatgctgatgttgagttttgggattgttactggttgaagtgggggcagatgcctgtcaccaaggtgttgactgtgtgagaaaagcagtttgggtgacaaatcctgtgtggcacaagttggatcgct

SEQ ID NO: 74 - DNA, 1229 bp, Homo sapiens
tggccaggcactgtagctcatgcctgtaatcccagcactttgggagaccgaggcaggcggatcacaaggtcatgagatcgagaccatcctggctaacacggtgaaaccccgtctctactaaaaatacaaaaaattagctgggcgtggtggcaggcgcctgtagtcccagctactcaggaggctgaggcaggagaatggcgtgaacccgggaggcggagcttgcagtgagccgagattgcgccactgcactccagcctgggcgacagagcaagactccatctcaaaaaaaaaaaacaaaaaaacaaaacaaaaaaaaatgtttctacaaatgttgtccaggcttaacatgctttctttaattctaacaacaatcgtatgaggtagatactgttgtcgtccagcagatgaggaaactgaggcacagagaagttaaataacttgcctgaggcagtacagttaaagagtgtcgaatgggggtctctggcaccacagggcaccctactgagccccgtgtcctgctgtcttgacttcaggtagaagagctgggcctggaacccagccctgaggacatcctgcggcccaggggcaagtgacacctgctgagagaggcccaggatggtggaggctgaggaactggcacagctgcggctgctcaatctggagctcctgaggcagctgtgggtggggcaggatgctgtgcggcggtcagtggccagggcagcctcggaggtgcgtgcccgccttgggaaccccagaggaaggggctacctgaccttcaggccagcatccaggcttctgggctcatcttgttcaatacacccattttactgatgatgggacattgagggctggggagggaagagactggccttggtcactgctgaggccggagcaggatgaggatgcttgccttggtgcctggcgtaggcccggtgggtaggttctggcagccactccctgggtgacccggcccctctctccagtcaagcctggaatccagcagcagctacaactcagagactccatcgaccccagagacgtcctcaacttccttgagcacctcctgcccacggggccggtcctccgtgtggggcccaccagatgcctgtcgaggggacctccgtgatgtggccagatcgggggtggcctctctcccacctgccaaatgccagcaccaggagtccctgggccgaccgagaccccactcagcaccctcgctgggcacctca

SEQ ID NO: 75 - DNA, 1198 bp, Homo sapiens
tggttctcttggctgtttacagcttatggatttgacacaagataacgttaaaaaccagtatgttgtcagcattgggaattctgtaggctatgaaaatatcatcagtgatattggctactttgaatctgtgtttgtcagaatggaagatgcagccctcactgaagctttgagtttcacgtttgttgagagatctaaacaggagtgttttctcaacctgaagatggcttctttacattataaccactctgctaagtttttgaaggagttgacgttatccatggatgaactggaagaaaattttcgaggtatgctgaaaagcgcagccaccaaagtcaccacagtactagctaccaagactgccgagtatagcgagatggtatcgctctttgaaactccaaggaagactcgggaaccctttatcttagaggaaaatgaaatatatgggtttgacctagcttcgtctcatttggacactgtaaagctaatcttgaacataaacattgaatcaccagttgtttctatccctcggaagccggggagtcctgagttgttggtgggacacttgggacagatattcatccagaattttgtggcgggagatgatgaatccagaagtgaccgtctgcaggtggaaatcaaggacattaaactgtattctttgaattgcacccagttggcaggtagagaagctgttgggtctgaaggaagccggatgttttgcccaccttccgggtctggcagtgccaacagtcaggaggaagctcatttcacacgacatgatttctttgaatctttgcatagaggtcaaggtgaggagcatcagtcttttgttctattttgtttaatgattgaaaacccagctcacggagtcctttgcgtaaaacagcaacaataaaatccttttcttttagaataatcctcagttaatatttaagaaatcaaagagttttaatagaatgccttgtagtaggttggcatgttttcacccttttccatttaatgtcatatttgacaaaacaggaatttacttacttttatttttatttttttggttttttgagacggagttttgctcttgttgcccaggctggagtgcaatgatgcagtctcagctcactgcaacctctacctcccaggttcaagtgattctcctggctcagcctcccaagtagctgggattacttacaggcacccgcta

SEQ ID NO: 76 - DNA, 1179 bp, Homo sapiens
aagaacagtttggtaactctgcaatctacctactgcaaacaagccatgacttggtttggttttagctctaattatataaaaagtgagtcagggtttttgggtacccccctcccgccgccacacacacacacacggtgtgacaggctgttgtttttgtttgtttgggcccgctcagtgaaaggtataactgttttacccacataaaaatacttgcaaaggccaggagcggtggctcacgcgtgtaatcccagcactttgggaggctgaggtgggtggatcacctgaggtcgggagttcgagaccagcctgaccaacatggagaaaccctgtctctactaaaaatacaaaattagccaggcgtggcggtgcatgcctgtaatcccagctactcgggaggcagaggcaggagaattgcttgaatctgggaggcggaggttgcggtgagccgagatcacgccattgcactccagcctgggcaacaagagcaaacctccgtctcaaaaacaaaaacaaacaaaaaaaaacttgcaaaaaataatagttaacattgtatatatgcagattatggtcaaatcatgacaaataacaatactaggctcaaaaagtgaaacattcagttaagtctcttcccctttaaattcacgtggtgggtgggggcgaaacaagggaaaacaaagggatgtacaatgagccagtctttccccactaggccagctcctcattccagaggcccacctgctaagctccactgacccctccctagtcctgctgctgcacaccccaggctccctcctgctgggactgctccctgtgtgcctcttcttgtccccacctgtctcttgtccacatggcaagcatctccttggacttcaggattgggcaccggcgtgccttcccctgtacagaccttccttgtcctgggtagaagagtccaccccttcctgagatccccctacaggaacccccacagacaccaaactcaaacctggaacactttcccacatgtgtgtgactgcaagtcctcctcccctgctggatggtgaccccaaggggagagggctttgttttgtttatgtctgtgtcccctgtgcctagcacagagcctggcatttctagttgtccatacatagttgtgaacttgctctagagacacaataaatagacctgttaacatgaggt

SEQ ID NO: 77 - DNA, 1197 bp, Homo sapiens
tttaagggttttaaattgtagaatcagattccttttcagtggggctcttggaactgtcgagggctgatctgtctgactcccaccaggacaatctcacaacaatattattatgtaggtcggggtcccctaggtctgttaaaaaaaaaaaagttcagggctaagcgtttaagaggaaaaactatttctttcatttctagctaagtctgatgggccctttcaaacactgctttcatcatgcaccttttatttcacgatttctgcataatgaaaatacaagatcgataactgtggattatcgtaatgccttgagcctttgaaaatgaacattttctagattataaatgttccctttgtaattcatttcaaacttcatcctcccatttgtcctaattcccgaaatttaactgttgccttttgagcctcctaggaaattctgggtatcctttaggcaagggaggtagctcttgggggaatagcattcaggccacaggcaattcatttgcgacttgggctcttcttagaacatatgataagtacaacgcactgtagtgacagattttttaaaaaccctattaaagcccaatatactaatgcagattttttttttttaagttttagagagattcatgggattttattctttttcccaaaggcagtggtggagctgacagagtagcatggagcctcgtcctgatgtattgtgcggaagtggcagcagttcacattcattcagtttgtcagcataggatcagttccttcttgactcaactctctgtgatcaaaataagctattggatgttccctttgggtactggaagcagcttggccccttggcaagagaacaggattgcaaatcacaagagcagagccctgactccagctctgatgctactgtgctttgtgaccttgtgcagacagctttatatccccatctcaggtcattctcccccatacaaagggggagagggtcatccttgccctggtcatgtctgcatggctgaggtgaataactagttgtgtaacttcctggaggagtggcacagaggaagctcccttcctagggctggctctgccatcagggaggaagctggatattagaatgaagaaaaagcccatgcagaatatatggcagcccgataatggattctaaaaataaaaaagcactaggttaatctgcagctgtagtgtacctaaagt

SEQ ID NO: 78 - DNA, 1121 bp, Homo sapiens
tccttcccactcccccacagggctcctgctgagccagccctgactcccagatgcaagagcccagggaggagttgggagagaggaaaacctgctgggacctcagggcatggaaggagccctggacctttctcccagtgatgcctcccctactgtcaagttcctctggccctggagcttccagggacccctgcatcctttccttcctgcagccctgcctttgccaaagctccatgcatttgcctccaagtgggtccccaaccccaggctctgggagctgtgaagaggctcagggttcctgcagtctgcaggaggaaaccttgctctaaatgggcctgtgtgggttctgggatcccttcctgcacagggccacctgcaggtcccacagatgtatcttccctagaagagccagtggtgatgggcgaggacccctaacctgctcccaaaccccacatccaaaggagagagagggatcacctgaagcacagaccaggggttgggtcctggccccactgtctcctcctgatcccagaggccaggggtgtggccacaggcactccaccaactcctcctgcacccccaacccaagctgaacaaactcctccagactccctggcccaccccaacttaaagaaattaggagaattctccaagggggagaagacaccagctgcctctgcagtgctgtgcccaggaggaagatgatcactgttcaaactgccctggcaagttgtttcaaagaaataaagcccttggattctcagtgttctgaatcacattgcacttaataaacattagttttactaatgttttccacttacctgtctgtttatattcagcagtgagagttcttcatcttcaacaaaaagtgattaaaggacataggacatctgtcattttccccatggattattaagatcactctgcacatttcatcttgcacagtcatttttttctgacctgggctgcagtgctgagccacgtgtactgtgttgggttcattttccagattctttgctttttgtttgtctttgtcagtagcaccgagaatagtagatggcacatcccaggcactcagtaaaggtttttgaggggaaaggagggagaggaaggcactgcgtgtt

SEQ ID NO: 79 - DNA, 1191 bp, Homo sapiens
gcccctcagatgagagctgcacccaggccagcaccagtcgctcagccaccagcagcggcaccgccatctacagttggctcttctgctgctgcgccccggcagccaggtctgatggcccagatggcaaccactgcagctggcgtggctgtgggctctgctgtggggcacatactgggtcatgccattactgggggcttcagtggaggaagtaatgctgagcctgcgaggcctgacatcacttaccaggagcctcagggaacccagccggcacagcagcagcagccttgcttctgtgagatcaaacagtttctggagtgtgccgagaaccagggtgacatcaagctctgtgagggtttcaatgaggtgctgaaacagtgccgacttgcaaacggattggcctaatcaagaagttcaacctggagagatggaaaatcagctctcatactaattaatttagtataaaaatagaattggtagtgagggtataaagtgtaagcatcagttaaacttctcctgtcattcctagcttccttgcttcagaattgaaatggaagggagggtgttcctactctgtagaatctgggactgggcaaatgtttgtgtggcctccttaaactagctgttatgattttattctttgtgagttaattagaataaagtcattttcttccaaaaaagaaaaaaaaaatagccaggcatggtggtgcacgcctttaatcccagctactagggagtccgaggcaggagaatcgcttgaacctgggaggcagaggttgcagtgagccgaggtgtgccactgcactccagcctgggcaacaggatgagactccgtctcaaaaaaaaaaataataaatattttcactccacaactgtcttccaatttggagagtctgccgtttactagctatgtgaactcgggtacattaattaaaatccccatgcctcagtttctttatccatgaaatgggaatgattactcacagttcctgtctctgaggacttctagaaggatgaaatgaggtcttacatgtagcaatataaactggtggtgaggactgagcttgagtcagattacctgctttgaatccttgtgccgtcatgtactgcttgtgtatccttagacaagagactgtccctcctctatccttcagtttcatctgtaaaatgaagataatacctcctaggatttct

SEQ ID NO: 80 - DNA, 1168 bp, Homo sapiens
tcggtccacggctcagacagtctgtccctcaactctttcaactccgtcacctccaccaacctggagtgggatgacagtgcgattgccccatctagtgagggtgagtggccccagggcagaaaagctaagcccctgttgtgaaacagacttgaactgcttaagcctggctgggtgatgtcttccttggctagttttggtctggtggctgaaatttgcaattaaacagggctggccatttcccagatcttcatctcctcagagtccctgtggtggctaaaaagtggattctgggcacaaaaagctgaaattatatatatatatatatatataaaatatatattttttaaggttagacccttttccagaaggttctagtcacatgcctgtggcagttttctaagcaaggaaggtttagcagtgggacctggaaaccttgtcgcagggttgagtgttgcctgttctggggagcttgtctgaccccacattctttgcagaaggaggttaagcaacccctagaagaagagagaaccaggcaggtctgaagcgcagggaaaccttgccactgtgtcctgtgtgtccgtccgatttctctgagttccttctgcgctcgctgatgtgtttgggatggtcgcaccctttgcatcagggaccgaggaagaagctgcaggtcattttgttgtcttgacccaatgatttactggaacagcctggtttctttcaaaccttaggccctggtgttcatggataaaactggccattttcccctctttatctcctgtaggagaccagagcccttcatttacttcaccccaccacctcacctccagggaaggggatcccagccccaatttagccctggggcaccctagaattgcctcagcattgagaccttgaccttcccctttctttatttctgctgtaccacgggttatatgtcccaggaagggaggtccctctcaaacttgctgttagcaagacctgcattgctgaccgtgcaagctgaagaaggcggcacagtctccttaggttgggcccatgggccaccttagaggagttggaggggtgggccttgccggaagagccagggcaaggatggatccatggatggaggtgtcccctcagcaatttggagattgtgcaactgcagctgccagggcagtgtctcctt

SEQ ID NO: 81 - DNA, 1199 bp, Homo sapiens
tcccaaagtgctgggatttcaggcataagccaccgtgcctggcgctgggctaagttaaccttttgtagtgacggtttcaccatgttgccccggctggtcttgagcgtctaggctcaagagatcctctcaaagtgttgagcttacaggcgtgagtcaccgcgcctggcctatccttccttttggcggtgagagcttacagaatttttttttaaatgctgtgttttttttcttttttgtctgcacaatgaaaatgaaatagtgtaaaactattagttttagtggaaatttggaatctgttacagtagcctgataactcaggtaaattattatggctctaattagctgggcagtttagattcgaagaatgattgcccagcacttgaacagactagaagggtctgtttaaacactcctaattcctggggttcatttttatttataaaacacatactttgggccaggcgcagtggctcacgcctgtaatcccagccctttgggaagccaaggcgggcggatcacgaggtcaggagatcgagcccatcctggctaacacggtgaaaccctgtctctactaaaaaaaaaaatacaaaaattagccgggcttgggggcgggcgcctgtagtcccagctactcgggaggctgaggcaggagaatggcatgaaccccgggaggcggtgcttgcagtgagccgagatcgtgccactgcactccagcctgggcgacagagcccaaaacagatgctttatacctttaaccattacatttaacacagaaagcacatacttttattgtacaaaaaatggcgttgatttgtattttcttaaagagtgggtggtggctgggcgcggtggctcacgactgtaatcccagcactttgggaggccgaggcaggcggatcacctgaggtcaggagttggagaccagcctcaacatggagaaacccgtctctactaaaaatagaaaattagccaggcgtggtggtgcatgcctgtaatcccagctactccggagcctgaggcaggagaatttcttgaccctgggaggcagaggttgcggtaagccgaggtcgcgccattgtactccagtctgggcaagaagagcgaaactcttgtctcaaaaaaaaaaaaaaaaaaaagagtgggtggtgtttgcacagttaacatctcccttatgaccaatggcgtacatttgcaaaaca

SEQ ID NO: 82 - DNA, 1143 bp, Homo sapiens
agtggaccgcacttcctcttcgttcagtgcctcccctcattcttgtcctttaggggtgtggtggaaattattaccagggttatgggttcttcaaaatacaaaaagccaaaccaaaacgaaaaaaaaccctcttgtgtaatgaacttcccccgcgtgcaaaattcggggaacccgggcggcttgcctctgcctcccgcctgcgcggtctccctagacgaattgcctcccgcctagccgcctccctagacgtattgtcttgtgacgcacccccgagtccctgtaggtgcaaggctttaaaaagggagctttttcgagaagaaagcacatcgggggctcttagaggccagcgtggacgccgcaatcgcggggtgagccgcgcgacgaccctatggctctcggaaggtgctgacttggggcgggtgcgcgtgcaccactgaccgcgccagcccggggtcgggccggggcagcgcgctgggcggagccgctccgtggcccctaacaaagggcgagctcattgcccggtgggaactgtgagttggtgtcagagtcctcctaggaactcagtatatgaaacttatctagagggtgttgaagtaccagcaagcaatagaattctgacaaggctgtaatttgaggcttggaaatgaccaggttaactgtctcttgaattcgtagaatttgttatagattctgtcttaacataatttatgcttaatagagtctttaaaatcggcgttcctacggtaatgataccactgactactaaataagaggaagaaaatttgtggcgtgtatgttttataatttgaaataggcatatcaaagttcttttgtgctgtctaataggatcctggagatggatttatttatttatttatttagagacagagtctctctgtgtcgtctaggctggagtacagtggcacgaacagaactcactgtagcctcgacctcctgggctcaatggattcgcccacctgcaggcgcaccgccacacccggctaatttttaaattttttgtagagacaagggtcttgccttgttgtccaagctggtctggaactcctgggctcaagtgatcctcccacctcagcctcccaaagtgttggggttacaggtgtgacccactggtccaggcctgtt

SEQ ID NO: 83 - DNA, 1182 bp, Homo sapiens
gtgcattgcagcattcgctcgctcctcagtgttatgtgcctagacgtgtcatttctcattatgcagattccagagacattgcatgcttatggctgggagtttggcccctctgcaagatgagggggcagagagaagaaagaggaaatcgtcccaggcagctttggaagggttcttagtggacggtgctgcggtctggcttgtgtgaatgactttctaaaatggcggccaggacccactttatgtgggaatcagcagagccgatctcagaatgcacagagggaggagggggcggaggattcgagctgccttggaaagcggcagtctggaggaacattactgtattaaaaacggcttagctggcagtttgctcacgactgcattcaaaggagtatcttacctattgcagagtaaaagcagatgctactgataaaagcaggttattttaaaactaagcagatcatgtgtccctgaaattcttttattttaaaggtttttttttttcatttttaaacaaatctatttagttgtttaaatagacagtacatttttatgggttcaaagcatgtgaaaggtatacagagaaaaatctccacccctgaccctggaattcccagttgccacacttcctcccctcaccccccaaaatccaggtaatgtctatttctggtttcttgtttatctttctgcatgtacaagaaatgttcctgctgatccagctgtggagctaagtggaccttgtttggaggaactcaaggccttttatccctattgtgggatatattttgtaaaatgtgtgattgctactaggagtaaaagtgaaatctgaataatttaagtgaaaggaataaaaaggtagttgtaccagaacgatggctctgcaagaaaatgaaatggtattcacttctggtgtcttgtacaaatcagaatgagaaaaaccatgcaatacctatattaaaactgaactttaagtgcctactcttatccttttccctagctgattacattaataactgttttacaggattaagaggtgtacactgggaatacattatataaaacgttttcaagatgaatgttctcttaacagtgattaggcttttgtagtaagtgtttgcattttacaaaaagattaaaccagacagctttggggacagcttagagacattttaacagaaaaaagag

SEQ ID NO: 84 - DNA, 1235 bp, Homo sapiens
tcccagctactcgggaggctgaggcaggagaatggcgtgaaccccagaggtggagcttgcagtgagctgagattgtgccactgcactccagcctgggcaacagagcgagactccatctcaaaaaaaaaaaaaaaagaaatgagagtaatgtaataatgcgatacagatattttccccagagagaaaaacgttaagtgtaaaagagagccatttaaaaagtcattttgcaggtcgtccctcctacatacataacgcaaattgtccaaaaaaaatctaaaaactcattttggaaaattattgatatgcagcaataacgttgactttattttttccagatatggccgcgtggaaagtgtcaaaattcttcccaagaggggatctgaaggaggagtggctgcctttgtggattttgtggacatcaaaagtgcacagaaagctcacaactcggtcaacaaaatgggtgacagagacctacgcacggattataatgaaccaggcaccatcccgagtgctgctcggggattggatgatacagtttccatagcatctcgtagtagagaggtttctgggttcagaggaggtggtggagggcctgcttatggtcccccaccgtcacttcatgcacgagaaggacgttatgagcggagacttgatgggtaagttccaaggtttctgtaggcaggtattttgtatttgatatggtgagaaacagaaactcatatttaggggccccagatggatttaaagttttgggcattctcaatgtttcctattttgggttggaaacggaagtgatttatatcccaatggctggtatcttatggaatcgtagaggatatttcctgcagctgattggatatctgttcctgagatataatgtgatggaagatttcctatggaagcttcatttttggagttacctgtcttctagaattacttattccttctcttggataatgttaagtccttccttggatatatcccttctacctgatggagctatttggcttttgtgttcatactatatggaatatttctggaatattagagcctacagattcttttagaagttgatatctgcctctccattttcactacataaagtgtacaaacaaattggattgtaacaaaaaatctggcagaccataatgattcaaccacttggattctacaaacaatactttaacatggaaatgtgtacttggatgaagaagagagaaggcaatgcctgattt

SEQ ID NO: 85 - DNA, 1195 bp, Homo sapiens
aagtccttcctattgttgagacatgcgctgcagcagggctttcatgtctaagttaaaacatagcatggaaatgtggcctaaaagaaatttgtgagtaaataaaatttggtatatactttaatcagatgaaagtgtaaaaactttcatattattaaaatagtctcttgttccgttaacatgaaaaggagattgtatatttatgtatgcaagtcagaaaatctctaataaagtaagcaagtgagctgcagaacactagtcatgaaagcccaatatacaatgaaaacaatgattgctcagctgtgaaaataatttttggagtcaagtaaaatgttaagcttgttagcgtttgcttattaagtaggttaatgctgtttagaaaatgaccagttgcaaagacaaagacaatgctgaagtgaatgtttgcatgacttgcttttagttttgcttgctcctttctgattaaatatttttccccctcctaaatgcagggcttcagataacagggagcgtgcttatgaacatagtgcctatggacaccatgaacgggggacgggaggatttgatcggacaagacattacgatcaggattactatagagatcctcgagagcggactttacaacatgggctctattacgcttctcggagtcgaagtccaaatcgctttgatgctcatgacccccgatatgaacctagggctcgcgagcagtttacactgcccagtgtggtacacagggatatctacagggatgatattacccgggaggtacgaggcagaaggccagagcggaattaccagcacagcaggagtcggtcaccacattcatcccagtctagaaatcagtctcctcagagactggctagccaagcatctagacccacaaggtcccctagcggcagcggctctagaagtagatcctccagtagtgattcaatcagcagcagcagtagtaccagcagtgacaggtaggttaacagccttttgttataacagatgagctagctttaaacaaattctcaacaatcagtgggaatggtttcagcatagtattattttttaaagtaatcttggatcatatatgtatgtaatcagtaaagaaactggcatgtggccattgaattaactgttctaagtactcgaagttaagtgatgatttgcaaagttctgtttcatcctccagatgcacagtattaaa

SEQ ID NO: 86 - DNA, 1197 bp, Homo sapiens
gtcgtaggaaacagcagatggaaatggaaatagccaagtctgagaagtttggcagtcctaaaaaagatgtagatgaatatgaaagacgtagcctcgttcacgaggtaggcaaaccccctcaagatgtcactgatgactctcctcctagcaaaaagaaaaggatggatcatgtcgattttgatatctgcaccaagcgagaacggaattacagaagttcacgccaaatcagcgaagattctgaaaggactggtggttctcccagtgtccgacatggttccttccatgaagatgaggatcccataggctcccctaggctactgtcagtaaaagggtctcctaaagtagatgaaaaagtcctcccctattctaacataacagtcagggaagagtctttaaaatttaatccttatgattctagcaggagagaacagatggcagatatggccaaaataaaactatctgtcttgaattctgaagatgaactaaatcgttgggactctcagatgaaacaggatgctggcagatttgatgtgagtttcccaaacagcataattaagagagatagccttcgaaaaaggtctgtacgagatctggaacctggtgaggtgccttctgattctgacgaagatggtgaacacaaatcccactcacccagagcctctgcattatatgaaagttctcgattgtcttttttattgagggacagagaagacaagctacgtgagcgagatgaaagactctctagttctttagaaaggaacaaattttactcttttgcattggataagacaatcacaccagacactaaagctttgcttgaaagagctaaatccctctcttcatctcgtgaagaaaattggtcttttcttgattgggactcccgatttgcaaattttcgaaacaacaaagataaagaaaaggttgactctgctccaagacctattccatcctggtacatgaaaaagaagaaaattaggactgattcagaagggaaaatggatgataagaaagaggaccataaagaagaagagcaagagaggcaggaattgtttgcttctcgttttttacacagctcaatctttgaacaagattccaagcgattgcagcatctagagagaaaagaggaagattctgacttcatttctggtaggatctatgggaagcagacatctgagggagcaaacagcacaactgatt

SEQ ID NO: 87 - DNA, 1173 bp, Homo sapiens
cccaggaggcaaaggggacccagacgggagtagagcagcctcgcctcccagctggacctgcaaacaggccacctgagcctcacacccaggttcagagggcacaagcagaaacaggcccgacttccttcccctcccctgtgtctgtctccatgaagcctgaccttccagtctctcttcccactcagactgccccaaaacagccgttgtttgtcccaacaacctctggccccagcaccccaccaggactggttctgccacacactgaattccagccagcccccaaacaagattcctctccacacctgacttcccagagacccgtggatatggttcaacttctgaaggtaagcatgagcaggggctgcccttcctggcccccaagttttatgccatgtcaaatgtcctaagattccctagttaacagacccacaagctacagcctctggctgtgtccagcatggctcagcgaggggccatgagctcacttcctgtttgtttccctgtgagcagaagtaccccatcgtgtggcagggcctgctggccctcaagaatgacacagctgctgtgcagctccacttcgtctctggcaacaacgtcctggcccatcggtccctgcccctttctgaaggagggcccccactaaggatcgcccagaggatgcggctggaggcaacgcagctggaaggggttgcccgaaggatgacggtaagactctcaggcccaggtgagcaactgccccacctacagggaggaagacgtaggtagtccctgccagcccatctccctggcctgtcatggaagcattaactgtattcttgttgttgttgaaacagtctctgtcgcctgggctggagtgcagcggtgcgatctctgttcattatagcctctgcctcccgggttcaagccattctcttgcctcagcctcctgagtagctgggattataggcacgcaccaccatggcaccaccatgcccagctaattttttgtatttttagtagagatggggtttcaccatgttggccaggccagccttgaactcctgacctcaagtgatctggctgccttggcctcccaaagtgctgggattacaggcctgagccactgtgcctggccagtaacggtattcttgaagtgagcaatgaagggtccactatgcttctacttggtggggg

SEQ ID NO: 88 - DNA, 1068 bp, Homo sapiens
cgccctgtgagttctctgagagtcacctgtcccgcctggcccctgacctccttgccagcatctccaacatctctccccacctcatgattgtcattgcctccgtgtgagccactgagtggttatcacctcagtgaatcttcccagggctctgcagtaaaaacaaaggacaacccagccaagcagaggaagaagctgccgaaggggacagactccactgccagacggccagccgtttgctgtcctgccgcccggctcagtcggccagacttcctctaggagtggtgctgctaccttgtatgtttacataatgctttagcccaaggacacatcaccaacccatggactcgcagacaccggggctgggtttctctttcctctttttggagaaaaggaacagggcagtggaatgaaaattttttgtttgtttgtttttaagaaacaagaaaacagaactgcctttgcactaaattagtgacttggacttttgcccagtgaagacaggctgtgacactctggatgtcttggtgtgtgtagacacacattgcagactcttaacgcaggaaggacttcaaacttctgctgagaccttggggtcaaggaacatttcattggttttttttgtccacccccatctcccttgctcatttggatgcgtcaccttaattctcctgctgccaccgtctttgattcaccgggatgtacagtttacagttgaagagcaaacagaaaggttttctcttggtgggatatgcagaacttgggatgtgtgtatatataaatatataatatatataaatatatataatactgacttaaaaaatcaaatcccccgacatacgttttttttaatctgtgccaaaaatgtgttttcagaggaaatcttattttcatattcagactttgtattgcccactcatttgtataagtgcgcttcggtacagcacgggtcctgctcccgcgatgtggaagtgtcacacggcacctgtacaaaaagactggctaacccctcttcctattaccttgatctcttcccccaacttcctaacacttattaatttatgaaactgt

SEQ ID NO: 89 - DNA, 1109 bp, Homo sapiens
atttactataacccgtcttagcttcttgaacggagaatgtccaccaaaaccgcaagatcatcttcatatcaagcctgcactaccatgtctggatgaactggctgagaacactacgtgccagccacgtgccaagtcccaggccccaaactggttaggggtcaggaagagcattccaaagagctcacacagaagctcaatcctatctctccaccaaggtaggcgacgccatggggctgcaatgcctgcttttgtgcttttcaggcacctcccccagtgctgccaactgcccttctgaagggcctgtgtttgccaccctccaccttggcactaagttgctatttctaatctgctctgggccaggagaacagataaaactagggccctcaatggtttagagttttacagttcaccaagtgctcaaggcacattatcttctgtgaacctcaccccagcccctagggaaagacagattgggatgagccacgtgactgtgcaggtcatttcagtttccattctcttacctctaaaatgctgaaaataacaggaactactccataggactggtgtgaagattaaatatccacagaatgcttagaacaggtccagcatatagtggcaataacgatattaataaaatgagatctaacattcagtgagcacttagaatgttccaaaaattgttctaagtgctatacataaatcagcttatttgatcctcacaagaaacttatattttaagtatcattacttcccctatcctacagatgagaaaaatgaggcatggagaagtgattttctaaagatcacaaaactgggctgggcacagtggctcagcctgtaatcccagcactttgggtggctgaagcaggtggatcacctgaggtcaggagttcgagaccagcctggccaacgtggtgaaacctctgtctctactaaaattacaaaaattagccaggtatggtggtgcatgcctgtaatgccagctacttgggaggctgaggcaggagaattgcttgaacccaggaagcggaggttgcagtaagctgagatcatgccactgcactccagcctgggcaacagagtgagactccttcttaaaaataaataag

SEQ ID NO: 90 - DNA, 1217 bp, Homo sapiens
ctcagggctcttcaaaggactaaaagctaaaggcgacgatgaattcattccacaagtcctagtcgtgcgccctggtgagtaccagaccctgctccccgcgaggggacccacgagcgaccctcaccaccatccctgccctggtggagcccccgtgcggaacacaggatccgaagatggcagcggaagctcctcagcggcccggaaagcgactgggcagggtgggcacaggctccttcaatgggtgaaggcggcgcaaagaacgggaagaaccatcccaggagcccacagggcgttcagcttcccttggggccccaggcagctcgggctgggtcgcccaccagggagtttctggaagcttctgcagcaggcgaggggcagggcgggcgaaggcaattctgctgttcttctggctccagaatctcctaacacgcaggcgtccaacgtgaccggcgcgactcaccgctctaatctctctggttttccaaggccttgctcagtggtcctgcccggtgggccctgagaatagacggaacggaggaagttcagtgagtgcgcccttcctagatgcccagtagagttggaagcgcttgtctctgtggcgcaatcggttagcgcgttcggctgttaactgaaaggttggtggttcgagcccacccagggacgcttattggaacttttgaagcattcacgcaatgtcaatcactagataaatggggaagattttatcttcccaaagtctcaagccactaatttatgacagatccatgtcaagggccgcccacctccccgaccagattcttagccggctatctcctgaaatgccgggtttacacctgtgtcactaaggaatcctgaaacagagacctaggaacccacttctgatgtgataaaattctaattcagtccgttatacgcttaaacgagtatttacgtgtctccattttttcatattttagtaataggagtccagtattacctccaggatgtgcctgggtttcctgattgctctatcaataatgtgaccagtggaatcattcatcatgaaagtgattctctccatcatttttgaaaatagtatttttcctcagtttatgcatgatttatttaacccttttcaaaatgtttttgttagccaggtatggtggcatgcacctgtaatcccagctactcgggaggctgaggcaggaaaatcgtttgaacttgggaggtggaggctg

SEQ ID NO: 91 - DNA, 1173 bp, Homo sapiens
taatgattacgagactgatcattactcttttgccaaaaaaaccagcgacaaaagactaacttagtggaccaacctttgtttcttcattatctctaccttggttctgtccttttatttcctctttcttctaattctgcttctgctactgatttcctccctggatttgaactttacttacctaaactaccagttaggttaccttcttagaacctctaaggcagcagtttgaggttgacgatggaagatttaggattagaaaaaagaaacgtgaatgaatttctgatgttttattataggggtttgtaatgcaggtagaaagaaagacctttttcagagttaagagtttgatccgacaaatgagctattttgatatttataacgttgtctagtaaaagtttcctgtaaaaacacatttggtttggatgtctttgttagcttttagtcgacacttgaaaaaaccgcttggaacggtttctaagtctttgtggatactgttttctgttatcctgcaggcggttgttacgcagaggcattggtggttcagtggtagaattctcgcctcccacgcgggagacccgggttcaattcccggccaatgcaagagggtctttttcaccccgctgttgctctttatctgtcttttacgctgaaaatcatactgcataacctaatagtgcatttaggggcttggccaccacaaggtaaagtgacgacaacactcacgaaagtagcggcaggagacattcaggagactaactcaggaccccatgcagttgttggactcaaacagcttagcaagctgacaagcatgaagtgtttccggtgagtcactgcagttttcatactggtacctgtgactttcatctattcactggaaggatccctgcaaacccgaagaaccatcaggttcctgattcgcgtgctggaccttgggcttaccgttgagccactatggagaggatcaagaaatgacgctcttggaaggagagaagctgcgggcaggacagtcacctcagaggtccaagaggcgtcagcggcccaaagaaaggggtggtgtgtgggcaagaatctgcgtggagatgaggggagcggcggagactggtccttgcgcagaggcggccagtagaccctcagggctgtaccccagacaccgtgaaccgaatttgctcacat

SEQ ID NO: 92 - DNA, 1254 bp, Homo sapiens
ttcatcttttcacatcacatttccttcaaatgctttatacatcttcaagcagacaaataatagtattataatgattacgagaccgatcattactcttttgccaaaaaaaaccaacgacaaaagactaacttagtggaccaacctttgtttcttcattatctctaccgtggttctgtccttttatttcgtctttcttctaattctgcttctgcttcttatttcctccctggatttgaactttacttacctaaactaccagttaggttaccttctcagaacctctaaggcagcagtttgaggttgatgatggaagatttaggattagaaaaaagaaacatgaatgaatttctgatgttttattataggggtttgtaatgcaggtagaaagacctttttcagagttaagagtttgatccgacaaatgagctattttgatatttataacgttgtctaataaaagtttcctataaaaacacatttggtttggatgtctttgttagcttttagtcgacacttgaaaaaaccgcttagaacagtttctaaatctttgtggttactcttttctgttatcctccagggggtagttccagagaggcgttggtggtttagtggtagaattctcgcctcccatgcgggagacccgggttcaattcccggccactgcacgtggttgtttttcacttcgctatggctctttacttgtcttttacgctgaaaattatactgcataacccaagagtgcatttaggggcttggccaccacaaggtaaagtgacaacaacactcaccaaagtagcggcaggagactaacccaggaccccatgcagttgttggactcaaacagcttagcaagctggcaagcatgaagtgtctctggtgagtcactgcagttttgatactggtacctgttactttcatttattcactggaaggatccctgcaaacccaaagaaccatcagtttcctgattcgcgtgctggaccttgggcttaccgttgagccactatggagaggatcaagaaatgacactcttggaaggagagaagctgcgggcaggacagtcacctcagaggtccaagagttgtcatcggcccaaagaaaggggaggtgtgtgggcaagaatctgcgtggagatgaggggagcggcggagactggtccttgcgcagaggtggccagtgaaccctcagggctgtaccccagacaccgtgaatcgaatttgctcacatcatcagcgaccgcagcccccgcgtgtt

SEQ ID NO: 93 - DNA, 1232 bp, Homo sapiens
tcttttcacaccacatttccttcaaatgctttatacatcttcaagcagacaaataatagtattataatgattacgagaccgatcattactcttttgccaaaaaaaccagcgacaaaagactaacttagtggaccaacctttgtttcttcattatctgtacattgattctgtccttttatttcgtctttcttctaattctgcttctgcttcttgtttcctccctggatttgaactttatttacctaaactaccagttaggttaccttctcagaacctctaaggcagcagtttgagattgacaatggaagatttaagattagaaaaaagaaacatgaatgaatttctgatgttttattataggggtttataatgcaggtagaaagacctttttcagacttaagagtttgatccaccaaatgagctattttgatatttataactttgtctagtaaaagtttcctataaaaacatttggtttggatatgtttgttagcttttagtcgacacttgaaaaaggcggttggaaggttctaagtctttttggatactcttttctcttatcccccaggccgtgggtgtgtagaggccttggtggtgcagtggtagaattctcgcctcccacgtgggagacccgggttcaattcccggccaatgcagcaggtacttcttcatttcattatggccttttacccgtcttttacgctgcaaaattatactgcataacctaatagtgcatttaggggcttggccaccacaaggtaaagtgacaacattactcacgagagtagcggcaagagacattcaggacactaacccaggacccatgcaattgttggactcaaacagcttagcaaagtggcaagcacgaagtctttccggtgagtcactgcagttttgatattggtacctgttactttcatctattcacggggcggatccctgcaaacccgaagaatcatcaggttcctgattcgcgtgctggaccttgggcttactgctgagccactgtagagaggatcaagaaatgacgctcttggaaggagagaagctgcgggcaggacagtcacgtcagaggtccaagaggcttcagcggcccaaagaaagggaaggtgtgtggggaagaatctgcgtggagatgaggggagcggcggggactggtccttgcgcagaggtggccagtggaccctcagggctgtaccccagacaccgtgaaccgaatttgctcacatcgt

SEQ ID NO: 94 - DNA, 1195 bp, Homo sapiens
ggcctacgggagggagggcaaggagagtcctacggttcctgggaggacgagaagagccaagagccccgacggccggcgccggggaaaaggccccgaggcggggtccgcatccctggaagggcggcgtccaccctcctgagaggcacggggcgcccagggctcggacgctcaaagcccgccggctcctgcagcttctgggagccgaagagtgtcagccgggaggatcccgcacacggcgcttagttctggaactgcatacccaggggaggatgcgggagcccgaagcccgggtatgtgtccccgaagcccgggtgtgggtccccatggttttcgtgttgggggtgggcgcggaacgctaagcctgggcctattgggagccatagtcttcttgatggctggtgcttattgggcttttttcagtcgaatttcgaaatgcagttgaatttcttactttggaaacgataatagaaatggctgacctaagattttcatgatgatattttgccttttttggtgtatatgcagtttctgtggtgtagtggttattatgttcgcttcacatatgaaaggtctctggttcgagactgcgtgggaacatcgtgttttgttttgtttttttgtccctaaatttagtgagtttaatcgaggttgggaaacaaacagaaaagtagttgaacctgtggctacactttagacctcctcaatctagacagatcgttgaccaggctacagtttccactggtctgccagcaagaggcctgcttaatattagctttggttccagaaattccttcaggttctcttcattctcttctatcgcctgtattttcacaggctgacactgaaagtggatgacatcttagtgcatttcctaagggtcccgcttggcttcgctttactctggtaagttgcagatctggctgatttgcaagacaacaaaaacaaaatattttttaaaaaggttctaaatctgcatctggaagtcatagagtcaatattcctaaatcacatgaattatgtgtatacatttgcatgcataccccttccccaaataatcctcagaaaaccggttaagttttagcatctgtgactctgagatgcatatgaggcctttgtaaatttagaagttaagagtagaaagtacaggtttgtattttagaaggagatttgggaataaatatagctctggtggata

SEQ ID NO: 95 - DNA, 1230 bp, Homo sapiens
tcaagcagacaaataatagtattataatgattacgagactgatcgttactcttttgccaaaaaaaccagcgacaaaagactaacttagtggaccaacctttatttcttcattttctctaccttggttctgtccttttatttcctctttcttctaattctgcttctgctactgatttcctccctggatttgaactttacttacctaaactaccagttaggttaccttcttagaacctctaaggcagcagtttgaggttgacgatggaagatttaggattagaaaaaagaaacgtgaatgaatttctgatgttttattataggggtttgtaatgcaggtagaaagaaggacctttttcagagttaagagtttgatccgacaaatgagctattttgatatttataacgttgtctagtaaaagtttcctgtaaaaacacatttggtttggatgtctttgttagcttttagtcgacacttgaaaaaaccgcttggaacggtttctaagtctttgtggatactcttttctgttatcctccaggcggtagttacgcagaggcattggtggttcagtggtagaattctcgcctcccacgcgggagacccgggttcaattcccggccaatgcaaaagggtctttttcaccccgctgttgctctttatctgtcttttacgctgaaaatcatactgcataacctaatagtgcatttaggggcttggccaccacaaggtaaagtgacgacaacactcacgaaagtagcggcaggagacattcaggagactaactcaggaccccatgcagttgttggactcaaacagcttagcaagctgacaagcatgaagtgtttccggtgagtcactgcagttttcatactggtacctgtgactttcatctattcactggaaggatccctgcaaacccgaagaaccatcaggttcctgattcgcgtgctggaccttgggcttaccgttgagccactatggagaggatcaagaaatgacgctcttggaaggagagaagctgcgggcaggacagtcacctcagaggtccaagaggcgtcagcggcccaaagaaaggggtggtgtgtgggcaagagtctgcgtggagatgaggggagcggcggagactggtccttgcgcagaggtggccagtagaccctcagggctgtaccccagacaccgtgaaccgaatttgctaacatcgtcagcgaccgcggcctccgcgtgttttgtgg

SEQ ID NO: 96 - DNA, 1313 bp, Homo sapiens
ctgacccagctccctttagtcacgtttgcttggctctggtaccaaatagttgggattaccgaagagtccccttccttgcgtgtcagcacggatgctgtgactgccacctgcgtcctcgtcaagtgcccgagctcgccgccgtgtgtgctgcgctgagtgagttatgaggtgcctttcccggaaccctcctctcgcctggacccaagagaggcgacagctgtggctggggctcttggtttccagagggtctggactggtttgggtgctttaaaatagatatttagttcagtggtgcttatgggggagatgggactagaacttaagtgtgagacttgggtggatgggaaagttaaatattggtctcttcaagttttttttttcttttgctttgttaccacttgtcactgtctccatgttaaaatgccaaaaatgatgtagttgttgttgcttttttccctattttccaccccagtcgctccttaccgtgactcctgcccttggagggcatgtagcagtgtctgtcctgccagtcccaaggccctgtgggaggagactggcctgcatctctctaagacttagtctgacgccacgcgcatctcttgttctgtgttcaatcagtagtccaggggagaagcttctgctacttcagagctttgctaaactaacctaatttgtccaaatcaccccaaaaccaccatctctgacgtaagcttccatgcgacagcctgatccgtttccctggacaggtctctttcctggaatgcagcccaggcacctgtgctcctggcacccttgaggtctctcctttgagccgtggtcaccgagagggttgaggacgcagcacccgaggtcccagcctttgcaggagcctccctgggcttagctggacttagatcttcggtggcctcatgtaaacgtggcagccagcctcttctagaaccctagcccagggactggagcaggaaagggaccttcaaagtgaagactgccttgtcccgcagctccttctggcttagattgaaaaatgggcttcctaatgggttaaatcctttaaaacaaggagttgtgggggaagggtgtcgtgcactcctagagaaaggtacacagttgcccggttgggaatgtgcttggcgctgaccctgcgggcatctgactggtcttccagctcaggaaaaagaatttgaaagaggcttagcgtgaaggggaatcaaagaggaggttgtgatttggtcgaaggtgcctggtttagtgctgtaattgtcttattattttttttatatatatatttcttggagtaaacattttaaataaac

SEQ ID NO: 97 - DNA, 1206 bp, Homo sapiens
cagtcctggaggtggggctgggcgtgttgtgttgagggtggatctgtgctttgtcaccagggttcctgtggctgagagtccttgaggggcgatccctaggggtgggattggcactgttatgtgagcaccatttacagggtagaaaaaggaagagaaatattgggcagacaccaaatggtcctcagtggatgcccagagcaccaaagtgattaaactctggtgagccaggtgtcaaaatggggtgctgtcttaaaatacatctcagagggtagggacggggtggttgtcttgcaggcactctaagtgggaacggcgtgtttctgcgagcatgcccgcctgtgcatggtgtccctaccacactgagcctctcatttccctttgtagcagagacgtgggaggtgtgcacgggtggtcccgctgctgccccagggaaggaggtccggggagctgcagcaggcgccattccagcgggcagagggccggggcgttctttgctctggatcttggctgttgggaatttggagggtaccttccagagacagatgggcatcatttgagagtgtgtttgtactcgccttctcctggtggtgccgcctggaccaccctctctcttttctactttctctcatgtgatctgcaggtcgaaatgagaaggggcagctgggacatggtgacaccaagagagtagaagcccctagactcatcgagggtcttagccacgaagtgattgtgtctgcagcatgtgggcggaaccacaccttggccttgacgggtaaggaggtggctgctggtgtctcctctcagtttggcaagaggccaggtggtctgccttggggatggggcgtggggtggtggagttccccttgtgactcttggtcaggatcagaaagaggccctgagaaccttggcatggagtggcttcttgagggcattgggagcctccccagtggccataggaggcccatctgggagtaggagacgctgccctctgtttctctgcacacccagtttctgatgtgaaatggctttgctgtgaagcgtctgcactgccagcttttgggcagtctcacttgccttctgcctggcaaatgagctgtttttattattttgatgcctttgattctaaatctagttcaaaacattcaccattatcttcccttttgtgatatttttcctttcttccagaaacgggctccgtgtttgcgt

SEQ ID NO: 98 - DNA, 1176 bp, Homo sapiens
ggctgctgcacatgcctgacccaggacatgtgctgagagagcccgtgtgtacttgccccgccgcgcccggtgagcactcagtgactctagcagtaagaacagacctgcctaggtgatggcaggaccggttggtgcaggcttctggggaaagggagccttggccagagcgtggggcagattgggctgtgccgtggcctccttggcagggacttttggagatagggccagacgccttggaggagtggggtcgggtaggggatgtcctggttggcacagagtctggtggttccaggtgagggacaaccatgctgtagggtagggtggggtgggggttgggggctggtggcgccatcctcatgcatcactgaaacacctcccgggcagggcaacgtggtcctatggaagcccagtgacactgccatgctggccagctatgctgtctaccgcatccttcgggaggctggcctgccccccaacatcatccagtttgtgccagctgatgggcccctatttggggacactgtcaccagctcagagcacctctgtggcatcaacttcacaggcagtgtgccgtaagtccctggggatggtgtaggctgtggtggctaggggacgttcacctgctcacctgctgtctgcctggggatggggctgtgaacccaggggtcatgcacggactctactcccttacttgctgtgtggctatgagtgagccacttcacctctctgagcttccatttcttcacctgtacagggagtgattatccttaatttgcagagtcattgcaaggattaaacatgttaatgaacaggaaagagcttcgcagactggaagtgcaccctacagctgtgggtaatattgatttcagtgctacctctgctactggaaagggcacaggggagcacagaatgaactggaggagtcaggaagccttcctggaggaggtgacatctaagcagaggagttggccaggcagaggggaagaggcaggagaagaatatatatgttgggagagggaatagcacatacaatgttgccaagccaaaaacttgtgctctggggcatggcaggatcctgtgtggctggagtgtggagtttgggggcgacagggcaagagagtgagggcagggcatggtttgagttgaggtaggggaggcaggccactacctgatctc

SEQ ID NO: 99 - DNA, 1181 bp, Homo sapiens
cgctcatctggaagaggctgttctaacgaaggcgggaggatcctagatcagaagaagacaaaccggaagagggagcctaggaaaggaaccacatgcacatttagtgcaaaccatgtaaacataacataacaagactatgtggagcaagggggagtcaggctgtggacccaccagggaatcttgattcatgtttttggccccatcactcactagcttgctgactttgggcaagtcacttcacttttctgggcctctggagttactagcacagttccatgttggggagattgtgaacgtccctgatatatggtgctcaggaaccagtagttgcttggaattgtattagagctggggtaggagctagacatggggccagggaagaagggaagatgccgcgaagaagggcctggaaggggacgaagggcgtggattatcagaggaagtgggagtagtcggcaaggatgggtggggagtgttgagtcatccaagcgttcagcaaatgtcacaagacaacgacaaattgagcaaattcttcctgctcttgctgccgggtcctgcttccaccctgcttttattttatcatgccgcttttcttctagaacccgagcaacttcccgagaagagaagaacctccaaggctttctggaacagcccaaggagaagtgggtggagagtgcctttgaagtggacgggccctactatttcacagtcttggcccttcacatcctgccccctgagcagtggagagccacacgtgtggaaatcttgcggaggctgttggtgacctcgcaggctcgggcagtggctccaggtggagccaccaggtcagtacctgcttccggaagctgctgctcactatttcccatcatcagttttgaaaagctgcttagtggtacgcacgtgctaggtgaaggcatgctttgtgactgcggtggttgacaccagcccttctcccttctcagtctgtcatgtcaagagtctaagctgatggctggcaggttgcctggtcatttctgggttttctgttccgctactagaaaggtagagccagtcttacctactgtagaaaatgttaggaaggcagccaggcacagggtgataaaaccaatgagatgatcagggctaagaacagtaatcaggttttccacatcttgctggtgttggcataagccaggaaagtt

SEQ ID NO: 100 - DNA, 1178 bp, Homo sapiens
ggccttctcaccttcacacaaaagtgggcacaggcaggacctgcagtggtgtccttggtttccagtcaatggttttacacttcaattctggttcttctcatagtaattacgtagtgtgaaaatctcactgacctagttgttttagaaaaaaatagtgaaataaattctaatctgccatgacagacaaaaggtaaagatcccaatcatatgatttttcctgtcttatccaaggtctcctgagagttagcgtgagtttgggaggcctactggttttagatctctcacctttatggaaatccctttggaatccaagtttgtttccttcaccagctggaacattttatttttgtggggggcaagctgtcgcagccaactccatcttcccagatgctgtaggtccaagaagtaagagaacaaggccaggcatagcaccccggagttctcccgctaaagcccagggtgctagctggtagcttgtcttgggtttttgttgccacctgacttatggcaccatgtgccaagggaggaaagcaagcaccttcaggtgactggggtttctttgactcaggagacaaggatgatgatgacgatgatgatgcagatgagaaaatgcagtcatcagggatcccgaatggtggtcacatccgtcaggaaagccaggaacagagtgaggtggaccatggagattttgagatggtggtgagtctctggcagcaggagaaggggaggaggagcttcacaactctcctctagctcttattcagtggacttccaaaagttaccacttaccatgggacactgacagagctttctctctgcagtctgagtcgatggtcctggagacagctgaaaatgtcaacaatggcaacccctctcccctggaggccctgctggcaggcgcagagggcttcccccccatgctggacatcccacctgatgcagatgacgagaccatggttgaactagccattgccctgagcctgcagcaggaccaacaaggtagaaggccatgccaagaacaaagcggcccattggccttgcacaggaaaagagggtttggcagttactgatatccagctgacttagtttgtccccagatatggggagaggttgatctgggtgagagctgttcagagatacaggtggagagtgagagggatgtggtgggaatttcagtc

SEQ ID NO: 101 - DNA, 1194 bp, Homo sapiens
actcagcttatggaagaggccagcagtgcccagcagggacccttctatgtcactaatgtgttggaaatcaatcatgaggacctgaaggttagagcacatgttgctatttccttctattccggatttaattatttagcaactcctctattcttttttctttgttcttttataacatttttctgtggacttcatctaactggatctttttttctttttctttgtttttccatctaactttctacctaatagcaaactctcttatcctttagggctaaattaattcaacttcaagttccatttttctcagggtctttgtaagatttacccacagggatctcatgcttagagtatgagagcacctgatcatgattgaaaataataaccagtataaaccggaagttggtagccaaggcaacatgaattactgcaaatatgtgtctttgtgccagcaggacagtaacagccaggtggcgggcggtggtgtgtccgtgtactactcccacgtgttgcagatgttgttcttcagctattgtcaaggcaaatcattcgcagccaccatcagcaggacaaccctggaggtgttgcaactcttccccatcaacatcaaaaggtgggaatgaacatttaatgttcaacttccgcaatgtccacattcaatgtgggatctccactcccactatctgctatctgttctgagttttgtgaaacttaattttctccagccaacctttttttctcccctgctaggtatctttaaaatcaaggaacatccgggtttggcaggttgggttgtctgcacggtttgtcctccactgtggagaccccaagctgtcagaggtagtttaggggtccactgttactcagaaggaaaacctatagttaatgttataaatgtgattttaatgtgagaagggaacctaaatttctcttagacactcattctgccataatgccctttaagtttttctcctggggagacttactctgttagcaaatagaacgtatcagtaatgggggcatggttggatatgggggaggaagagactttcaacaagtttgcaaataatagaggggtgtgtaaggtagtgagagtttcatttagggaggaggaagaagaggcttatggtgtcttcccttgtttcttatctgccattgatgacccattgtagcactttctctcagacctttctttgg

SEQ ID NO: 102 - DNA, 1100 bp, Homo sapiens
atgtgagtgagtcagatacagttcttgccttcatatatatagcttacagtcaaggatgtggacaaaaaacatttatacaataattcaatttaattttaatagagaagagctaggaattctatatatgtgtaataatcattcatataggcttcaggattgaatatatcagtagtgaattggagccggacaaaggaccttaggagaacaaaagaaatgggtcagtctatttggaaatcctgttttcatacactgttttgtaacatctgttatattaaactggaatgccattttgtgtaagtagaattaggtgggaaagagagactcataatgaaacttaggcccactgtaagtgatttaaaatctgattctttcattcattgtgtttattgcaggatacctatgagcatattttattttctatttgtaatcagagtttataggaacgctgggcttatgaccctgataagagcttttttgtgtgtgttcctttcagttcttaggtctggcttccaacattttgaacttcatcacctcttccatgctgaactctcggaacaattttatccgaaactatctgagtgtatctctttcagaacaccatatggccaccctagccagtatcatcaaggaggtggacaaagatggactcaagggtcagtagacaagatatgtgcctgatggattttttttctcatggagtttggctgttggcagggaggtgtggtgcattcaatagctgcttaaataattggcttttctacttgtctttaaggttcatcagatgaagagtttgctgcagctctctatcacttcaaccactcactggtaacctctgaccttcagtcacctaacctgcaggtttgtgtgtgctgtgaccatctaggcaagagctcatgacaccagcttccataggctgcagctccaattgtttgtttgtttgtttttttgagatggagtcttgctctgttacccaggctggagtgcagtgacacggtcttggctcactgcaacctccacctcccaggttcaagcgattctcctgcctcagcctccagagtagctgggattacaggtgtgtgccaccatggctggctaatttt

SEQ ID NO: 103 - DNA, 1071 bp, Homo sapiens
acaggaaaatttccgatagtgattaagtgcgctgaaacaatacattgtgattgatagtgatctgggccgggtgtggtgactcacacctgtgatcccagtactttgggaggtgggtggatcacctgaggttaggagttcaaaaccagcctggccagcatggtgaaaccctgtctctactaaaaatacaaaaattagctgggtgtggtggtgcatgcctgtaatccccgctactctggaggctgaggcaggagaatcgcttgagcctgggaggtggaggtttcagtgagccgggatcacgccatcgtactccagcctggacaacaagagtgaaactccgtcttaaaaaaaaaaaagtgatctgatgtggagctgggcatgctgcttttgattcggaggagggatggcttctgagaaggtgacatttgatccaaatgaaaagagggagtcagctccatgtgaaggtcaaggaaagtacgatggaatgtatcattgaaaagaggatattgaactcttcaagttaaattgtttgggtaggatttagcatttatgatgaaatctgtcagcttgttcagatttttgtgtctgtttgatattgtacagctcgaaatctatgacatgattggacaagcaatcagcagttctcgccgggctggtggtgaggtaagaagcgtatctgtctctgctgcatacttcctatcttgtcctctctgagatgtaaatatctctatgattatgttttttattttgtgcctttcacaacagcactatcagaatttccaattgctgggtgcttggtgcttgttaaacagccttttcctcatactgaacctcagtcctactgcgttggctgataaggggaaagagaaggacccactggctgccctccgagtcagagacatcctttctcgtactaaagagggagtgggctcccctaaactggggcctggaaaagggtatgtgtctacttgattataacttatattttgttttatttcgctaacattttatatttacagggagctagtatgacttcatatcaataggaaaatttgccttcctacctggcttgaa

SEQ ID NO: 104 - DNA, 2214 bp, Homo sapiens
cacctgaggtcaggagttcaagaccagcctggccaacatggtgaaactccatctctactaaaaatacaaaaattagccaggcgtggtggcacacacctgtaatcccaactacttgggaggctgaggcaggagaagcgcttgaacctgggaggcggaggttgctgtgagccgaaatcttgccgcagcactccagcctgggtgacagagtgagactctgtctcaaaaaaaagaaaaaaagaaatatatgtccttattaaaaattacgtgaatgttatagcagcattattcataatagccagaaagtggaaactgcccaaatgtcaatcttaataggtgaatggataaacaaaatatctgtatgtacaatggaacatttttcaaaaaaaaaaaggaattaagtatgaaacatctacaatgtggatgaaccttaaaaacatgttaagtgaaagaagccagtcacaaaaggcctcatattgtatgattccatttatatgaagtatctggaataagcaaatctattagacacagaaagtagatgagtggttgcctaggactgagagggagtttgggaggaaatggagattcactgctactgagtacagagtttcttttggggaggtgataaaaatgctctgaaattgactgtggtggttgtacaattcagaatacactaaacaccattaaattatacactttaagtgggtcagttgtatatagtgcctcaataatatgtaataaaacaatcaattagctcagaaatctgttagagcagggctcagcagggaagcctcatctgttcctcagtgtctcagaggtgatctagcagctggaggctagggttgcctgaagacattcactcaagcatgtggcagttgctgctgagggccagctggaatatcagctgctgtcatcaaccggcacacacgtgacctctgcatgtggcttccaagggagcacatcccaggcaaactaggcagaagccatgtggccttttatgtcccagcctcagaagtccataacatcactcttgtgtcctgggaggagagtcaaagatacctgtgcaaagagcacgtgagagaatggagtggttatctttggaaaataaactgtaacacttggagcaacagtcctgagtggagaaggtgagccccgggacctgccaggagactgtgtcttgactatccccatcagagatgcattttctgctatgtcacatcccatccgttagaatcttccggatactatatctcatagttgatggtctcttgaattcagcaatttcatatctaaagagattcttgaagacaccatgttgtacaccttaaatatatatacaatttttatttgttaattaaaaaataaataagtgaggccaggcgcagtgggtcacgcctggaatcccagcactttgggaggccgaggcaggtggatcacgaggtcaggagttcaagaccagcctggccaatatggtgaaaccccgtctctactaaaaatacaaaaattagccgggcgaggtaacaggtgcctgtagtcccagctactcaggaggctgaggtggaagaattgcttgaacccaggaggccaaggttgcagtgagctgagattgcgccactgcactccagcctgggtgacagagcgagactccgtctcaaaaaaaaataataagtaagtgagaaggaacaaaaaaatctaaagaagcagagctggatctggagagcatctcatatatttaatcatcctcaaactaaggaagctgttctgtgctgtatgaaagactgaaggaggagggggcatcgattttttattttattttatttattttttatttattattatttttttgagacagagtctcactttgttgcccaggctggagtgtagtggcatgatctcggctcactgcaagctccgcctcccaggttcacaccattctcctgcctcagcctcccgagtagctgggactacaggcacccaccaccacacccggctaatttttttgtatttttagtagagatggggtttcactgtgttagccaggatggtctcaatctcctgacctcgtgatccgcctgcctcggcctcccaaagtgctgggattacaggcgtgagccaccatgcctggccgattttttattttaacgttttgttttatcttactgtttttccttaggtgagaaaaatgtacccttccatgcctgtgctttctaaattttg

SEQ ID NO: 105 - DNA, 1524 bp, Homo sapiens
gggaagtttatattatctctgtttttccagcaagaaaagtagctctcaaagaaatttatagaaattgagaagttgatttttaaactctgaaaatgtaaacaatccaaaatagtcaaaccaatttttaaaaagaacaaagttgagattcttgtattagctgattttaaggcttgcagtaaagctacaagacagtgtggtgttggagaagagctggacatataaatcagtagagtaggataaagtccagaaatagacccatacatacatggtcaattcgtttttgacaaggcaatttaatggagaaaggaaaatcttttcaacaaaccatgctaaaacgactaggtttccatatagagaaaaaaatgagcctcgcttaaaagggtcgtagacctaaatataaaagctaaaactataaaacctataagagctttcccgtgtggagtctggagacgacgtgcagaaatggcacctggaaaggggaaggaaaagaaggaagaacaggtcatcaacctcggacctcaggtggctgaaggggagaatgtatttggtgtctgccatatctttgcatccttcaatgacacttttgtccatgtcacggatctttctggcaaacaaaccatctgccgtgtgactggtgggatgaaggtgaaggcagaccgagatgaatcctcgccatatgctgctatgttgaccacccaggatgtggcccagaggtgcaaggagctgggtatcattgccctacacatccaactccgggccacaggaggaaataggaccaagacccttggacctggggcccagtcggccctcagagcccttgcctgctcgggtatgaagatcgggaggattgaggacgtcacccccatcccctctgacagcactctcaggaagggggtcaccgtggtcgccgtctgtgaacaagattcctcaaaatattttctgttaataaattgccttcatgtaaaaaataaataaaaaaagtgaaacctgtaagagaaaatcctttgtgaccttggagtcagaaaagattttggggaatacaaaaagcaagtttcaaagaaaactgatatactggatttgataaaaattaaaaacttttgctctttgaatggcaccattaagaaaacaaaaaggcaagccgcagaatgggaggaaatatttgtaatacacatatctgataaagggcttagaatacataaagatctcttaattttaaggttcccccccacccatagactcagggtctcacatgttgctcaggctactacttctggcctcaagcaatcctcctgccccagtgtccgaaaattctgcaatttaagatgtgagccacttttcccagctttttttttttttttttttttttttttttgagatgggatctcactctgtcgctctggctggagtgcagtggcacagtcacgggagcctcagcctcctggactcatgatcctcccacatcagcctcctaagtagctaggactacaggtgcgtgctaccgcatcaggctaattaaaaaaaaat

SEQ ID NO: 106 - DNA, 1524 bp, Homo sapiens; identical to SEQ ID NO: 105

SEQ ID NO: 107 - DNA, 1194 bp, Homo sapiens
caagcgattctcccacctcagcctcctgagttgggtcctacaggcgcacacgaccacgcccagctaattttttgtatttttagtagagttggggtttcaccatgttagccaggatggtctcgatctcctgacctcgtgatccactcacctcagcctcccaaaatcctggggttacagatgtgagctaccactcacggcccaaatcttcttgatcatatgtttaaatatattttttaatatttggagcatgagttgtcacttcttgtttgccttttttataaggaaatgttggagagttacatcattgctaatgtagaaatgttaagtggaaaaatatacagtttggtaaaataaactagattctacatttatttgtgggtttttttcccctcctttctttccacagcacttttgatatcaagcaagtggcttcctttttgagatattaaaaaaaaaaagaaaaggaaaaaagtaaatgaagcccaactacctaaccctttcttatttgtatttgttttagtattgtgaagttgtgttaaatagtactagctagaaatacaaatttctggttatcatttctcttccctgtggcacttgacattttaattgtcttaaagtttttgaagtacatcttctggccccttgagtactgccagaggcaaaagatgtttgtttcttattcattccacttttgtctcctgggatcccttctgtagcctaaagtatggctgggaaatggacttgagaagattggcttgaattagatcataatcatgtgtgatcccatcatgaattcattggaatttgtgttgcatgtaaggcaatctttcctgttgtaaatcttccttttttaatgtacatatattttgaaaaatatgaataaacatgaaattttaaaagctgctgaaccgtagcttatatttaaaggttttgagtatagtatatcctcagaagtagctaagtgtcgccctcactttaagtcttttctactccttgaaatgaacaccatcattttcctttttaaatacaagctccagttcatgtgttttggaattcttatagagggtaaacgatgtttccagatacattgaatgctaattacttaatgaatcaaaggtttaaaaaatcattttgtattttattaaagactgcttccaagatcatagagtacaatcatgttcaataaatgttcaa

SEQ ID NO: 108 - DNA, 1154 bp, Homo sapiens
gaattggctttgagaatctgaaagtaaaatttgctattgatgtgtatctatataaagtgatggcagttactttttaatttttaatttttttttttttttttttgcaggagagctgatagtattcattccactcttttcataattggtcagaacagttagaaattgcttttaactatagtcatgcattgcttaacaatgggtatacattctgagagatacatctttaggcgatttcatcatcgtgccaacatcataaagtgtacttacacaaacctacgtggtacagcctactacatacctaggctttatgggatagtctgttgcttctaggctacaaacctgtacagcatgttactgtactaaatactgtaggcagttataacacaacggtaagtatttgtgtatttaaacatagaaaaggtacagtaaaaatataatataaaagataaaaaatggtatacctgtgtaggacacctaccatgaatggaccttaaaggattggaagttgtttgggtgagtgagtgagtggtaagtgaatgcaaaggcctaggactactgtgtgcaacttttaaaactaaaaagtttttatttttagcaacttttaaaactaaaaagtttttatttttaaaaacttttaaaactttaccaaaaacaaagacacaagccggacgcaatggtgcacagctgtagccctagctacttaggaagctgaggtggggggattgcttgagtcctgaaatttgaatctagattgggcaacgttgtgagacctcatatttataaaaaaacaaaactaagacacatacacacaccttaacctaggcctgcacaaggtcagggtcatcaatatcactgtcttccacctccagatcttgtcccactcaaggccttcaggggcagcaacacacatggacctgtcatttcctatgataacagtgctgtcttttggaataccttctgaaggacctgcttgaggctgttttacagttaactttttttttgtaggtagaaaacatatactctaatgataaaaagtatagtatagtaaacacataaactagtagcatagctgtttattatcaggtattatgtataattgtaatgtgctttttttttttttttgagatggagtcttactctgtcacccaggttgg

SEQ ID NO: 109 - DNA, 1126 bp, Homo sapiens
gtcctctgcccgccccgattggctgagggctgcgcatgctccgaggcccgccgcggtccggcgtccgcccgcgccctcccctcaccccactccctcagcggttttcggagccggttcgaaagatgccggcggcggtgactggctgcggcgggcccgccccccgggttctccgcccccgccgccgccattacggagctcccagtggtgagtgtgcggagcgccgaggctcgcgttccgccgctgcttccgtcgccggggcgggcgccgcggtgtccctgccgagcgtgagccccgaactgtcaccgcgccgagccccagcctcatccgtcggtgtccgcggtccgagctttccccgcctcgctggcggcccgcgctctcccccgccgtgcgcgttcgccgctgtggcctgtagctacctcgcctcgctgctttgtctccgctgctcttgccgtccttcccgcggccttctgcgggcggggctgtcggctgtcgctttgctgctccgcgacggcggccttgagtctcgctcccccggtgggaaacgtagaactggttactcgccaccttaggcggtggggtttgaatgagagcggtgcctcggtaggtcgtcagaaagttacagtcgcccatctgagcgtttgtaagagatggaggcaggagtggtgaggtgagagccccagatctgagggttggtactgcattaacagctgtgaccggggacagccacttaacctttttgagaaagagttgtctcccgtacggagaccggaccgggtgaactgtgctgccgcatccgcgtgcacgttctctctgttgtttattgtgcttcctgactttgcattgcattaaaaagtgagaatccaattcgaaataacgtctaaaaatcgcctggggctttttgagcacgctgtcttgtcttagagtgaaattagaggtgactagtgtcatttttgaaaggtgctctaattttgtttaacctgacataggcaaaaaacttgttagctttttgatttttcattgctcttctcaaaagtttagtgtaatttgtttcaaaatagaagtaacattttaaagtttgctgggttggttggttttggctttgtttttaagcttgcttggaagattg

SEQ ID NO: 110 - DNA, 1205 bp, Homo sapiens
atttcacttgtagtaaagttgtgcttggaagattaaacatgagatatcaggcaccttaacttcctgtgctccctgcctaacattccaatctctttcttcttattctttattgaatactcacatcccactgcctgtctctagccaacatgaaatttttatgtctgttgatctgttttctgacagtcatgtaaagacactaatgaattaattttgtagtatttgtattttttatttttaaaattaatgggtattgtacaagaagaatgattagaaactgcttattacagttagcaaattcataaaccatcttaaacaggaggacctggatgcattctctagaccaaacagttttttgtggaaactggagtccagggaagtgcttcaggggccacatggatcccagtttaatgagaacagctccaatttctgtttctattaaattggcattccaaacaaatttttgttgctaaaattggttctacttcactgaagaagaaaaaaataaaagaaaaactattcttctagaatatttcctataattgacttgtggtcccttatgttacagcctacaattgatgaaaaaattcagctggtacctaaagcacagctaggcagctggggaaaaggcagcagtggtggagcaaaggcaagtgagactggtaagtgtgtgtgtcccttctcaaacctggctgtggcttgttagcatttgccttacagcgcattcccatagtcatcgaatgatggtttttgggaaagatgtgtagactaatcatgcctaaaattttattggtagccctttcctttcaacatagatcctttctcaggatccttaaataattttaagtatttttttaatttcaattcattcatttagactatttaattaagacctttatttatttatttatttatttatttatttatatatttttgagatgggatcccgctctgtcacccaggctggagtgtagtggcatgatcacaactcaccacagcctcaaccacctaggttcaagcaatcttcctgcctcagtctcctgagtagctgggactacaggtgcacgccatcacacctggctgatttttttttttttttttaattttttgtagagatggagtctcactgtgttgcctaggctagtcttgcactcgtgggctgcagtgatcctcccaccttggcctcctgcgtgctgggattacagtta

SEQ ID NO: 111 - DNA, 1069 bp, Homo sapiens
agacttattgtccactcatagtacattctttactaaccataagtctacagcatcaaaactaaaatgagcagtagcaggattcgtataggcaagtgctctatatcctgatgaatatttttttttaattctaaaatttgaccctagtatagaggatctcaaaatatcttgtcttgtgccattcagttggtcctcagtatctagtgagccagtctgctgattatgtatagcccctacttggaaatttaaggcctaaatcattcccagcgtatcagaaaaccattgttttagcctaatggctctaagagtagcccaggagaagctgccatggatgagattggacttctgcgggttccaaagctggtgcttaccgtttcagctgatgtaacttttcagtaaaaatttttgttatcttttgtggcagggaatgctctggaacatgtattaagctttcttttgctttttcatgcagatcaaccaacccaaattgccaatgcgaactctggatcctcgaattttgcctcgaggaccagactttacaccagcctttgctgattttggaaggcagacacctggtggaagaggcgtacctgtaagtgcaagttccctacaactcacttagttagacactggcacagactccatgaaatcctacctcatggcaagacagcagcttttattcgttgattctagtcaagaagaagaagaagaggcaaagactatcctttccatactcatattaaagcagataaagaatacacttgagttctttttacttggcagaagctagtctgcattaatttggtcttgattttttttttccctattttttcaattgaggtgacctgcaaataggtttaaaaatagtgccaaccatggccagggatggtggctcaggtctgtaatgctagcactttgtggggtcaaggcaggaggatcacttgaggtcaggagttcaaggtcagcctgacaacaaagagagaccctgtctctaccacaaaaaaaaaaaaaaaaagaaaagaaaaaaataggccaggcatgctggcgcatgcttatagtcctagtcccagct

SEQ ID NO: 112 - DNA, 1225 bp, Homo sapiens
aaaaaattataagcaatcggcttgtctgcagggaaacatctgtgctataatttccagcgttaatggatatagtagaaaagttggaaatgatttaaaaagatgaagtccatggaggtttattttggtaaataggatttatgtgttttgatttctctttaaacctgtttttaaagctattttattgaatacgttttcttcctctccacctgaagcaacaaatagcaagattcttttagaggtccattcttaatacaactatttggatgcctggtatttgtagagtacatactgtatgttagatgtaaattgatttatttgggaaagaccaccacacaaagttattattttccttatgaactgccacttgtatatttaagtcatttgtttctctgagaagaatattctaaagtttatgtgactttgtattctaaatttcagaagaattaggagcttagtcctagaatcaagaaattctgcttctgctatttattagttatctggatatactttttattttataggggtgagattgcttgtagaatctctctctgctaacatcctgttactggactttttggcaagtcctttttgttgtcatattttttccttacacactttctttgaactcttcctccatctccttactctgtggaaatttatgtaacactactttccttagaaatccttccacttcaacattgttagtgttcttatattctttatatcttggaaggcaactcagcaacctcctggcccttcaccgctttctgtaggttgtttgcctgcaacccttgtgccgaaaatgcataaacagctctctctccctcttttttttttttttttttgccatcattcctcatttttctggacccattttctcattgtttgagaattttagtgtctggctcataatttacttttctgttttgctttctgccatccacaaagatgacttgtgacattcattgttgtgctgtccaaccattgcctgtgggctcctggatctaccctgtttgttgttgttgttgttgttgtgttttttttttgagacagtctcactctgctgcacaggctggagtgcagtggtgtgatcttggctcactgcggcccacacctcctgggttcaagtgattctcctgcctcagccacccaaatagctgggattacaggcatgtgccacgctgcctggctaatttttgtatttttagtaggggtggagtttcac

SEQ ID NO: 113 - DNA, 1183 bp, Homo sapiens
gacatgtataatattgtcttgagtttagtcaggcaaatgggtatatatgtcttttcagatttattgtagtggacgggagcatgctgattgctgggagagaaatgagaagacaagcttgattcaggactgtttttataagggatcaaatgaaaaaatttacttaaaagtcacaaactataaaatgtagtgtacaaaggctagctatctttatagaactaagaactgtgaatttcagtgactcagcaatcaataaaaagtcaataacacacacatcttgtagatgatggtcattttaaattttctcaatgaatagtaaagagagattaacttagttatatttaaagcaaatagaatcaattaagtataaagaatgaatattataaattgatatatagaacgactattagaaaataaaaatgttgggctgggtgaggtggctcttgcttataatcccagcactttgggaggctgaggtgggcagttcacttgcgctcaggagtttcagaccagtctgggcaatgtggggaaaccccatctctacaaaaattagccgggtatggcggcgtgggcctctcgtctcacctgattgggaggctaaagtgggagcatcccctgagtccagaaggtcaaggctgcagtgagccatgcttgtgccactgcactccagctttggcggcagagtgagaccctgtctccaaaaaaaaaaaaaagaaaagaaaagaaatttgttataatttactcactaaaccaacaaactttttttctcagtgcatacatttatttacgtttttttccctctaatgtctagtcatgcttataatgtaacacgaagggctaagtctgatttccaagcttttcatcagttgatggacccttttctctgtgaagaatgatgaactctcaagctatctaaattctgtctcccttgtgtgtgtgttctctgtaaagtagtttgtttcatagaaaacccctaagtaggtgacatattgcagaaaccatgttgccaacattttgttatacttttcatgtaaaacatatttccatttctcttcactgccagtgtttctccagtttcaagtactacactatattattcaaaattctgtttattactccacatcttactactcttaatcaccatgaaaattgcccatcttcttttatagttcagtttcaaattttc

SEQ ID NO: 114 - DNA, 1217 bp, Homo sapiens
gcctcagcctcctgcgtagctgggactacaggcacatgccaccacacccaggtaatttaaaaaatatttttagtagagatggggttttgccatgttggccagcctggtcccaaactcctggcctcaagtgatttgcccacctcggcctcccaaagtgtataaataaaaatttttgaaaaatattttgtatgtttaataatttgttcattataatgaaatttattttgtgctacagaagaaataaatgtatcttactgtacattatagacataacgttagtaaatggaattccctgtagttgcacacctccttggttaactgtttgaagtctttctccagactttctatgcccattacagcattttaaattttaactaaaatgttgtatactgttttatagtattctttcttagttatccttttatagttttctttcttttccttttcccctttcctttcctttccttctctttctccttcttctccttcttcctttcctttgctctcctttctctttctttctttgtctctctttctctctcccctcccctcctctcctttatttttttcctttctttcttgacgaattctcactttgtcgcccaggcttgagtacagtggcgcaatatcggctcactgcaacctctgcctcccaggttcaagttattctccagcctcaacctccctagtagctgggattacaggcacccaccaccacacctagctaatttttgtatttttagtagagacagggtttcatcatgttggtcaggctggtcttgaactcctaacctcaagtgatctgcctgtctcggcctcccagagtgctgggattacaggcatgagccaccacatttggcctattttttctttttaatgtaatttctttagtaacagttttatgtttcagtaatagatatctatttccattttttggaaatgactagaattacttatggatgctgcttaatttatttttatgcaattctttctaatctacttgagttatttctgtttttcttatattatgaaccatgctgcactcaacatttttatacagcttcttttacttgaatggatatttttggggataaattatagaagcagatcaaaatgtatgaagggaagtatgtcagagtatgaagtgggtaaaaaggttgtggaaattaagtgttagctattatgagttttaaatggtttggttcctgattccattt

SEQ ID NO: 115 - DNA, 1155 bp, Homo sapiens
tcagttcataagggcaccagtgtgaaattagttcatgataaggacaattgtgagaaacctccagttggtcaaatagccttcggaaacttactgctcattattctttctgatttttcttggaatattttgagagaaaagtcattattcccttgtatttcagaatcacgttaatgaggtagcttaactgctattcagctgcaggctcaactgagtgaaaaaggacaactagtaatggtaaactgaaggaaagactagtggaatcttgagaaagaataagagaaaaaagagaaatgttattgttttgatattacagattaagctaaccacagtacctgattcttagcaggtgcacaataattatttagtcaataattaatggagcaaatatttattaagtaacattgtatgtctgtgctgtctattgaagaatatacaaaagaaacctgaggctgggtgtggtggctcacacctgtaatcccagcactttgggaggctagacagaaggagcacttgagcctaggagtaggaagaccaacctgggcaacatagggaaaccctgtctctaccaaaaaaaaaattagccaggtgtagtggtgagcaggagggtcactctagcccaggaggttgaagctgcagtgagttgtgatcataccactgcactccagcctgggtaagaaagagagcaagatcttctcttaaaaaaaaacaaacaaaaaaaaactacaagaaaaaaacagtactctcaaatggaggtacgagatcagaaccttgaaagtcagtgaggactaggggaataggaagtagtatttgggctgacttgaagttgaggggaaggacatctacagttgagggaaatggtatgggcagagtcgtggtcagtggttaggaaatggtgtatggtgtatatggggtagtccgaagatccactgggataaaatagaaagcagcaaatgtgcatctgacaattttggagaacctttggatatctaactgtataatttattattcatttattattattttttgagatagggtcttgctttgttgcctaggctggagtgcagtggtacgatcatggctcactgcagcctcgacctctcaggctcacgcagtacttctgcctcaacctcccaagcagtagggaccacaggtggt

SEQ ID NO: 116 - DNA, 1148 bp, Homo sapiens
ttaagtttctgaattgtgctaccacgtaaattactcattacctgcatctttgagctgttttggcaattgaacagaaataaaaggaaacctgtagtaggtgtccttgatgtacagagtagtaaggaccacagtgctgaatgtgacactgtttggtgaattgggtggctttttgggatacagctgtgtttcaagtatgctttttctcagtgcatttcatagaaggacttataaaagctctgagttggttgcaacattcaagtagttacaaaagctgaaacttaattttcttttgaataaaaagcacttgttaaagagataaatttaagtgtaagttccagtgtagataattttaaaccaattttagtcatatggaacacttacttttgtgtggctttaagtttttactttgcctcatgccattgaagctaaaattaatcttcctcttgatgtgtttcacagctcttattgttttctctttgcttttacacactgaaaggttacaattgctaaaatagaaaattttattatataaacagtaaaggaagtataggttgtagatttcatcagacataccagtggtgaagtgttatcaactggtaatggggtattgattaaaaaaggattgaaatagagcagttctacttttctaccctgagggagtatgggaatttgtatttgacgcaagtggtcattgttcaataagtggataacatttaagcatcttggcaggagtgcatagctggagttagcactgttcatggcttgaatagatctccagaccctcaaagtatgtgggtatagttgtgtttgcattgaattaataagttcagacagttttatttatttatttttgagacagagtcttgctttgtcgcccaggctggagtgcagtggtgtaatctcggctcactgcaacctacgccggctggattccagccattctcatgcctcagcctcctgagtagctgggattacaggcgtgtgccaccaggtccaggtaattttttgtaaggcgtgatcagactgggtttcaccatgttgaccaggctggtctcgaactcctggcttcaggtgatccgcctgcctcagcctcccaaagtgctgggattacaggcattgagccaccgcacctggccctgatctggtga

SEQ ID NO: 117 - DNA, 1178 bp, Homo sapiens
gggcatcctttttacagcacctttaggtagtcatggccatcatgacatttcccctctaaaaataaagacagtgtcctacctaatactaataatgtgctcataaataagaaaactaacgaaaactccctaatgtcctctaatacccatactcagatatgtcttgaacagttttttcctctcaaatcagtatgtaattaggatatgtgttgtttgtatcactttagacttagaatttggaacagttactctgtctccgcacccgctttctttcccttcttcttctctttttgagacagagtttcgctcttgttgcccaggctggagtgcagtggcgcaatctcggctcaccgcagcctccgcctcccaggttcaagcagttctcctgccttggccccctagtagctgggattacaggcatgagccaccatgcccggctaattttgcatttttagtagagaggggggtttctccattttagtcaggctggtctcgaactcctgacctcaggtgatctgcccacttcggcctcccagagtgttgggattacaggcgtgagccaccatgccaggctctttgccttcttgacattgaacttggaccagtttgatttcttttagattgttccatgttctgtatttggctgattgcttctttatgttacttattttaatttatttatatatcccctatattccaatttctgtaaattgaaaggtgggcgtaaatgtttgattacattccagtataacatttttgcaagaatattttatgagtgagtctgtatattttgccattaggacaagtggtaaagtcttgtttttagtcaaactaagtttgatttttttttattaatgttccatattttatttttaaattcacaacagtttatacttagtttccatgtcattctcaagaagagaagaaaatgtttaaaattcaggttgttcatgaactaagttttgtaatcctcaagattttcagtttattatgtttttctgatgtaaggtcttttttataaaagagacagagtctcactctgtcagcagactggagtccagtggtgcgattgtagctcactgcagcctggaaccactgggctcaaatgatcctcctgcctcagcctccaagtagctgggactacaggctcatgccaccacgcctggctaatttttggttga

SEQ ID NO: 118 - DNA, 1126 bp, Homo sapiens
ctccgcctcccgggttcaagcgagccttctgcctcagtctctggagtaggtgggactacaggcgcgtgccaccatgcctggcacatttttgaatttttagtagagaacggggtttcaccatattagccaggctggtctcaaactcctgacctcaagtgatccgcctgcctcgacctcccaaaatgctgggattacaggcatgagctaccacaccccgcccggtctgtcctgtttactgctgccaaagtgtgtccctggcctaaaatcacagcagatgtctgcttagtacgtcataaccaaaccttttggaacctatcctctgcctaacacgttggtgttctcatacagtgcagtcttggaacaaagtacccattaaattatctgaattccttatcgtactatggcattgccattgtgctgttattactcaagtttggtggacctgtgcccagaagtagaattattgaaacaaaaacattgttgtcatttaacatttttgagatgttttctttagttatttttcctgcagggttatatgatattttgatttataagaaatatatgcttagtctttgtactacttctggcacagctcctaaaacctttgggatctctgaagtgactaagtgtctttttgtatgctaatgaaatgactgatggctgggagctcttggtagcctccacatgggctggttgccaggagaaccaaccacgatgagaggtttagaactttttagtctgacctctgggaggggagaggactaaaggttgctaatctccagtggccagtgattcaatcagtcatgcctatgtaatcaagtctttttttttttttttttttgagacggagtgccactctgtcacccaggctggtgtggggtggcacaatcacgatctcggctcactgcaacctccgcctcccgggttcaagcagttctctgcctcagcctccagagtagctgggattacaagcacctgccaccatacctggctaagttttgtatttttagtagagtcagggtttcaccatcttggccaggttggtcttgaactcctgacctcataatccaccagcctcggcctcccactgcgcccaggcttttttttttttttggagacagggtct

SEQ ID NO: 119 - DNA, 1175 bp, Homo sapiens
caggatcaggaggccaagccgcagactgcacctgccttgagaccaggagccccatctcatctcacctcctagccggctattgaccctttgccctctgtccccagcacttggggtcacccccacggtccggatcgagtcatcgtcttcgcaagtggccgaggggcagaccctggacctgaactgcctcgttgctggtcaggcccatgcccaggtcacgtggcacaagcgcgggggcagcctcccggcccggcaccaggtaggaggcaggagctcaggaagcctgaaggaccctgtagctgcagtacaagagcataggcttgaccgggcgcagtggctcacgcctgtaatcccggcactttgggaggccaaggcaggaagatcacgaggtcaggagtttgagaccagcctgaccaacataatgaaaccccatctctactgaaaatccacaaattagccgggcgtggtggtgcgcgcctgtaatcccagctactcgggaggctgaggcaggagaatcgcctgaacccaggaggcggaggttgcagtgagccgagatcgtgccgttgcactccagcctgggcgacagagcaagactccgtctcaaaaaaaaaaaaccacaggctttgaactcaggcatgttcgagttcagacactgttccgctacttgcatgctgtgtgactttaggccagtcacttgtcacttgattctctgaccctcagtgtcctatgattttatgtacctctaagaaaaagcttccatttgtaaggttattcattgtagatgcatcttgattttggagacactgaaatgtgtgtctagaattgatgggatgtggtgtgagtgtgtacccagctcactggggctcctctggtctaccaccccgctgctggacaagagtcccccttccccatgtgaaggacagggacagtgatccagagctgatggccaggccttgggggtcagagtgaggggccaaatgggctcatgctgcctacctcatctcccctgtagcatgtcaacaaacactggtccccacttttctctggtgccaagtctcagtcgtccctggcatgggtgaggtgggacgctagacccagtcctgacactggggcggtagataggaagggagaaggtggttttccctggaagagtttccatcgagttccagctggctggg

SEQ ID NO: 120 - DNA, 1132 bp, Homo sapiens
tagttaattttgagtaattgtattgtcagaaaagtgattagtactatttttttttgttgtttcaaaaaaaaaatttttgtgtgtgtgtgttttttttttttttttttttgttgtttaaaagcaaggcatgcttgtggatgactctgtaacagactaattggaattgttgaagctgctccctggttccactctggagagtaatctgggacatcttagtgttttgttttgtttttttccctcctcttttttttgggggggagtgtgtgtggggtttgttttttagtcttgtttttttaattcattaaccagtggttagcccttaaggggaggaggacggattgattccacattccacttcctagatctagtttagaaaacatgttccccatctggtgctcttaggaaggagtatagtaaatgcctcatttaataacatactcctttttgaaagttgccttttctctccacccttgagtagatccagtatttgatgaaactcatgaaagtgggtggagcccatcttgcccctcctcttttctaggacgcactatatgtgactgtgactttcaaggacatttgtttgccatttgctgatttttttgggaagttaatttctaacttctttcactgataaatgaagaaaagtattgcacctttgaaatgcaccaaatgaattgagtttgtaattaaaaaaatttttttccctttcagtcattgtcttatatgcttagcatagatttgcagctcagtagtatatggtgttcctagaatgcagctgaagacctgttatgtagaggaaatacgaggggtggtgctagaagacagacatctgtggaatgattcacatcctctcaagttaggaggatggaggcctgcttcattaagaagctgggggtagggtgggggtggggagaacacttaacaacatggggaccagtcaggggaatccccttatttctgttttgcatatgaggaaccctagagcagccaggtgaggctctctagtttaataaaaatcatggaaagactcttaatgcagactcttcttaagtgttaatagggattttttcagcttattttggttgcagtttccaatttttaaaaatgttgaggtaatctttcccaccttccc

SEQ ID NO: 121 - DNA, 1168 bp, Homo sapiens
gtccaagaaggggatgggggaggaggcccaggttgcaggaggtgctggaaggaaggaggaggagagatgggagaagagagatccagcaagcaaattctagtgtcacctaaacctgatgagaccaggagcttggaatgccattctccacatgcccagtatatacttccctcactcttaaggaaagagccagtgttctggccagtgactaccgtcagcatccctgatagcccttcccagtccatatagcacttctccatacagtgtttcacttgggcctccagcaaccgtaatggtggaagtgtgaggtcaggaagcctgtgtagagtggaggctttagaattagaactgggtccagtcctggccctgcggtatcttcatctctactttacagatgaggttgagaggtttatgaacttgcttcagattcctcaggctgccagcaatgaggaatgagaccccaggtcttctgatgcctagaaagaggcttcatgaggaaagaagggagaagcaagcatctatagagctctggttaggtgctggttaaagtcctgcttaggaatctgcttgtttctgtgtacttacgatctgtttgttttctttcaatttcctagtaaaagatgtttttgaaaaatacctccctgtttggctgaactgaagggaaaaggactcgtcaactcatctataccttggttcaggcgagatgctctagagccaggtgtgggagcagcccaaaaggggtttggactggattgtcagccccttcctgctgcaggcaggcacctgacagccaatctgacaggcctggagctgggcctgaagttcttctgccacgccagccagggaaaggggtggggggagggctgctgtttccagctatggctttgtcagctctagcaatgtgactccaggcttcctcatcccctgccttaaagagaaaactgtagagcgatgtgtaattctccagcagagtgacagagttcagcttagcccagccagagacagatttcatgctcctgtatggggaggaggggtaggctcaaggctctgaagccctctggccaggaagcaccaagggtaggtctacgccagtagtggagtgagggaagtggagggtctgtgggactgaggaggggctctgataacatattccatcctgaccagcaggctg

SEQ ID NO: 122 - DNA, 1173 bp, Homo sapiens
atcctttctaggtgccatcagagaaggaagggtatgctggtggagcatgcacacaaatgatttaatacattgtagtgcatgttgggatagagcaaaggagggcagattcaaggaagacttccaggagacgagtcctgaactcaatctcttaattcattcaactaagatttaatgtaggagatctagattctgtgggggttcagatgaggtagggattacttctgttttatatgaggtaggatgacaatgggggtaggtggtagtagaaattagaatatttctttgggatgatacttgaagtaagccaggattttagatacagaggtatatgagaagggtgtgttctaagatgataaagcagaaggaactaaaatacagaagtcaaatggcacgacgtataccagctgtatttactgaaatatgcctagaggtgctgtgttaagcctcaggtacacaaaaacataaaacatgaccctgccttcataattagaactcaagtgagatgtttgaagtgtaatacaatgtgatttgtatgaaaaatcacattgtgtgtgtggtaggaggtatagattagtttttaagaaggcgtaattttcttgactggtggttggttctgtttggtttgactcatgggtgcctgaaataaaaggagtaggaaatacagatgtaaaggtaagttgggctgttatttactgttgtttactttggcagaaatggtctaaaaaactaagcatgtgacgagtaatgagaggggagcagcaggagtctgagtttgggttccttttcttccattagttcctgtgtgactctcccttgtgatcattgatctttactggaggtacagagtacctggtctggtcctcagttttaagaaaatgaattacctagtatactccaaggcccaacttctgtaccccatagttggaaattgtcagctttcctacaaagattgatttatgagctgctctttaaagcaacttcttataacattttcaaccttttgactgttcacaattaagagtccttcaatcttttcccatcccaatagatgaaatggcaagacaaaatttccatgagttatattggacaggtttctatgcattacctgttgttgcataacaaattacccccctaaaacttagcagcttaaaacaaacatttattatcctctac

SEQ ID NO: 123 - DNA, 1142 bp, Homo sapiens
acgcacacactttaaaatgtaactggatttgctatataggccagagaaatatggctgttacgatgaaggcgtaacttctctggttcttgattatttacaccattagagaagaatgcaaatatgaatagctcagagtagtttaactttgaagtgagagtttatatgcacctttatatgtgggataactgatgtctttggaatagacttcaaatgaatgataaaaacacctgtaaagtgataggacctctactttttctcatgtccaatgttcagtttcttataaaccaggcatgaagagaaacaaaaagtaattaattctccagatcatgaagttgtcttcaacctaagcacagaggtataataattacatttctcagaagttccccctctgttttgagtctcaagggcaattgagatgtcagtgaggctgtgattaaatgtattggatattagaggattttaaatacaaacaagtattataggtgttaccactgaccccgaaggtaagatttactgtgaaaatttataatgcaaggaagaatgatcaagttggctgtcagaacaacaaaatattacaaaccaggatgtctaagagcagaagtccgtggttgccacctctcaagcctcttagcttaatccaatctaggatgcatttccactctgcaacaaacagtatttatttttgccttatttgcagataacagttttaatgcaggtactgcccatggattagctttgagcagtgtctttttgctttggtttttttatttgtttggtttgttttgagactgagtctcagtcctccaggctggagtgcagtggtgtgactttggctcactgcaacctctgcctcccgggttcaagcgagtctcctgcctcagcctcccaagtagctgagtctacaggcgtgagccaccatccccggccaagcagtatctttttgctttgaaagtgacttacatgtacatttgttttccttgtgaatgtttctttttaactgcaaactaagaaacattgagcccagcattcatatatttgcaaactctgtcttacttaatttctcagtttttttcctcagaaaaaatgaaattccttttcttttttaaatttattttttctttatttttctttataaagtgaag

SEQ ID NO: 124 - DNA, 1167 bp, Homo sapiens
cagattactacggctatgaagattactatgatgattactatggttatgattatcacgactatcgtggaggctatgaagatccctactacggctatgatgatggctatgcagtaagaggaagaggaggaggaaggggagggcgaggtgctccaccaccaccaagggggaggggagcaccacctccaagaggtagagctggctattcacagaggggggcacctttgggaccaccaagaggctctaggggtggcagagggggtcctgctcaacagcagagaggccgtggttcccgtggatctcggggcaatcgtgggggcaatgtaggaggcaagagaaaggcagatgggtacaaccagcctgattccaagcgtcgtcagaccaacaaccaacagaactggggttcccaacccatcgctcagcagccgcttcagcaaggtggtgactattctggtaactatggttacaataatgacaaccaggaattttatcaggatacttatgggcaacagtggaagtagacaagtaagggcttgaaaatgatactggcaagatacgattggctctagatctacattcttcaaaaaaaaaaattggcttaactgtttcatctttaagtagcattttgctgccatttgtattgggctgaagaaatcactattgtgtatatactcaagtctttttatttttcctcttttcataaatgctcttggacattattgggcttgcagagttcccttattctggggattacaatgcttttatcgtttcaggcttcattttagcttcaaaacaagctgggcacactgttaaatcatgattttgcagaacctttggttttggacagtttcatttttttggatttgggatagattacataggagtatggagtatgctgtaaataaaaatacaagctagtgctttgtcttagtagttttaagaaattaaagcaaacaaatttaagttttcttgtattgaaaataacctatgattgtatgttttgcattcctagaagtaggttaactgtgtttttaaattgttataacttcacacctttttgaaatctgccctacaaaatttgtttggcttaaacgtcaaaagccgtgacaatttgttctttgatgtgattgtatttccaatttcttgttcatgtaagatttcaataaaact

SEQ ID NO: 125 - DNA, 1220 bp, Homo sapiens
ttctgactgcagcaaagtggatgctcagataaacaaatgcatttcagtttatctttggtgttcaggagggaaagccttttgacactttttggagagtggaaagaattacttagtaaaatttgttttcagattttcctccacctcttaggtggttagcatcaactgtaaccgtctgtaatttgaaggtttatccttggaaaacgcaatgtattcttatcactctaatataaaccaaaatttgttgtattaatgcataatctgtaatacagtatgtacatcagatttaactttcaagacttatacctttgggggagtgggaaatggatgttaggatttggcgggggaggtttgtggatatggagattgaaattcatgtttttggttgttgacattttatctttattttcatatttgtcctggacctttctatgtagtatttggatagctgcgtatatgcatatagttaaatgaaaatacagtttgttagtgatcatattgaatgtaacaattcttgattaaacgtcagtagagcttagattaccccttttgttgcaataacgttacccctttcaatttaatttttaggattggtagcttatgtcgatcttgatgaaagagcaattgatgctctcagggaatttaatgaagaaggagctctgtctgtactacagcagttcaaggaaagtgacttatcacatgttcaggtaaggtcgttactcagaaatgtctttgaacaattagtaatctgaaattattttactattactttttttcctatggagaagtggtattttttgtttgtgactacctcttcttttaaaaaattagtttaaaggaaaaaaactgcttgtggcagagtttcagaagcccaagtataaagcaaaagttttctcccacccccttgtgcagtaagttattttaaaaacttaaaattaaagccaagttttgatggttgttactataggtttttacatgttactcagctttttaacatttgggggttatttgatcctgttttattatcttggaggaaaatgtaggtgggaggaatagtttccgacatctggcaaagacagtctagatacagtcacatatcaacaagtggaagactgtgttttcccagggtagaaggtaagctccctgaggtctatactgccttactgctgtctgctccaatctctggcacatagtaaccactcggcaaatacttgttgaatgaa

SEQ ID NO: 126 - DNA, 1199 bp, Homo sapiens
tgcattcagctggagttcctcggaacgggaggactcgcagctctccctttccccagccaggatgagggaattagacaatggaagtcgagcactggggaaagcaggcattctgcgtggggaagagctcccagctcgctgtagccttggagagggaagtgatggaaaaagaatatagcagcttattagggactcccaccctcttcaagttataaatatccccagaaccttggctacgtgcccggaagcctgttgtctctaactgtacaggagacttctctgcctgggctgggaaaggggcctttcttttgttttgcagatagatccacccactgaggaacttgaaaatttttttcaaacataactccaggccttgcttttattagtgagtgtcctgttcccagtgcccggttatttatgattaaattactgaagtgtctaaaaagaacagaaggacccaccccagccataatgcagactttcccattccttctctttccacccgcaactgtggggctaagaattcttaagatgtcacagaattataccatcctacctcatctaaagtcgatccgaggctggtccgatggtagtgggttaccagaacttaataacattaataactctaaagttagtatacaaccccccactgctaaatttggctataaaaataaaattgatctgagcaccatataaaatggaatcctggagggtcccctagaggcagtatccccagtggaaagagcgtgggcctcaaggtcagacaagcctggtttggaatccaggctgtgtatcctttggaaagtcattgaatccaggcccatttccttttctctaaaatgagggtcatcatacctaaggatgttgtgaggcgtgagtgagatgattaaagcgttccagagagtgcgctcttggatgatagccgttactttttattaaccctggctttggtggtaagggaaacttccagaaatgcttgtgggtatattggatagctcagaaaatctgggaaatcaaagtggctcaatagctgtgaggaactgtgggtgactttatcctcacatcgtgtttcttccagaaattcagacgcaacagaggttaggccagtttggtgggttccagtgagcggtgtgttgagcctagtagagcataggtacttggggttgccaaaaccccagcaagttgaggcttcacgctcaggg

SEQ ID NO: 127 - DNA, 1201 bp, Homo sapiens
agcgggggcagatggggtgaatggagggttctgaggcaggggggtccgggccttttcctggtcccggggacttgagacttgctcggtgctaggaaaccttagtcggttgctccgcttagggaaggtgccagcctttagacagcttccgaataggatgctggacgtcgcataaccacgtgtttcctgttaactgagcaattaagttctgtttcttcgctcactccccttagttggccttacaatgggggcgctctttgttaccctgagcctcttagggttcgatctcagtgtccgtatcttttaacactcaataactgtcctgagttttctcttcacccgttccgttcgtggaggaaggataggttccgagctgtcttcttcccttgatgtcccctaaacattataccttttaaacattcagggtcttcgttacgatttgggatgagcagaaataaaaatgctgtgcagatagaaagtagtaaaactcagggccctcagctgtgagtgtattgactgctgctcttccctgttgcagcaggatcaaggtgaaaaggagaaccccatgcgggaacttcgcatccgcaaactctgtctcaacatctgtgttggggagagtggagacagactgacgcgagcagccaaggtgttggagcagctcacagggcagacccctgtgttttccaaaggtgagtagtcacaaggacatacagggtttgcctgcttgggtcgcttggttgtttcttgatttacctgctgtcgagtctgtttagaaagtgacagtcggcatcacttaaagcattaaattcatgagccggccaagaggtgtcttttttttttttttttattcaagatggcgtgtgggattggaacactagattttatttgagcagatcttaagctaagactagcccaagtaaagattttcctaagtaactaggatatgagatagagtggaaatgtcaggaacgaagtaaagatcattagatctgattagcagttagggttatataggctgcattaagaacagggctgtacgggagcatgaggcttcagtggcctatattagtgccactgcactccagcctggttgaccctatctcaaaagttgtatacagattgcctgggtttgagtgatggcttcaccatttgctggtctgactctgggctctctggacctctgcttttttctttgcataaagag

SEQ ID NO: 128 - DNA, 1142 bp, Homo sapiens
gcgagactccgtctcaaaaaaaaaaaaagaaaaaaaagaacaagaccctgtctcaactcaaaaaataagaataataatagtaataaaaagagttgtgaggaaacaagaggaattggcaaaggagaaagagggaccggtaaagtaggagataaaccaagtgcctggtaacctggaagtaaagtcagggtgtgtgaaggaggagggatgatgaactgaggtgagtgctcccaaagagtccggtaaaacgaggactttgaattaggcattggacttcacagcatgaaggcctctcgtggcctctctggagcagtgctgccagggtgatgggccagaaagcctgagtatagtgggcttcagagagaaggtgaggagagtgactggggacaactggtagacaatgcttccaaggagttctgctgtcaaggggaacaaaagtgggaaaaaaactttctatgactgagaaaatccagtagagagaaaaattgatgtgggagaagggagacctgcagtagcaatatccttgagtgggtgagaagggttggcttgtagcacacagagggggtttagacttggatagaagcgtggctggggtgttggtgataagttgggagcctgcctgtgtgagtgcacatgttggctggtggtagatacgggatggagttctgtggatgtgcccggccgcctctcaggcctcttaatgctgaagtaccctaagattcagtcctgggttcagttctcttcagttctcttcgcattgctttcattttctcagtgaagtagaaataaaggtagggatgagtcactgggagagtcctgcgccatgtgtggggaactctacctgagggcaggaccctcaatgcagcctctatgggtaaagaaataggtttgagaggtaaagagccatgcgcaggatcacacagctggttagtagcagagccaagcctaacccagatggcctggtttcctgcctagcatctgacagatccataagagacaaatcatttcaccatcttgacaaggttgaactctcatggctcttcctagtagtgtctcaatctgcaggtctgttctgatacagagatgtcctgcaagcagctctttcctctctgtctgtgctttctgggttctgccttgcctgcctt

SEQ ID NO: 129 - DNA, 1099 bp, Homo sapiens
ctgccttgcgagattcaagctgtgttgtaagactgctggattcaaatctcagttctgcctccaattagctgtgtggcctttgactagtcatgaaccttctgtgccatagtttcctcacaagtaaaatgggcttagtaattgtttctatcccacagggttgaagtgagaatcaaattatttagctcacgtgatacatttaagtgcttagcatattaatatgcttaattaatattagctaagtcagaaattcttgagtttccattcctgttttgccacccattgggcaaatttcttaacttctttatgcctcagtttccaattgtgaatgaacaatgttgatgatagcatcaaccctgtagggttttaaggatttgggataataggatgtcagtatctcactgaagaaactgtccctggccgtagttcctggctccattgcagagttggtaataccagtctctgaattttcttcctgagagtggatcccattaaatctctagccaaggaggagcgtacttctgtgcttctagggctagacagaacggaagatggtgcagcagccccagcgtgggaggccggggctgtagtggggatgtggtgaaagacgtagggctctctctgttgctctcagctgcagccacgtgttgccccatggagactgggccaggagctgctggatcttactgtttctcaagagaagttgtgaaatctcctcattttaaactcttggcaattatttcatttttgtaaacattgggagagcaaacaaaacatgtcggtaggctgtatttagcccacaagctgccagtttgctatctatgttctaggctttctgtgcttgacttagcaaaatatttactaagcgcctgctgtacctgtagctcctcagtacctggtcatgtttactgttctgccacctcaggcgtgctggctcagtcatcctatcaggtactaaatcagtttagtgggcttgaaatggtgtttcaattcaaattaaaatgcaatttgcatttccctgattactgctgagattgaacatttaaaaaaaatacatctatagaactttcttctccctcagtagaatttttgttttaagtct

SEQ ID NO: 130 - DNA, 1161 bp, Homo sapiens
cttacatttcctctaacactgcaggctccattggaactccagcccctttacacctgctgtcacctcaactggagtatccttccactcacttatcatctggcaaattccttcctcctcctccttcaagatctaggtcagatggtccctttctgaaaccttctgtggctctcccggcagagttaggcctcccttctttgtagatattcattaactcacatatttggttagctaccaaaaaatcgtccttgccctagaggagttcataggctagtggggtagacaaacctaaacatttagacagccatgctgactgcattagggaagcactgaggaggagcacttcacctgccttgggggacagatgacagggaaggttccagaaggtggggacacctgaatcctaagagtgtgtgggtatccagataaggaactggcttgggcaaaggcacagaggcaacaaataatgttgcaggtgcacaacaatgacaagcagttggttttgctggaacataggggcctgaaaatgtaggactttctattatattgacccatatgaaactgcttttttttttttgagatcaagtctcactctgtcacccaggctggagtgcagtggcatgatctcagctcactgcaacctccgcctcccaagttcaagtgattttcctgcctcagcctcccatctagctgggactacaggcatgcaccatcatgcctagctaatttttgtatttttatttttatggagacggagtttcaccatgttggccaagctggtcatgaactcctgacctcagatgacccacccgcctcagcctcccaaagtgctgggattacaggtgtgagccaccgcgctggacctaaaactgccatttttttttttccccgagacggagttttcactcttgttgcccaggctgaagtgcagtggcatgatctcagctcactgcaacctccacctcccaggttcaagcgattctcctgcctcagcctcccaagtagctgggattacaggcacccaccacacctggctaattttgtatttttagtagagacagggtttcaccatgttggccaggctggtctcgaactcctgtcctcaggtgatccgcctgccttagcctcccaaagtgctgggattacaggcgtgagccatcatgc

SEQ ID NO: 131 - DNA, 1194 bp, Homo sapiens
tactcttgggggaggggaaaacatctggctctatgcaaacagggctcatcaaaaatctttatgtgccaaaatggatactgacattgctatgaacaaatctgttttttcttccctccctgcctaaagactcctaataagggacattaaatcatacacaactgaatctaagatatgaaaaactagtttcaatgacaaagacttgaacacacagttaagagataaattcaaggtggtagacacctagaaaaagctattctaggcagcagacatctggcacctgacccaaatgttcatttggtttcagttaagaggcttcctaatattagatttgtggggcaggctagggataggggtggaatggtggtacaagtaaccaagagaagtaaagtaatgctttacccattcaaaaatatagcaaattaaaacatagtaacatttgtgtcctgtcacaataggcaccctgcacagcaatacacactgaacaatgtcgagtttctgctgaatagacttcctacgttgctctggaattcgaagttggcctaactgaggtctccagttacagaaaacactggctctgtatcctgggctttgagaaaacttatcaggctgtcacacttaccatcccttcagtctgcttgtcaggttccttaaggacgcatatctcaaatgtatggcatctacctctacctgggtcacaaccaagtgggtttctactagatcggtgttccttgacagccaacaagggagctgacactgccctcctaagttctgatcttgctcctgttcaactggaacttgatggatcccatgtggtttcccccatcctgacgctgtggctcagacactctccctaagctggtccttccctccaaatcctgccttaaacacactcagaaggtagaaaacacttcagcagcaaagtcctcttcccaagccaacagttgtgttcttccaatcacatgatcttaccttttcaataaaaggcaaaacaaaccaatttccaacatagcattacagcctttaaaaccattcacttctcatagtgattcacagagaacaagagattaaagtgctggattttaaatgtctaaagttgccttcagggctacaaaaagccctgccgtgtgtgtttttccttcatggtgttgaggggaaggaaagatagggaagggcagtggggagaaaccctaaaat

SEQ ID NO: 132 - DNA, 1202 bp, Homo sapiens
ttccttcctggccttagccacctggctctgtctgcagcaggggcaggctgctttcttatccatttccctggaggcgggcccccctggcagcagtattggaggggctacaggcagctggagaaaggggcccagccgctgacccactcactcaggacctcactcactagccccgctttgggccccctcctgtgacctcagggtttggcccatggggcccccccaggcccctgccccaactgattctgcccagataatcgtgtctcctgcctccactcagctgcttctcagtcatgaatgtggccatggccccggggtccccttgctgctgtgggctccctgtccctgggcaggagtgctggtgaggaggtggagccttttgaggggggccttccctcagctgtttccccacactggggggctgggccctgcctccccgttaccctccttccctgcaggcctggagcctgtagggctggactgaggttcaggtctccccccagctgtctcacccccactttgtccccactctagagcagggaggcagtgggggaggagttgtgtctcgtcttctgtctccatgtggtttttgggtgtttttcttgttgtgtcctggattccgataaaattaaagaaattgcttcctcaacgctcaggcctggctgattctattccaggggtggatagtgaccatctgtgagaacctgccccagtgtaagaaaacttgtttttatttttaaatactttggaaagctctttcagagcaatataaatgagtgcctgggaggaggaggttttgtgccagagccttgccccctcactcactcttgggggtcctgatgaactcttggaccctgtggaagataagagttagagacctcggcctcctggtcagtggagcccttggcctcatgcctggtgggctaagcgggcccagctggggtttgaggtaggggaggccttggcttggccccagcagctccagggccctgagttcctgccagaggctggagagcaggcagctgctgcttttcctggtccttggtaggggagggtcctcaggcttgcgtgccaaagcctgaaggattctgcttctgccagcgccagagatcctcacctgcaacacggcgaggtgtgtgctcagggcccacggtggaatgcagagcctcccccaccccacagcccgccctgggtgggcatgccca

SEQ ID NO: 133 - DNA, 1224 bp, Homo sapiens
ggtcttaagaccctcccataagagggtcccatcctataccctgaggtaaggaatgctgatgtcatgaagcctccgtgaaaatccacgaggacagggttcaggagcttctggatacttgaaaaagtggagcctcctgaagggtggcacaaccagggaggccatggaagctctgagccccttcccccataccttgccttacatgtcccttcttctgtatccctggcaatatcctatataataaaccagtaaatgtaagtgtttctctgaattctgtgagccgctccagcaaattaattgaactcaaagagggggtcatgggaacctcaacttgaagctggttggtcagaagttctggaggcctggacttatgactgatgtttgtatgtattgttgggggtaggggcagtcttggggactgagccctcaacctgtgggatctggcactgtcttagggtacatagtgttagagccgaattggagaacacccagctggtgtctgctgcttggtgtgtgtgggaaaaaaccgactcatttggtcacagaaatcttttgtgttgacgtggttgttgtggtatgagagtaggggaaaaacacagagttctcggggcgcgggggcgggggggctcacggctgtaatcccaccactttgggaggccgagatgggtggattacctgagttcaggagttagtgaccaccctggccaacgtggtgaaaccccatctctactaaaaatacaaacattagccgggcgtggtggcgggtgcctgtaatcccagctactcaggaggctgaggcaggagaatcgcttgaacccaggaggcagaggttgcagtaagctgagattgcaccaccgcactccagcctgggcaacaaaagcgaaactccatctcaaaaaacaaaaaacaaaagccacagagtttttcctacacagggtctttattttcaaatgggggctcctatgtagatgtaaacatctgtatgctttcctcctgttaatttgcattatgtcaatttaatttgcagacccagttggagaccctaagagggcagagaaaagtcgtgcccccctattcccttctcaggccaggttgcagtacttgtccattcactttacaattggcaaagaaaatcacaaggcacccacatagatcacctgggttccacgtatattcatcccaacccccattctattatttaatgatttatttatttatttattttga

SEQ ID NO: 134 - DNA, 1099 bp, Homo sapiens
ttctttttcctatggggctctggaaaacaatgacaacatttctgagatctacgctcctgccaccctgccagtcatgcaagaagagcacggctccagaagtgcctctggggtcccctaccgagtcctagagcacaccaagaaggaatgagactcgcctccctctatttataactgtcccctccaggctgacagtggttcaaccctgaatcctaaaacttgcctttcaagtctcattttgtttctaactgagaactctatggatgatgatctcaaaaagcctttgtctctgggaaaggatgcgttatcttggtcttggaaatttcaaatgatgagggttgggggatggaagcattattccaggtggacgggatagaatccagcctctgcctggattagcccagggggatttggaaagcctttctaccatccttgaggatggtaactgagcttcctctgacagtgaccaaaggatgctgtatccttcagagctaaggcaagacagagagtctgctgttaattctcaaatccagcgaaaggctggacatctctaaatctcgtcttcctccacctcatgtgcatgcctgatctcaccctgacactcctgatgccgcatctgtgatagcactcgtgttgccttcacatggcaggctgggccaaccctgggtggaaggttctgacatttgtgttttcagaaatgtacatctgccttccagtcatctgtgcccttctagggaagatgtgcttgatatgttcaaattggatctactctgaaaacgaaacttggttttggtcctgtgaggactacttgtttgtccacctcctccaccaaaggaattaggaagttaagagaaggggaagaatatggaggataggagagggtgatgatgctttagcccattaaggaagaaaagttccccttactcttacaaaaggtgattgcaccacttaaaaaaggataggtagaaaatctggccattttatgtgttatttttttcctgcataccagtgccccctggaaagatggggatgctcatttcagagacagcctcttcacctgtcctccgtctctccattacagagccacaagccaagcttgagt

SEQ ID NO: 135 - DNA, 1148 bp, Homo sapiens
ctgtagttttgcctgatctcactcattgcacttcctggagttaaattttccaacagccatgttgaggaatagcactctgcatgtttttgttttgtttttcggggttttttttaattgaagccctaaaccaggaattatttgtgttctaacaggaggatgaacttgctgaaaataaaactttgctatgtatttactcttttttaaaagacaaaagcaaaaccagactttctacgtactactccaaagactgtgattgtgactataatacatttttggtaatttttttatacctaatttgtataggaagtgctatttctcataggctgtttcttgaaattttaagtttattgctttaaaatggcagtgtttctcccactttgatatgctaacatttagtaagcactggctttatgaaagcggctttttataagtatactgcattttttgagcctatcattaattagcttagtatgaaagataagaaaatctccatgttgtatccatttggctcaggaagattctttgccttacctttcttagaactctttattgcttatcaaaagtttgagtacccgcttggtttttttttggtaattaaatattgtatgatttatctggttcaaggaagatgcactattcagttatctattgagaaattattttgcagtggttttagtgggtgaaaatgtcccatctgcaccagtacacaggcaggcattatcattcttcacctactttttaaatagtggcaacttgggattcattctggtgattctgaaccttgcctcatagcttaaagtataaaaaagattcaagagcagtgaggtttgttctttccagtgaatggtggactgagtggtgcgaggtggagggctaacaagaggaaagaactacattcttcagaatacagtgatgaaaattcattttgaaactcaaatattttcattttggatattctcctgtttttattaaaccagtgattacacctggccatccctctaaatgttctaggaaggcatgtctattgtgattttgatgaagacagaattatttttctctgtagaaacacagataccactttatcagggaagttagtcaaatgaaatggaaattggtaaatggacaaaagctagctagtaaaaaggacg

SEQ ID NO: 136 - DNA, 1251 bp, Homo sapiens
cttagaatgatcagtttctgttttgatacatttcgtaccaaaatttcttctacaactcatcaattattcttcgttgtttgtttcacaccattctcgaaatctcacatactcttttctcaaattcagggagtcatgtgatatttcttgttttattcacagagggctggtttttaagtttggccgcactgaagacttatggcagtgaacacatctgatttcccacagcacaacagccctgcatgggtttgtttgtttttttactgctcactcccaaccttttgtaatgccattttctaaacttatttctgagtgtagtctcagcttaaagttgtgtaatactaaaatcacgagaacacctaaacaacaaccaaaaatctattgtggtatgcacttgattaacttataaaatgttagaggaaactttcacatgaataatttttgtcaaattttatcatggtataatttgtaaaaataaaaagaaattacaaaagaaattatggatttgtcaatgtaagtatttgtcatatctgaggtccaaaaccacaatgaaagtgctctgaagatttaatgtgtttattcaaatgtggtctcttctgtgtcaaatgttaaatgaaatataaacattttttagtttttaaaatattccgtggtcaaaattcttcctcactataattggtatttacttttaccaaaaattctgtgaacatgtaatgtaactggcttttgagggtctcccaaggggtgagtggacgtgttggaagagagaagcaccatggtccagccaccaggctccctgtgtcccttccatgggaaggtcttccgctgtgcctctcattccaagggcaggaagatgtgactcagccatgacacgtggttctggtgggatgcacagtcactccacatccaccattgaaggaaaggaaaaaagggcagagacttgacactccagtcttagacaggggacaatttctttgtagttgttctgataataaactgggttccatgttgcatttcatctgtgtactgaaccactagcctaatagaccagcacggtcaactagaatgacaaacattagctactgggaactcttgttgtctcttcctcttcagaactcttgtccccccaggctccccacctctgcaagatgggatacactcttcaggaccacagtttgaaatgtctttcataaaatgtgctacaattagccttcggaatatttgctgggtgatttaaatgtgtgggtctcattt

SEQ ID NO: 137 - DNA, 2414 bp, Homo sapiens
ctccctggacctttcctagccagccgcacagtctaggcccttgtggggtgaagaatggagggaggagcaggctaggaagacggggccaccaccctctccttgctttcagcccttcccacaggaaacatcaagaagccccagccaggaggggccaggctgccaaggcggctcccctgtttatctagagccttcgttcctggccataccccggactgccctcctgtgcctgatgtccccagctggggtcagtctcaacaggagccagtcttctggagcctctgggcagaaccctccatcagagtggaaatcagacgggaccccctgcagcttccctgaccacgccactgaccagctatctggggaagtttactgtgaaggggtttctgcctttagcaatggggttcactaagggggttcccgaggcccagggccaaggcactcccaccgcctaccttagcacagggtctctgcaggactgcgggagccagcgctcctgccgcccctcttgcccctcagaccttgcatccacagaagcacaacccagccaaacaccacagccttctccagagccggcactgtcccggcaaccaggggtgccccaggctagctcttctacctctggggcaccacggactccccttggccactcttgggactttggtccacgtcctgagccactgaccacggccagtctctctttttatatgtgcagaaaagtgtttttacacaaactttctcatggtttgtaggtatttttttataaccccagtgctgaggagaaaggaggggcagtggcttccccggcagcagccccatgatggctgaatccgaaatcctcgatgggtccagcttgatgtctttgcagctgcacctatgggaagaagtagtcctctcttccttctcctcttcagctttttaaaaacagtcctcagaggatccatgatccccagcactgtcccatcctccacaaaggcccacaggcatgcctgtactctctttcattaaggtcttgaagtcaggctgccccctccccagcccccagttctctccccaccccctcaccccacccggggctcactcagcctggcagaggaagaaggaaggcagacatctccgcagccactcctgggccttttatgtgccgagttaccccacttgccttgggcgtgtccactgagccttccccagccagtcttgttctcaattttgttttgttttgttttgagacggagtcttgctctgtcacccaggctggagtgctatggctcgatcttggctcactgcaacctccacctcccaggttcaagcaattctcttgcctcagcctcccgagtagctgggattacaggtgcatgccaccatggctggctaatttttgtatttttagtagagatggggtttcaccatattggtcaggctgatctggaacttctgacctcaggtgatccacctgcctcagcctcccaaagtgctgggattacaggcgtgagcaatcgtgcccagccttgttcttaattttgtatcatccagtcatcgctaatattacacgcaccttctcacttaatcctcacgacaagcctgtgaggcagatgctcattgttcccatcttgatgaaacttgagtctcagggaagtgaagtgacttgcccagggtcactcaggtagagttgagattcaaacccacatgtggctccaaagtctgcatctggatttgggggtgttttttggcatggcaccctcacctctctccctgcctgttttccccaaagtggaaaggaaggcctttcaaaccagagtgtctcactcccctctgacctccagaccagatggggcatgagccagccagctcagccaggctccctgtgtcctgggaggaagtgtccccatcccccatgccccttatggggagggagggcgtctgatgctctctctctgcctccccccccatcctgtcaggcacaggtgacgggggcagcccatgcgagcccttctcctgctgctctgggagggccagttccacattgagccagcctggtcccatggaaaatgatggcctgggctttctgaggccttatctgatgcctctgcagttcatgtcccccaccaggcctcgaggctcagggtgggagagggccccgggctgccctgtcactcctctaacacttccctcccctgtccccaacatgccctgtaataaaattagagaagactaactagagtggttctaagtgcttttcctttgagtggcatgttgctcagctccgtccttccatggggtggctccctcttggggcagagttgagctggaatgctttcaggtactatcttacctatcgaaggcttgagtgacttgcccaaaataagttttacgatagaacaagtggtaggacttactgttttgagaatctggtgctc

SEQ ID NO: 138 - DNA, 1482 bp, Homo sapiens
agagaaccgagaggcacaaatggctgccaaactggaacgtttgcgagagaaggttggtttcttactttgtaaaagggttgagcttggagtttgatgcaccaatgagttggcttgaactaagtgctttgataaaaggtgtttggtgtctttttgtcatccattttggggcttaacatattaaatgaaaggtatattttaagatggaatattcagtaattcccagcataattgcacagtccttggaagtccagtaggcagcttgttaggttctacaagggacccaggagatttgatgatgatgtctcagaacttaaattgtgtggttcccacaggctgtaatatatgcactgaggttgtgttgggcctctttgaggtgggggctgggggtcgtgacttgacaggcttttttttttttttttttttttgactgatgacaccttacccttcctttacaggataagcacattgaagaagtgcggaagaacaaagaatccaaagaccctgctgacgagactgaagctgactaatttgttctgagaactgactttctccccatccccttcctaaatatccaaagactgtactggccagtgtcattttattttttccctcctgacaaatattttagaagctaatgtaggactgtataggtagatccagatccagactgtaagatgttgttttaggggctaaaggggagaaactgaaagtgttttactctttttctaaagtgttggtctttctaatgtagctatttttcttgttgcatcttttctacttcagtacacttggtgtactgggttaatggctagtactgtattggctctgtgaaaacatatttgtgaaaagagtatgtagtggcttcttttgaactgttagatgctgaatatctgttcacttttcaatcccaattctgtcccaatcttaccagatgctactggacttgaatggttaataaaactgcacagtgctgttggtggcagtgacttcttttgagttaggttaataaatcaagccatagagcccctcctggttgatacttgttccagatggggcctttggggctggtagaaatacccaacgcacaaatgaccgcacgttctctgccccgtttcttgccccagtgtggtttgcattgtctccttccacaatgactgctttgtttggatgcctcagcccaggtcagctgttactttctttcagatgtttatttgcaaacaaccattttttgttctgtgtcccttttaaaaggcagattaaaagcacaagcgtgtttctagagaacagttgagagagaatctcaagattctacttggtggtttgcttgctctacgttacaggtggggcatgtcctcatcctttcctgccataaaagctatgacacgagaatcagaatattaataaaactttatgtactgctgtagcaactcctgtgaaatgactaaagggaaccttaattatttctaaagtagcatttgactc

SEQ ID NO: 139 - DNA, 1115 bp, Homo sapiens
tgtcctagaaaagttgtgtggacgactgctttaattttcatttttagcactctaaagtttgggaagtaattaagaaccacctcaaaatctgcagttttttgttcttgtttcttataggctgaaggggatgctaagggagataaagcaaaggtgaaggacgaagtaagtcattctctcttcaagggtcaaagccttggactagcagaggccactggactcggtgattaaccgtaacctgtgtcctgaatttacactcctataatctagagcaaattgataccaaactttcaaagcgacttacctgtcctatttctaactttctcgttgtctttaatagccacagagaagatccgcgaggttgtctgctgtaagtgtatgcttttgaattttcgtgcttgtccctgaaactaaaaaacatcaaaaaacaattccctttgcttccatgaattatggttagtgcctggttttgaatcattgcctctacttgggactcttgcccctttgggttttgctggttctgaaattctgatgcctgtagccaaagtgggacatttgagtgggcttctggaaatccaacattctagaagaaagccaaccacaaaaacttttgaggaggaggagaaacttctctacccttggtacttttggttggttgtgggtggttttcttcagtccattgtactgatgttcactttttcctctcttcctgccaaaaaaagaaacctgctcctccaaagccagagcccaagcctaaaaaggcccctgcaaaggtaagtgctaacattggaactgatcattttcacagaatgaggactgtccttagtgccttaacttaattagcataatggtgcctccattaatggaggttataaactgtgtggatagcttacctcgtccgtgtcattcataacgttggtttcctgatcaagaattctgttgttagtttataggaaaatctgcatttaaatattaaataccccagggtttaaactaatttattcttctgttacttaggaaattctaagtactaaagattatagcaaattacagataatttagcctagttttgatcagttgttcttgtcaaatgggtgagggtttgtgttttatcttga

SEQ ID NO: 140 - DNA, 1143 bp, Homo sapiens
aagcgattctcctgcctcagcctcccgtgtagctgggattacaggcatgtgccaccacgtccggctaattttgtatttttttttctttttttttgagacggagtcttgctgtgtcgcccaggctggagtgcagtggcgcgatctcggctcactgcaagctccccctcctgggttcacgccattctcctgcctcagcctcctgagtagctgggactacaggcacccgccaccacgcccagctaattttttgtatttttagtagaaacagggtttcatcgtgttagccaggatggtctcgatctcctgaccttgtgatccgtccatctcccaaagtgctgggattacaggcttgagccaccgcacctggcctaattttgtatttttaggagaaatggagtttcaccatgttggctggtcttgaactcctgacctcaggtaatcacccacctcggcttcccaaagtgctgggattacaggcatgagccaccgtgcccagcctgtttgcagttattgatcaagcacttctctgtaccagacactggggtttatagcatttaatcttcataacagtcctatgaagtagatacctgcctatatagctagtaaatagcagagccagcaggtaaaaccaaatgctttttttcttagtaacttcattttactgtgtcaagaaatatttgagtgcatgagtgcacaaaggaaaaaaggaaaaaggaacctcgtcctcaggtctttagcctgatactggttgctcctgaacactggtttctctctttagccttcaacctggactactacacagaggttctggacctctcctacctgcttgaccacctggcttctgaccctttcttccgccactaccgccagctcaatgagaagctagtgcagctcatcgaagactatagccttgtctcctttatccctctcaacatccaggtactaggggctaagacgggactcttgacagtgcatgggattcaccaagccaaaagcacaggaagctttgagggcttaaagaatggtctttgccggctgggcgcggttgctcaagcctctaatcctagcactttgggaggccgaggtgggcagatcatgaggtcaggagatcgagaccatcctggctaacccagtgaaaccccg

SEQ ID NO: 141 - DNA, 1294 bp, Homo sapiens
attgtgtgaacgtcccttttttgtgctgaaggagggactgaaacccagtgatgggcatgacgtgcccaaggtcaggcagtgagaggcagacttgatagcaccagatgtggctaacactgcatcaggtaaggctccgagcacttgattcgctgatttagtcctcacagcagtcctaagatttggtattattatcctcattttatagacaggaaaactgaaacacagggagatgaatttgcttcctgtacacaactcaggagtggcagagccaggattccagtccaggcagtttggcttcagggtcttcacagagcttcccagggcccacccttcaccagtggggcacgtggctggcccagagcaagcccctcagccccaggctgaggttttgagcacctgcttggcactagggtttctctgctaccgtgtggcctcttcttgtggccatggttaacggaggggacaggattgccctgggtggaccccagggaaccgtggggccagggccctctcctcccacccaccagcctgcacaccctccccaggtcctgtatcacctctttgaggagtttgccaactacgaacacgtgggcatcgtggacatcttcctcggcttcctgagcttcttcgtggtggccctgggcggggtgcttgtgggcgtggtctacggggtcatcgcagccttcacctcccgatttacctcccacatccgggtcatcgagccgctcttcgtcttcctctacagctacatggcctacttgtcagccgagctcttccacctgtcaggcatcatggcgtgagtctgcgtgcagcaggcagtgggcttggcggggtgggggcgggggctgccagcttggattccccaggctcgtaggttcacggagctcccagggcccagccttgagctccagggatgagacatgaactccaggctccagacctgcttggtagccatttaaatggccaagggcatcagtggcttcctagaagaggagcacttctgcagcgccccctggggtccaggaatcgggagagggcatttcaggctatgagcagatgaagcaagaatgacctgcatgaaggcaagcccagggtataggagagcagagccttggaagccactaagcttcaggttgaggaaagccacagccctgctacttcattgtctcaaagggagtcccctcagcagccccagtaggaggctcaccaggcctgagtcctggcggtcctgaggtctccaccgggtctggaaatggggagaatgggatgtggggaggcagtgaggggtgaaggt

SEQ ID NO: 142 - DNA, 1219 bp, Homo sapiens
accgcgcccggccctacgaggatgttaaagaaggatttctttattaggttgggtcttggacacggtcaccattacatttcctttacactgtttaattctgtgaatctactggagacttgagagttctgtctgtgatactgatttggtttcggggagagccaagctgaggatcagagatttgaagcataactaaaagttcagacgagctgccacagatgcctactgagcaagtgaaacttgatgtctttctagctttgccttgttctaactttaaggatatgctaccattatccttcatacttatacacaacctgccattttccgatgaagcataacatatttcttccgtgtttgttccaatgcttgttgggatgtgctactgttctccccacccacttcacccattccagaggtttttcaacactatggagcagggccagcccaccatgccacaaatgacaggcaagggccacttcactgggtgggctgttttaggggtggaattaggtcttgggagtcactttattatccatcctccaaagtttgatgatttttttcccccaggtaattaaatgtgtattttgtggacctgggcttggctggaatgctcaggggtcctgaagatcctattatagcttccttctgttgaaccattaagaaaagatggcgaaagtcaacataactagagacctcatccgtaggcagatcaaggtaagcagcccagacttctgcaccagatcatgagatcttttctttcccacagattgattttacagatgaaaaaactgaaatctatagtctgtgacttgcctaaagtcacgtagctagttagtggcagacccaggactagaatcaaggtctctttctctccatcttgtattgtctaagaacatggatttcatggagactctgtccacatacttgtgcctgggctgctgagattaatgcaggctggcaagggaggggagctgtcaatgtgttgtgcagatacatacacatccttgtgttgggcaggtggtgcacaagagcaaatataacttcttcatgttgctccagctgccaagttgtatatgtaagagatcctgggagagtattagtcccagttcagcttgtattctctttgaggctctcctgtgctaaagcctgtcctctgcagtttgtatgtagaagacactctgatacctgtgagataaatggatgactgggcagtcaagttcag

SEQ ID NO: 143 - DNA, 1468 bp, Homo sapiens
gcacccccaacaatatgtagccaaggttgtgtgttcccctccaccatatacacctcctggcatgtatgtgtacctccccctatagatagtttagtctgtgtatttccctccccctcccctatacgtgtaccctggtgcctctccctccctgagccccacgtgtgtcacccctttctccaccacagagtgaagacctcacaggccgagtcgtggaagatatggagggtgcttcacaggccaaccagcggcgcatgaatgcagacccgttggaggtgatgctgctcaacatgggctaccggatcacgggcctgagcagtgggggtgccggggcctctgatgatgaggacagctctgagggccaggtgcagtgccggcccagctagaccctccagccctggtccccagcccctgctactggctggaccctctgccctgggcaggaggtcaggggattctgttttggtttgtcttccccaccacccttttttttcatttcccctgttttgtttgttagtttggcgttaggggtggaggttgctacaacttgctggctttcggactctgggctgattgtcccctgactatccccagccctgaaaaaaagagcaggaggggacacccctccatatgcccccccccatctcctgctttcatgtccctggagggctctggcctgcctcaaaaccccttctgcctcaggtggggaggaacaagctgaactgtcttcagggactgtcctgccctttagctggcagcagcaggaggagtgggattcccaattggtaagggctcgccttggcctgttgccactcttgctccctagcctgcaaggctagctcccctgtggtcttcaggaaaggttttgaaaaaggatgggtcccaccctccctccagagccaccagtgttagagcggagcccaaaggaaggatgggagccctggagtgggcaagaccaggccacctgctgaggtcgctgtggagcaccctcgctcctctcctggctactagctctggccctgcacctactctcactggccacctctggaggctctgcctttcccaagggccctggcagagggtggggcactgcaccttaccccacccatccatgccagcacttctgcactacggccattctcctcttgggcgctcctcagcctcactgtgacctttctgccagagctcccagccaggcctactctgctgaggtggcgcttcctgctaagggcccttctctgccctttctgccctccttcccatcccacatgctgagccgccacaaagaccaaagaagtgatggcttttctctgtcccctgctgctctgaggggagaggggtgggtctcctgagccactcagatgggaaagtcccttactcggcccctccctccccagcagccccaagctttacactggatgcagcgatcaacccaccactcaccaggcctctcctcccctctgcccccggc

SEQ ID NO: 144 - DNA, 1212 bp, Homo sapiens
ccggggacccagtgagccgagaggccctctgggctccacttatgcatatgcaccaaaaaaaaaaaaaaaaaaaaaaggcttctttagacccagagccctttaagatgataaaggacccaatgcaggtaatcctgtttttggactcacgtaatgtagaatgcaaagtttagtgattatttaatctgggcctaagctagtgagagtatggaacaatggcccataaggactcctaagcgccgaagccaaggagcctcctcccttcctggttcaccccgcccaagggacctgcccccattcctgtggccctggggcccagcttccaatagtgtcagaagcaacttgtggctttgccttggttgtgagatgggtacattccaaaggagcagcctgggggagggggcaggctcagccagcccttggaggctcagagcagctggcccaggctccagctcgcctccagtggaagcccgagcgccctcagaaacgaccctggccaatgtcaacgcagagccgaggcggtgttgtcacggctaatgtgaaatctcttcccgtggcgcccatcctctgactctgcagtgccagcttggacagattgaggtctctgtggctttggtgaccctgcttaagcattcccaccgtgtcccagctctgctctaggactgcctcccactgcggcccctcacctgacttcagggtatggggagggagggagccagtgctccaaggccagggggctttgctcatgagagatgtcaggcttcctggaggcatcaggctttgagccctgctggggtccaactgacctgggaccaggtgtcgcgcagagatgtgcctcattctgtgcctccttctgtgcctcctaccatgttccctttaactgtgcctcagtgtgggttagggaacaattttgttattgtattaagtttattcagttaattcacttgaggaactaaccagtttttactttctgtctagaatgatgtacatgtagtagagtaagccataatgctcccaaagtgccttgttttctctgatacaaacatatttataaggacatattcctgtgggttcttgggtgtgtttgccacatcaagattttagggaaggggggtatatgtgtagtagggatgccgtttgaaaacaggcactcttcccctgaggatgggaaaggagctcttcagttggagatctaggcagtgggttaagccagac

SEQ ID NO: 145 - DNA, 8155 bp, Homo sapiens
aaataactctaccatgaaaatcttgacttttaaaaatcttgacacttctgacacttgttcttcgtggattaagagctctgctttaaagagtgatgaagatggtgaaaggaaaaaatgaacctttttctctactgggaaatcagccctgagggtaccttcattaccttcacctcccagtaaagggggacattttgttccacggaccaatcctgttcagacaggcacttgtcataggttcaatgactctaaggccagaagcttatgtgttcagaatgccagctacccatgtgtgtcttctttttgtggagtaggaagatgaggatttgccttccattttcctgttgtccaggcggtttggagttggggcttcatggttagtctatctggacatgcctgttggtgaacctataaagagacgtgccaaggctccagggctccaggccttggggattttccacatcagagcatcttttgattcagttagttttctccaactctgttctccctgaggtctgttttagatgagttctttagaccccaacaatggtggaaagagggggaggtggagcagagcaggccagattttgctagctgatgcttggtgtatttgtgcttgtttgaagttttgttgttgttcacccagaacaaattcacccaaggcccagtgcactgagggacaggttttcatgagacaagccctagcacgctactttaatcgtcagctcatttggtttgataagagacctggcagaaagaccacatttactaccacatagcaccctgcattcatcctcagcttgattttgcaatccagtgcctccttggccttcgagctctccagaggcttgctgacctcaaaatcagtctgtgtgccagtcacgtgtttgcagctcactagcctctgagacttggcttcacatttgtcacaggacagactttgggattcaggtatatctgcacctgacactggggagagaatttaaaagaactgctgggtttgacaaggccaacactgggcaaggaacagcatggttttgataatctgggttgaatcctgttactacaaacaattcagcataaatatctgggatatatttgacaatagaatatttagtcttaaaataaaatttcagtgtaacagaaaatatgtgggaaatatacctattttacttctccctaatagcttttgtatcaaatgcatttttgtagtaccttttaagaagaaaaaacccactcaggctctttaaatgacagtttttggcattcggttcattgtcaggtatccacccactttggtgtaccagaatggcagcattggctgtgttgaaaacgtggatgcaagtagctatccgccaccaccacagtcagactctgcttcttcaccttctccttccttctccgaggacaacttgcctcctccaccagcagaattcaggtaaatggtggtacctactccatccactattggtagttatacacttgagaacaaaagaatggaccaggagcagtggctcacgcctgtaatcccagctctttgggaggccaaggtggtgggaggatctcgtgaggccaaaagttcaagaccagtctgggtaacatagcaagacttcatccctactaaaaatcaaaaaaattagccaagcatggtggcaaacgcctgtggtcccatctactcaggagactgaggtgggaggatcgcttgagcctgggaggttaaggctgcagtgagccatgatcatgccactgcactctagcctgagtgacagagcgagaccaaaaacaaaaacaaacaaaaagttaaaaccctaggtcaagaccactaaaataacttcaaacaagactgtctagataatagaaataattaacactgtatgtatatgttgcttaattctcataggagtcctcttttgaggtaggcactgttactatccccatgttacaatgagtaaactgaggcacagaggggtcaatgaaatgacccaaaggtcacagccagtaagggcagagccctgattggtcagttgaactccagaacctatattcttaactactcctgttttgcctataccgaaacaaatggaaatcaccagcttctttcttgttttttccttaactttattttatttacttatttatttatttttgagacggagtctcactctgtcacccaggctggagtgcaatggcgcgatcttggctaactgcaagctccgcctcccgggttcatgccattctcttgccttagcttctcgagtagctgggactacaggcacccaccaccacgcccagctaattttttgtatttttagtagagacagggtttcaccatgttagccaggatggtctcgatctcctgacctcgtgatccgcccacctcggcctcccaaagtgctgggattacaggcatgagccaccatgcccagccttttccttagctttaactcatcatgaaatgaagtggtacaatctgctgtccatgatatagttagcagttaccttgcccagttgtctaggaacctagcatagagtcacttcctcttagtgcttctggttagtttcactgctgtgtcaaatctccagaaacaatgaaacaaagggaaaagggggatgaaactccaaattcgtccattttgatatttgtgcatgtccctggcagaggtgtacagtggaagtgttaggcagtaatgactgaaaagagatctgagaattgttcagattgcactgttttctccgttacttttgtcctttctgatgcctgataaatgagagctttgaaaggtgcacttttctccttgggtacttcttaattagaaattgagtatgttgaggacccctcggatggagacctaaagctgtgctgtcctccttctctcccctcattcttcttggccctagaaaccattaatcccaaatctccttctgcttcccaaatcacttcctgctggtggccctgtcagatgcagctaaggctggaaggtctgtggaaaattccaaaatggctgcttttctaaggagtagctgttagtgcagggtagatacaaaggtggaaaaagaaaaccttcagcttcacacatggcctgagaccttgcagctgcagccgagcaaatctgatcccaggagaggtgtagctttaatcctctttcaggcctgggtcaggagtctggtggcacattcatttcccatctctgcagattctcggattgagattcattctctctcaagatttccccacatgagcactgaagatgcattcacctaaatctatatcccactcaggtgtggtcagcctggcttgggtttcctgccctctccaatgctggtgaatgttaatagcctgagaaacagagcctagtgtgtgggtggtgtttgaatttttattccagttctttcttgcatgcacccttaaactggctccaggattaaactagcaactgccatggaccatccttcttagggaaggggagggagggtgccttccccttagagctggaaaggcagagggggccgaagagatgtctcagctagcctgtacctgatagaggaatctcaagtccacttcttgcaggtagttttactcaatctgtctatcctcctctactggtgggaagctcattaccttaaaaggctgcttatttcattattggtctgttatgaccatctgtaggcttttctttctgtttaagtgaaagtgaaatggtatagtcaaccaagataaacctcggtctgtagacaaggctaactgtagataggtgtctgcattctaagggtgatggtgagtctttttttctttggccttttagttacccagtggacaaccaaagaggatctggtttggctggacccaaaagatccagtgtggtcagcccaagccatccaccaccagctcctcctctaggctctccaccaggccctaaacccgggtttgctccaccacctgcccctccgccacctccgcctccaatgataggcatcccacctccaccaccgcctgtaggatttgggtctccagggacgcctccaccaccctcacccccatctttcccacctcaccctgattttgctgcccctccacctcctcctccaccaccagcagctgactacccaactctgccaccacctcccttgtcccagccaacaggaggagcacctcctcctccccctcctcctcctcctccggggccccctcctccccctttcactggtgcagatggccagcctgctataccaccaccgctttctgataccaccaagcccaagtcctccttgcctgccgtgagcgatgcccgtagcgacctgctttcagccatccgtcaaggtaaatttcaatggtgggtttgggactgtggagccttgtctttctgaagctgggatgactgattgggggatgggtgagggggtccctgtgcccttcccaggaaacggctttcattgggtggggagagattgggacattaggcctgggagcagcctgagaaaaggcttcaccctaaaaatatggagatttagatttctttccaccttggtttaaagtaaaggattcttttcttttcttttttttttttttttttttttttttttgtgggggacagagtctggctcttttgcccaggctggagtgcagtggctcgatctcggctcactgcaagctctgcctcccgggttcacgccattctcctgcctcagcctccggagtagctggtactacaggcgcctgccaccacgcccggctaatttttttgtatttttagtagagatggagttttactttgttagccaggatggtcttgatctcctgaccttgtgatccgcccgcctcggcctcccaaagtgctgggattacaggcgtgagccaccgcgcccggccaaagtaaaggattcttaagctgggatctttgaagtccttggaaatatatgcttatgtgtgtttgcatgcatttttttttccttggggaaggatccccatttttcatcagtttctccgaagggttttgtgccttcgaaaaaaaacaagaatcactgtcctagtgggtccttgttcaactggactcagcaactccccagccttctccactgctctgcccttcgtgtcttccttccttgccccctgccctctttctaactccttttttctcccattttcttttatctcctcttttctcctcttccctcccctccccttccctcccccttcatcatctcaccctcctggaacattggagcatttattctatcaggggccaggtctggtcccaaggtgttatcgtggtttgttctgtttgtgatcctcaaaaaacttctaatctagagaggacagtctatggcagctgagccccattataattgatggaattgggcaggctgagggtctgctagatggaatgtggtggctgctccccacttcaaagccttatgagaagtcctcaccagcctgaaagtgtgtaaaccagaaaggacagcaggctgcctttcagacacacctgtgacatcagggccatcaatttcataaactcatcttcttctgcttttccataacaaccttctttttctctatcctttccaataccacttacccattggtggccactccctcttacccagttccagatggattccaaggctgaggacacgccttcctcacccttctgtctctttgccactaggttttcagctgcgcagggttgaggagcagcgggaacaagagaagcgggatgttgtgggcaatgacgtggccaccatcttgtctcgtcgcattgctgttgagtacagtgactcagaagatgactcctctgaatttgatgaggacgactggtccgattaactctttctgcctgctgcccaccttctttttctttccttcctacctgccttctttgatgccaaccccaacagacccgtagggggagaaaagggaggaaaaaagtaattttaaggggccaaagctttccctgaagcaaccaaagatatatccaagtgcttcctccaagtcaacatgtatttcctctccccattttcaggccctgtggggctcctgaggttcagtagctgggatgttccctctttccttcaagtgcctgttgcatattgaaaggaaggagaaatcccaaagcagattcctttgatcgggtttctgttggagatggggcttcccttaggagccatattcaactacagccttctaaaacctgtgccctcagccacttcgaatgccagccaccttctggttctaaaacggggagtggtctgaatgaacacagctgacccctttcccgcgcactgaaagggcagagtaggccgaagggtccaagggccagactgcctcaccctctgccctaatcagcagggtgggcctgccttttgctaagcgatctctatgcctgggatgccctttattccaggaggcatcaagcctctaaagaatgtctcacctcctctgcccaaaaatgatgcctttctgtaggctggtgttgttgcctccctcccaggatccctttggtgagtatggtgttcaggatgcaccaccaccacctctagataccttcaggcaacacagcccagttttaacctctagtatccatgaccaaactatccctgacacatgaggacaggggcctcttctggctgtcaggagcaaagcctgaagacttggagctgcaggactggaagaacagtggagccccgtgggtctcaccctttaaggatgctgaggcctagagatgggaagtgacttgctcaaggtcacacaattggatagtgacatagctagagcgcagagttcctgattccaagtcacctgtgctttctgggaccaaagaatgggcacctgctggagtccgggcagagctttctcagttgtattgctactccagacctcaccataggttggggtcccagtaggaaggctcagggtctgtgccagccctgtcggtgctgctcagaccttcatagcctctcttgtcattctttgttgccccttttctgtcaccagccaaccacatagccttgggaccagcctctctgggggaccagaagtagtgagagaaggaaggggataggcagctttgacaggtgctgctttcaattcctctgcaactcctcccccttttatttccccaatttaaacaaagattctgccaactgtggaaacttcagtccctcaggctggcagccatgccagtacctgcctgggggtggggggtgcctggcagccatgaagcaggctgaaaggcagaggggctccaggtcctgtttccagctcccctcactgcacatggtgaagctcgctccctccctccctcccttcccgcttttcccagagctaatacacaggtgctattattcagaaaaaaactggtcagctctagccaacagtgaggtttcttttcttctgccctaactattgtgtagcctcttatgctgaaatcggcttctgctggcttctccggctttcagagccctgaaacaaagagaaacaggatctgtccctacccagcacagcaaatggttgtagtaattgccaaagccctcataaagccctccggcttgaggagagagtgtatagtcatgggttctgcctctgtgcccttgctggccgcttctcctctgccttctttcctggaactcagggtgtggggactgagcctgtaggggacagcatgccgtcttgctgtggccactcccaagtgtgccctcttccctctttacacatcaggtgtctctggcacaggacttggcactaagctccatgctgagacaccaggctatgtgggcccccaccttgtttcccagcctgcaccttagaagccgaaggtgctttcatcagaaccctaaaatggtcgttgaaggcgcctgggccgcagcccagcagtagttggagaggcaggcagagggcagtggttctcccaaataggagacctggggcctggccaggccagggtttgggcctaatggctttgactaaattacccccatcctccttgcccggaaaagggagagctagagccactcactgtcattctgctctgaccttgaagggggcggtgttggcctggcttctggaatggactgagtccatcgtggaaagggctgggggcaggaggaggtggggaggggcactgcctgcggaaggtaggattagatcattagctcagtgacctcc

SEQ ID NO: 146 - DNA, 1138 bp, Homo sapiens
tgcccttcgtaaagatggccgcggaggcttttggagccaactgggagcgcagtacgcgttttctggagcatgggcagaggagacaggaacaagcgtagcatccgtgagcaccgattggctgaagcgagcaccccgggagctgactggctccgccattcgcgggaaggcgtttgtggtgccagagaaaagtagccagagcggcgcagtggcggccgcgttctgtggttttccgctattcccccagacccgcaccttctcggcctctttgcggagaatcgtgaccaagatgtggaacagtaatgatgggggtgcggggtggaggaggaagagaatcgcaggaggttttagcaagagggcgagcctagggtccgagaggcgtgtggtagcgggagaggaagggcgggagcggagctggggcgtttgggggtcacccgcaggaaggcggcgaggaaggttagggagactcgggcagtgtttgaaggggcgaagcctccgggagcctgcgggtttctcggaggcgtgggacgtggcacaggcactaatcctgttgttcaaaacaggtggattcgaaagctatggcagctcctcatacgggggagccggcggctacacgcagtccccggggggctttggatcgcccgcaccttctcaagccgaaaagaaatcagtaggttgaaaggagtatttagttttgttttatcctgtcctgaagtccctgagtcatctatgacagaaactttatgctttgaaggaagatttcaacgtgaactgatgcgataatgatctattattatctgcatctcttataattaagtgctgtaagtttcagaaatgaaatcttgccaaattttccacctcctgtttccctggcttttcccgtcgttggccttattttgaaattgatcagtgtagctaatgaatcagtcttgtgtgaacgccctcaacttggtttttaaatttatttttattttttaaaatagagatggggtctcactatgttgcccaggctggtctccgactcctgagctcaagcgatcctcccacctcggcctctcaaagtgctggggtaacaggtgtgagccactgctcctggcctgaacttatattaatagtctcttttacattctttttttttttt

SEQ ID NO: 147 - DNA, 1156 bp, Homo sapiens
agcttgactgtcattcagactgtatcacaggaggcttagcttccaaactggagagaaggaactaaagtgtcttatgaatttcagcttcttggctcttgagaccgaaaggttctacctattccccctgcagagaagcacccatttcccatcagatgctcgtccctgcagcttcttccttcttggtcatcataatgctaggttcttacccctttcctgccctctgcacctcatgtccacctccaggcagctctggccagtccccgggtattagacccaagaattcaaatcaaatctaaaaacatgcttataactacattttggccaaaactgccaatgtatttgacttcctttgtggaagccctaagccatatgaaggatgtcccaggtatgtatttacccagatctctgcctgaaactgaagagcagattgctgtatttaaattttcccatggaaaaccctgcttctcaaatcccattctaaagtaggaaaccagaaagactttgctgattgtggggggaagggagaaacagacaggttttcacattgttgccaaggctggtcttgaacacctggcctcaagcgatcctcccacctcggcctctcaaagtgttgggattgtaggcatgagccactgcacccagccagactttcctgatttaaatgagagtactgcatcattccctacttcatggcccaaaacttaatcctgggccaaatgcaggagcatctctcgacctctgggcagattggtgggtgcccaggcactagtcacagccttccagcccagccatgattgttggatgccccatccctccaagagcaatttgggcatctactcaggcaggataaaattccctagagctgaggaagttcagcctctcccaggctacacagagagagatgatacaagcacctcagattgagatgcaggattggtccgcagaaggaggcattgttgaccaaccccagctataattgcttgtcaccagagattctgcatacccatttccagagatgttgcagcacaaagaggcaagactccttccaatgccaggccacccagatagcaagagagagaggctggtatacacattccttcagaactcattgaaaagcgctcataactcgtgattttaaggagtaagtttttgctga

SEQ ID NO: 148 - DNA, 1163 bp, Homo sapiens
agcatttctcttgctcaagaagttcattcttatttctctttcaggataaaaagcatagtattaaagcttaagctctaaacatctttaccttccaagttcttcctctaacagagttagaattatgacaggactattaggaaagaaaacaaaaaactcaaaaggcactatggagttaattgcctattcttccaaatccagggcaggcaatttgtcattgcttcagactgggactagtatccttgtacctggcttctcatctgcctcttttctcctgatatttcccagcttttaaattttatttcttataaaatagatagtagagggattagtatgggacctcaaaaacctatctgaagtactcttaatgtataaactttggtgatgaaaaaaagttttaatataggttaattagattttgattttcagttttaactgttttcagaaatgtttgaaaactacttctccttggtctagtggaaacagaactggtctctatgttctgagaccttactctgagctacctttacctcctgttgtttaccaagtctcctcttttcttcacttgtttcctcttcttttttttttttctccccttgtcctctcccccttctttctttctaagatgggaacaaaccaggagggagaaacttgaaagaatggctttgcctgtcttctccaccactccctttcatttttatagagtatttctctatggttttttgttttgttttgtgacagagtctcactctgttgcccagctggaatgcagtggcgcgatcatggctcactgcagccttcaccttccgggctaaagtgatcctctcacctcagcctctccagtagctgggactgcaggtgcacaccaccacacccagctaatgtattctatatttttttagaggtgggatctcactatattgcccaggctggtcttgaactcctgggctccagcaatcctcccaccccagcttcccaaagtgttgaaattatagatgtgagccaccacacctggcctagtatttctctatgttgataggccttttgggttcaaccacaggtaagtctagttgccaagtctcttctaaacaggtatatctgataacttacacctaggttgtgaaagaagaccaagggttctcttaatgctctaccaaaatgtaaaa

SEQ ID NO: 149 - DNA, 2524 bp, Homo sapiens
ggctcaagcaattctcctgccgcagcctcccgagtagctgggactacaggcgtgtaccaccgcgcctggcttatttttgtatttttagtagagacgggatttcaccatgttggccaggctggtctccaacgcctgaccttgtggtccgccacgccaggccgaagattttcataatttggaagcattgcgtttcgtaattatgctttctcgtatttttgtgatttgggtcatttttatttttatatttttaggattacaggcgtgagccatcgtgcctggccgatttgggggtaattaacaagtccacgtgtttcatttgaatttaggatagctgggcctaattgttgtctttgcttctgcggtaccttccacatagtactaaccgcctattgtaaagtaattagaatagctgaatatgcatgttaccagtctagaaaccgatttttttttaacaccccactgtggacagggtggaaactcgtttgctttcttgtttaagatctgtagtaacatgaatggatgaaattgtttcctattggattctgtaaatttatgcgttacactgattgtccaacgtggatacacccgggaggtcactctccccgggctctgtccaagtggcgtaggggagcatagggctctgccccatgatgtacaagtccctttccacaacgttggaaataaagctgggcctcgtgtctgcgcctgcatattcctacagcttcccagagtcctgtcgacaattactggggagacaaaccatgcaggaaacagccttctagagcactgaatctggattgaagtctttttttttttttttttttttggagatggagtcgctctgttgcccaggctggagtgcagtggcgcactccattgcctctgcctcccgggttcaagtgattatgctaagtgattctcctgccttggcctcctgagtagctgggattacaggcccccgccaccacgccaggctaatttttgtatttttagtaaagacagggtttcaccatgttggtcaggctggtctcaaactcctgaccttgtgatccgccagcctctggcctcccaaaatgttgggattacaggcgtgagccaccacacctggctggattgaagtcttaatacatgtttaagaaaaattggctaaaaagtagccaggcatgatgataggtagctggaggaaggagaatcgctggagcccaggagtgacctatactcaaacctatactccagtgccactgtactccaaccccaggcgatagcatgaggcccctcgttgaaaaagtttagggttttgctgtactaatagattaatatcttgttttgcaggatttgttaaggattccaagtaactcttatttggtgagtaaatctgctaattgttttttgcttatcagctctttgtcaatgatttctgtaatggaaataggattgaagagacttttattctagttggtcaggatttacctctgaggcatttaatcattctcagagcaatagccaaatatcgactttgctgcatttttgtaggcatgttgacataacttcaacatatgctctgttctgtaaaaattgctttttttagtcagctcattaaaagtgcaaagtagtaaaagctgccctagtgaactgtaggaagcctaattggctttatctacatgtgtagcctgagctgagaaagatactagcccttgaaaatactgtgggtgattagcaatattggatttgtcggttactccaattcctcactaatgagcattccaacgtggataccctgggaggtcactctccccaggctctgtccaagtggcataggggagcttagggctctgccccatgatgtacagtccctttccacaacgttgaagatgaagctgggcctcgtgtctgcgcctgcatattcctacagcttcccagagtcctgtggacaatgactggggagacaaaccatgcaggaaacatatctagtatactagattttaagttgaagtaggatcttcaggagtctaatcattatttcttttcttttaggagagaagacgatctgcacttcgcattttggcattgacatttaattttagggtcctttatatagaagggagagtaggtaaactgatttttttttttaacagggagggtttgacaatctttggcagacttggagcaaaagattgaggtgcatttcatgcctccttttgagagtcttgctctgtcgcccaggctgtagtgcagtggcgcaatcttggctgcaacctcagcctcccaagtagctgggattacaaacataagccaccacgcccagccctcatacctcttttaaaagtcgacctgttttgcagaaagtctgctgtttttgtactaaaggctttggaatttggcatttagctaggaatgcacattctttcacctcattcatactttaagaaccacagaagtgactctgcttggccagaaggcacactgtgttggtggttatattaaaagtccttgagtattttgcttttcatgatcttgctcactg

SEQ ID NO: 150 - DNA, 2524 bp, Homo sapiens; identical to SEQ ID NO: 149

SEQ ID NO: 151 - DNA, 3395 bp, Homo sapiens
caggcggccgggtttacggaaggggtgggggtttgggaaccggtctcctgggggatgcggggatgaatccctgggcctgaagtgtcttaattcagggggaggccgcatgctggtgtcaggatggcctccagttgaatctgtgacatttaccagctaggtgattttgggactggtgactacgcgcgagacctctggaggtcgccctggtagacacggttttcagaaggacgggttttaggcattcagacccttgcgtgcatcccagcttgttgctttcagcctcgctaagtgactaagcgaccttcaggaagtaacttaatcggtctaaacctcttacctgtaataggcggataaaacggtcccatcaagactgagaaaaagcacaccagctattggcacagcgtgggcagtggggcctacaggatgactgacttagtctacagagatcccggcgtacttaagcaggtagtaatgatggacaggtgaggctttaggcggccgccctgggatctgaattgccccttggcccttatcgaagctgcagctgcttccgcatagctgctgtggtcaaaaaggagcccagagtgacagttttccttgacggtcgccgttctgtttgttgtaactgatctgcaacattttgggaaaatacagttccattgtacctgccacctttcagctgtagccagagacctttatcaaaatgggcttgtttccacagaacagcagaacggttgggggtttgcatgtacagttaaccagcataagactcgtactgggaaaatccagctgggatgtgacacagcttaactgatagcttaaggcatcagtattgggaccaaaggctggtcagatttgtatcattctgaggaccaaatgatgggaacaataaaattgttcatgacagttgttctcattttgctgtccagatgaagactcttaagatgacagaaggtgatttttctggtgatcgaggacttccggggtaatgacagtgatgaaatgcaggggacctggtaggtttcttttggagactaactgggggctgcctggtgggacagaacagcatgtttccaagggctgtggctggtcatagccatgggatctccaactgcatgcaagagcaacctggaaagactttgacagcgcaggtcagtacaatacctgcaagctgccactcagctttcctataatgtttcaggaccagggctggaagccttccatgtgtcaacttcaatgtagatgggtttttttttttttttttttttgagacggagtcttgctctgtcacccaggctgctggagtgcagtggcatgatctcggctcatggcaacctctgcctcctgggttcaagcgactctcctacctcatcctcccgagtagctgggattacaggtgcccaccatcacacccagctaattttcttgtatttttagtagagatggttttcaccatgttggctagatgggtctcgaacttctgacctcgggtgatccgcccgactcggcctccccttccaaagtgctgggattacaggcatgagccaccgctcctggccagtttagttttcacgctaagctttttgttctgcaggttgcccccaagtttcctggcagtgtgtgatactgaggaggtgagcttgtttctggagctgtgctttaaggtaaagttgatcagcttaatcctcctgatccctttcccatcggatctgaacactggtcttggtggtcgtaaaaggaggaaaagtaatagtgaagctggcctaaatgttgtaatctggtatatggcatgtgggctagtttcagacaggtttcagagatggttggatctctgaaattgtaaaatgaagtataatcttaggctaagggaaggatgcgtgtgaagctctggaggttggtatagtaatagctgacctattactgcatttgggagggatctgtcatagcttccttgcctcttaattaagggtggtgtttttttcttttagattcatgttacatgtaaagctgtcctcatttgtgactatggacctatggagttgggtaagttagtgactacccaaagctttgtcacaacttggtgtgtagctgcaggtagtgctcaactatctgggatcctgtcctaagtagtcaacctaatagaactataaggttacttaggtctgtgtcaaagttacagctttttttttttttttttttgagacagggtctttctgtcacccaggctggagtgcagtggcacaatcttggctaattgcctcccaggttcaagtgattctcctgcctcagcctcctgagtagctgggactataagcacgcaccactatgtctggctaatttttgtatttttagtagagacagggtttcaccacgttgcccagggcagtcttgaactcctgaccccaagtgatctgcctgccttggcctaccaaagtgctaggattacaggcatgaaccactgtgccgggccagaaagtcttagcatcttagtaacatttacatttggcctccctcgtgtgcccttagctattcattaccagagggcaaagatggttagaacatgatttacccaccctaaaatgcattgaaggcatcagagggcaccgtgggccacaaggcctggtagccacaaatgttcagtggtggctggagctcatgatgcattctttggtgggacgtctctcagcattagggagagttgagagtggggtagaaacaaggggttccatgtagcacacactgtatttagaatgactggtccaggatgaaacctaatttgagtggacatccatggatgagaaatgcggatatgggactgagaccagctcctaggaaaatgtctgggtgggggaaatctgggaattagtaacacaatggcttacacttcctttgcaggacaatctctatgggaagcagaaggcaaggaccccggtcattttaggtagaaacaacagcatgctaatgcaaaaaattatgcagtgtgctactgaacttcagaggtgatcaataaaagaagaataaaaagactaataaaagtatatttgtgtttgtatttttttgtagagaccgaactggtctcttcccgagctcaagcaatccatctcccaaagtgagccaccatgcccagcccttaaagagatctttggagattttttatgatgtaggatgaatgctttgcctcaagcagtaagtcccaacacatgacaaggttggacagtttccccatttacttgggaaacacggaagtgagcagtataaagttcacacggagggtctgctttggctttgagctatcttccttaatcctttctgagctgccttctcccgtgtcaaaatattgatcctaaagtgatccaggccttgtatatgcagatgctgcaactcatgaaaataga

SEQ ID NO: 152 - DNA, 3395 bp, Homo sapiens; identical to SEQ ID NO: 151

SEQ ID NO: 153 - DNA, 3395 bp, Homo sapiens; identical to SEQ ID NO: 151

SEQ ID NO: 154 - DNA, 3395 bp, Homo sapiens; identical to SEQ ID NO: 151

SEQ ID NO: 155 - DNA, 3395 bp, Homo sapiens; identical to SEQ ID NO: 151

SEQ ID NO: 156 - DNA, 1258 bp, Homo sapiens
catgacaatcagcttatgcgtgaccttgtgaccttgtgcttccactgcacgcctgcctgggctgctccaaggtggtggctaggggtggcacaagttacacattttcaatttggataggttgtgattcttgtcttccccagtcagatacctacagccgctgagagccggtattccaacgccatgagacgccttctgtcgtgagcagttgacaagaaagacccagcacttactgcaaccggaaggagcggttcctccctcgctcgcgcagccgctcttccccgccactccctcggtgcccgccagcacattcccagcaagccctgagtatatttgcatatcaactcactacatttttttcttctaactaaaaaatcgaaaggacaaattccagattctccttgtgaagtcttcctttcagttcagaagaaatggaattcgctcttcaacttcaggaagttgaaataaagagttgcttggattttgtgttcacctttaccaaaaaatggatttggtaacactgccaccctgctttggtgacagagaaagcaaaaagggcttctgtcgtgagtggcacacgtagggcaactcgattgctctgcgtgcggaatcgacatcaagagatttcggaagcataattttttggtatttgggcagctggtgatcgttggtcccggcgccctttctttactgttatatgttaggcgaaatattacgcgtttggagtaagtggtgctttttgtaactgaaaagagattctgtgtgtgtttttttttttttttagaggctgcatagttatttgtatgaaccgcaggtgacctaattagcaaggtaattcagacctgtatcctagcacttaagaagtggaagtgggataaccctgcgtgttctcgtgtgggaggctagcttaagcaacaaagcaggaaggccccaccaacaaaagaatttaaaaattatacgtgcgtggtggcgcgcgtatgaggaaattatttggcaactgtgttacagtatagcagcaaatggaatagacctagtccctgactttaggagacctgcctcagccccccgaatggctgggactacaggcgtgcgcctccgcgcccagctaatttttgcatttttggtagagacgggttcaccatgttggccaggatggtctccatctcttcatctggtgatccgcccacctcggcctctaggagtgctaggattacaggcgtggccatcgcgcccggcctgcaatgttattttatgaagcaga

SEQ ID NO: 157 - DNA, 1238 bp, Homo sapiens
ggctgattttttatatttttagagactgggttttgccatcttgaccaggctggtcttgaactcctaggctcaagaaatctgcctgccttggcctcccaaagtgctgggattacaggtgtgagccatggcgcccagcctattttaatttttaaaaatttatatggggagtctctctatgttgctgaggttggtgttgaacccctgggctcaagtgatcctcctgtctcagccacctaaatagctgggactacaggtgtgtgccatcacatctagctaatagagttgttttgaattggttaaatttaagcctgtaacccatacgtgtaatagaaatgtatatttttggtgatttatgaatacatagtattaggccaaggtttagttgtgattgatatacagctattagtacttacatatactcttaagtaatcctattaaaatcattttaacacaatgggatcttaatggcatatctttaaacctatcttataaagaaatgctgctttaacttagatgccaagcacatattttaatttaccaattagaagttctatatgtattcaagtgaagagtgtttcaccttaataatacatttcatacagattgttgaaattcatcccattcccccttccctccccagtttttggccatatggacacaggcaggactctcaggagtgccaaggatttaagccctcaaattttacctgcctaccatttcagcatgcgatagggacacatggaaggcagcttaaagtaaaggctttaaaaaattttttttgctaccacccacttgctgtttcttgcccttttctcttttttttaatgattcagaggatcgacactgttgccagcttactacctgcagtctttccagtcttgatggtattacgtaattatataaaccttttgcatggtatcatatgatattgtatatttgtcttcctacacatgtgtctttagagtaatttctttccatctggtgttgaaaatgagctctttgtgaggttatttttaaatcttcaagctttctggcatcctcaacacttgaaataacacaattgcttttggaggcaagaaaatccacatagtatactttgtggtttttccagtgaaaatgtaaatagtattttatttatgaaattttatatatatatatatatatatatacactttttttttgttttttttttttgagacggagtctctctctgtcacccaggctggagtgcaatggca

SEQ ID NO: 158 - DNA, 1138 bp, Homo sapiens
tttaaacatagagtatggcaaatccaagtttcctacccagctgtgacaagtgcccagattcagtgttctgggtatctccattgataatatctctgtgccacatttaggaagtaatgattaggacaggagccaatcataatcctgaaagatatagtcctcaatggcataatcctgagtgttgaaatcccaaaagaccaaaatcccaaaaatataattctggaaaaaggaatttaaaaaaaaatttaaagatatgtatttacatttttaagggggatttatttgagaaacataaaaacataacagaacacttcataggctactttacatgataaaataggcaaaaacaacatacatattttgcaagcataaacacttgggtatactaatgacagtcatacaggtataagttatgagcagacaaggtgtattcataaaaaaatagcttatataactgcagtcatctgaaataccacgacaaacaacctaagtcttaagatcaatcaaaaaccatgatgggctttttgctgtaggcccgagtggttgctgccgaaatgggcaagttcatgaaacctgggaaggtggtgcttgtcctggctggacgctactctggatgcaaagccgtcatcgtgaagaacattgatgatagcacctcagattgcccctacagccatgctctggtgtctggaattgaccactacccctgcaaagtgacagctgccatgggcaagaagaagatcaccaaggggtcaaagatcaagtcttttgcgaaagtttgtaactacaatcacctaatgcccaaagcccgacgagaggccaaggtcaagtttgaaaagagataaaagacaggcaagaacaagtagttcttccagaagctgtggttttagatgctttgttttggtcattaaaaattaaaaagaagcagccataaaaaatgatgagttcatgtcctttgtagggacatggatgaagctggaaaccatcattctcagcaaactatcgcaaggacaaaaatccaaacaccgcatgttctcactcataggtgggaattgaacaacgagaacacatggacacaggaaggggaacatcacacaccggggactgtcgtggggtggggaaggggggagggatagcattagga

SEQ ID NO: 159 - DNA, 1678 bp, Homo sapiens
ctttttttcattttgatttttgaaagtgaagatgatgccctaattcctggtaaggatttggggcatagttttttgtttttttgagacggagtttcgctcttgttgcccaagctggagtgcagtggcgcgatctcggctcactgcaacctccgcctcctgggttcaagcagttctcttgcctcagcctcccaagtagctgggatgacaggcgcacaccaccacgcccagcaaattttttgtatttttagtagaaacgggatttcaccttgttaggctggtctcgaactcctgacctcaggtgatccacccaccttggcctcccaaagtgctgggattacaggtgtgagccaccacgcccggccgatttggggcatttttatttaacagaacttctctaaccttccaactgcttcccacaaacacattggcctcaaggctccttagaatcccagttccagcttcctaaaatagacagtgggtatcgggcagcagtcactggggctcaagggcagtgagcaagagaaatgtctaaagctgcttctcccaacaccgtccaaagtctccactgcctgagttttgtttcggctggtttgaactcatttcgggtgtgtgcatttttcttttggtacccatgtgagacatgaacaacaggagggagggaaagagcccaggtgggacgtgggacaggcttaggggaaagagcttgtcctatctcaggaacaaaattataggctgtgggcagagggtctgaaaggtgggctttggggtagtgcccaagcctggtcgtgttgccaggagtggtgacaagaaatgcagcttacatcaaacgaacatgtagtgcatgcccactgcctgatggccagatggcctgtaggaagagctaccagggcttccagacctgtggaacgaagaggatggggaaaaggcagagggcactgagtgtccctttaaaaactaacccactgaatattccgtgtgatctagaacagtgtggcagctttcacagcacaggaccgttcatcgggggcctaaacgtttccctcagctctgtcaccaactcacttctctcggcttcgttgtctgtaaattggatgaaaagagctctaatgcctttcaggctcttagaagccatagatttggacaagcccagcaagatgggtgtccttccaggcctcttcccctttcctccatctctggcaacagttcttggggtttggcaattgtttggattttttttctttctgcagttgtgtgtatgtgtgtttgtgtgaagaaaaacagactctgtccaggtagaaatggtgaggagggggaagagaattacatttccagggtcagaaacttggcaacagttttcctagagtgactcagacacaccacagtaacaactctcgctgcaattttattttaatttgagaaataaagatttcctccaagccacatgaggactctggcacccacccacaaagcaagacctgtatttataagccgagggctcagggagcctaactgcgggacccgtcagggccccgtgacccatccccgtccccacccccccctccaccgctgggcccatcagtgtgtgttggggggatgcttggcagctgggggtgaggagacaacaaacctcgggaactggagccagagctgcggcctgactgacgccttttgatgctca

SEQ ID NO: 160 - DNA, 1187 bp, Homo sapiens
tcggagccggagcaggagcaaagggggcagcaggagccggagcaggagccgcagcaagagcaaggacaagaggaagggcaggaagagaagcagagaggagagccgcagtcgcagtcgcagccgcagcaagagtgagaggagcagaaagcgaggcagcaagcgagacagcaaggcgggcagcagcaagaagaagaagaaggaagacactgaccgctcccagtccagatctccatcccgctccgtgtcaaaggagcgggaacatgccaagtctgaatccagccagagggaaggtcgaggagagagtgagaatgctggcaccaatcaggagacccggtccaggtcgagatccaattccaaatcgaaaccaaaccttccatcagaatcacgctccagatcaaagtcagcttcaaaaacccgatctcggtccaagtctagatccaggtctgcttccagatcgccctcccgatctagatctaggtcccactcaaggtcctaactggctatggccacagctggaactacccgagaagtcttttgtacatgtttggtagccgtagcacaagtgattggagtagaacatgtcactgctgtacatttttaactcccctaatggtgtgtctataattgttaaatctaagtgcttcctctcagtaaagcctcctggcaccaggccttcctgctcgactgaaaaaaattttctctttgaaaatccccttttactcatggcccacagtagaatatccaaaacgccttggctttcaggcctggcctttcctacagggagctcagtaacctggacggctctaaggctggaatgaccacataggtaggtatggtgagttcaaccatttttgctcttgaattgatgcccttcgatgtatgccatttagtgaaagtgctaagtcttaagtttcctaccactttggtttcatatttttggacttaacaaagttgtgaatagcacagtcgaggaaaattgatacctgcagtaacccataggaaataaactgtagagttccatattctggtattgtgattatattgttttatattaaaaaagaaaagaaaagaattttttttaattttatttttccccgtcttgcaaagtatagtgacccctgtttccattaaatttgaataaagactatttttgcttgacaaaatttcatggtgtttgaattgaagtt

SEQ ID NO: 161 - DNA, 1176 bp, Homo sapiens
tcacggctcactgcagcctcaacctccttgggctcagatgatcctcccacctcatcctactgggtagctgggaccacaggcgtgtgccactacacctgactaattttttcaatttttgtagagatagggtcttctgtgttgtcaaggctggtcttgaattcctgggatcaagcaatcctcccgcctcagcttgtcaaagtgctgggattacaggcatgagccaccacacttggccccaaaactttatttaaaggaacaatttaatgtgtatttattgtctctcccacccacctaatatggctggtgctttaaagaacctcagtacatgattgatgggtagatgaaaatatttaagagtaaactttattctgcggaatgctggcatttcttaaaggaaaaattcactcagatgattgcattagatattttagcaaaacatatcctaatgtagtcacacttttttttttcttcaggattatatgcgtcaggcaggagaagtgacttatgcagatgctcacaagggacgcaaaaatgaaggggtgattgaatttgtatcttattctgatatgaaaagagctttggaaaagttggatggaactgaagtcaatgggagaaaaatcagattagttgaagacaagccaggttccagacgacgccggtcctactccagaagccggagtcattcaaggtactgttgatgtcttttgtgtgttggagctcatcataaattcattagtgagcacatagataatttatttacattttcctgttgagttcttaataacatgattccatctggttcaataacttagaattttgaactgaacatttatttgtaaaactcttgaactcttaggtcatgagtacaaatagaagtcccttctcttagaaatcagaggccttgctcacgcctgtaatcccagcactttgggaggccaaggtgggcgcatcacaaggtcaggagttcaagaccagcctgaccaatatggtgaaaccccatctgtactaaaaatacaaaaatgctgggcgctgtggcgcatgtctgtaatcccagcactttgggaggccgaggtgggtggatcacctgatgtcaggagtcgagaccagcctggccaacatggcgaaatcttgtctctactaaaaataacaaaatttagttgggcgtggtgggtgcct

SEQ ID NO: 162 - DNA, 1156 bp, Homo sapiens
acatttagagagggccccggagatgggagcagctgaagatgatgtggacgtgatctcaaagggaaatgggagggctcaagctggagggcctatcttgcattctggggacaggtatcttttttgtcttattttttttaagacagagtctcactctgttaccctggctggagtatagtttcatgatcatagctcactgcagcctcaacctcctggactcaagcaatcctcccacctcagcctcctgagaatatgggaccacaggtgcataccaccatgcccagcaaagcttaagataattgccaaaatcatggcgtaagggttacagagcagtagaacagtctcacgtaagaatgagacaccacctgattcttagattctaaatgtcacaggaccctggaacagcacaacagcatcttgggcacagagacgggggtggtatgagatggggccatggggagaggcctggatttcaatcttagttccgctgctcattagctctgggaccactttgtaccccatctcaagagtgggagaactgtgtcttccttcatgggtgcaggggagtacttgatggcctgatggggaccgtgcatggcagggtgccatgtgcctcattataagtgatggctgcatatgcaaggacagactgaaatacaatgtcagggctaaaaggactcctccgaaacttccaggcctctgtctggcccttggaatcaccattaaagcaaccctgatggcaggccccgtgccagcaagactgggcagtttggtctctgctacatcctcagcacctagaacaagtcttggctcagaatcaatgcacaattaaaactgctgaatggatgaacaaatgaatgaagagtaagtgaagcttaagtggaagcagcaccagtgactgtggccttggatgaaaagatgggagttgaaaccttcaccctgggatcactgcacctccgttttcccggtggtgacgtccaggagcagttgttgctctccagggtcttcagggtctctcccaagtccctccccacgaggtccgatgataagcctgtctctctggggagctgggagggccaagaaagctaagaagggtggcaatgggtcaggtctgagtggggctggcagcagcgacagcggaggcctccccagcagggct

SEQ ID NO: 163 - DNA, 1193 bp, Homo sapiens
aatctcacgctccaacctccatcccactgatggggcataaaggtagaagacaggactcttatttttttttttttttttttgagatggagtcttgctctgtctcccaggctggagtgcagtgacacgatctcggcttactataacctccacctcctgggttccaacgattctcctgcctcaggctcccgagtagctgggattacaggcatgtgccaccacacccggctaatatttttacttttagtagagacagggtttccatgttgggcaagctggtctcgaactcctgacctcatgatccacccgcctcagcctcccaaattgctgtgattacaggcatgagccaccgcacctggccgaagaggggacttttaattggcaagttcatcaccagttaagcagggctctgtcccctccagtttaatatggtctctctggtgtttacaccattgccttgggtgaatgctcaatgtttcaagatttctcccccttcccatttctcctccaaatatggcagcctaaatgtgagggtgatctggctgtgacatctgtcaccctattgatcgcagggttgattctgctgatctggctggctaggcgggtgtccccttcctccctcaccgcccttgtgcattcctccggaagctgcacactcagtctaagaggacaaccatcctcgatagaggactgttcttcagtcaagggtatatgagtagctgcactcttcttctggaaccttccaacaagttctcaaggtccaaatatggcagccaggaaaggggcaaatggaggaacctgggagtctcctgggagcagtgggtggggtctcctgtcgctgtgttacacacctggtccacggtggcacccattcaaggcccctcttcctgctcctctcagcactggccacagtgcatcagccacggaatgggtctcaccaacctggtcctgagccagcctctcctgctgtggcccaggaagccccccttccctcctggccacaaagtgccccgctctgctggcctcttgatcccaggcgcatgctggagttctgggcctcctgtgcacccagcccaggtcatgaggaccccccagtgctcagtcaacctcacgtaaccagctccctctttctacccacgttgtgttttcacccccacaatcccgcctccttccccacactggataagtggtaaggt

SEQ ID NO: 164 - DNA, 1144 bp, Homo sapiens
gttgatatgatgttagaccacacttggctcaatatttagaagtaagggaggaatttacatagtgcagtggagaagtatgaaattctttttacaggcttaataattttttttttctatgctattagctgtcatacctggggcttattaagagtcatgctattatacagagttaggtttgggagtagagaacttgaccaagagctgcaaagttatggctgggctttgggtaggaagaaaaaaaaggaaggaagaaaaaaaaggaaggaagaaaatgggttggtgggacattggatatagtaagactgttctgaactctgtaacataaatgtatgtctgtctccctcatttggcaagaccttctgcagtgttcctgcctctgtgttgtttgttaattagattgtaatgtgtgaaagggcacaacactatcctcttctgagtagcatctagtgtagtctggtgcccacaacggttgcccgttattattagttgatgacgattagtgaagctgaagctattttttaaacagggcccaagggatgcagacagtgatgaaaacgacaaaggtgaaaagaagaacaagggtacgtttgatggagataagctaggagatttgaaggaggagggtgatgtgatggacaagaccaatggtttaccagtgcagaatgggattgatgcagacgtcaaagattttaggtttgtatgttttacacttctgatttttgaatatgggctatgggattttgtttgttttgatttagttttactttgattttcgttttcttcccctcttcatgttttctttttaagaatccaatctagtgtaggctatgctacaaagattgtaaattaactggtgaggtggaattttctaaaaggtgtcaatgcctgaagcgttgccaaaatgatagattttgcatttgcatagaactttaaaatctgaagaaagattccagagaagactatttcagtgattctcagatattaaaatcacctaggatagatgccttggaacctttcttaagtttctcccaaattaccgtattagagagctatggttactaatggaatatgtcatatccctctggtggtttagagggaaaaacagttgagaacttgtgcattatctcatttgagtctcatgagc

SEQ ID NO: 165 - DNA, 1157 bp, Homo sapiens
caaaagccaatgtcgtgtattacagtacaacgtaagcatggaacctcatgatgacagtgaattatcagaaaagaacaaattatattgtttttaaaaagggcagtaaaatcatattttgttttagtaatactaataaaatatattaaaaagaaatccttttacttataaaggggtaaaaattttatccactcagctagttaaaccagataagctagataaactgttgtattcctctgctatcctggataaatgaggagtgtgttccatttccttagcttatgttgaatatcatacagtgagggacatgataggaggttttggctcaactgaccatggcaagtttcctgattccattggttatccatgagacatcactcataatttgtttgagcctctggctgcactgtatcatgcttgtgtatcttttttgtagatcattcagtttcccagccaatcatggtgcagagaagacctggtcagagtttccatgtgaacagtgaggtcaattctgtactgtccccacgatcggagagtgggggactaggcgttagcatggtggagtatgtgttgagctcatccccgggcgattcctgtctaagaaaaggaggatttgtaagttggcttgaggaacttgttcctatctctctctctctctctctctctctctctctctttttttcccctaaagcaaaacatgcctgtttagtttccttagatgttcacagcattaattacagggtattttcaaacaacgtttgttgtaaatagaactcagcaaacatagtaggagatgtaaactcaacttttaaaaactaaagtaataatgttttggtggggggacacattgatagtattgtgagataagaactgaaatctggatcaaagttcattggtctatcagaaaacaccatttttactttaaaataaaagcaaaaggggggtggtgaaggaattaaaaaaataaagctgatgctgggatgttaacagggaattccagatttgagagcagtgatttgccaatacccgagaaaccttaatatagatcagattatagggctattcttgttttgttagctacgatttaattatagaatcctctttggccctccttgaacggctttgtttctcacacctggcctgtcaagaaattagggatt

SEQ ID NO: 166 - DNA, 1179 bp, Homo sapiens
gtcccgcaggcccccgctggccgtcacatcccgggtgatgacagtgactgtgcgcccccctacccagcctccagctgagcccctcatcactgtggagctctcctacatcatcaatgtgagtggagatccatgcagagaccttgggtgcacctcaacctgggtggccagaggcctggctggtgggaagcactctgtccctgatggtgggctgaaccctggacctgtgtgggagctgctgtggcccccatggcatgggcagtggtggggtgtggtgagcttccctccctagactgcactcatgtcttttgctccccaggggaccacggatccccattgcgccagctgggactactccagagcgtgagttgggtggctcctctgggtgaggaagggagcagccctagggccctttgccagaaaggggtctcctgcctaaaaggcaagagggatttttggtgccatcctagcctaaggggtcaagaacgtatcctgggactccctgctgttgcctcgtggatgtggccttactgtggatttagcctgtccttgggcagtggccaggactgggggcagggccacgtagctggcctggggctcactgaatctctcccctacccaagagatgccagctcaggagactgggacactgaaaattgccagaccctggagacccaggcagctcacacccgctgccagtgccagcacctgtccacctttgctgtactagcccagccgcccaaggacctggtgagtggaacagaggtgcctgggctgaataagggaggaggccctgggcttccagcagccatcagtgatggtgttggcaggcgcctgggtgatcctgaatgtgcatctgcaggtgcgcttgtgggattgtacgtggatgtctgtgcccctgggattgtgctcacagcaatgatatttgcctgggggtatgcggcagtggccagttgtgtgtgtgtgtgtgcacatgtgtgtgtctggttgtgtgtagaagagtgcaggtgactgagcataaatatgtgtccacatagatacccgggtctgttctgtgcatacatgagtacaacagcaagaaggtgttgcccttctgcctgtgggtatgccagtctatggtagatgaggggacagggcacccctgcagctcccccctcccaggaacccatctgactgtctgcc

SEQ ID NO: 167 - DNA, 1159 bp, Homo sapiens
tacctaccctgcgcccggcccggtccccgacttagggatggcaaacttgcgccccgtggccgcccccgccagcgccggcccccgctcctgctgctgacggcgcccaggtgagtgctcggccccagaccccgacctggcctcgcaccgagccctgccggcgcggtcccgagtttccgcaccggcccggactcggggcgctctcctaacccgtctctgctgaattctcccccagcccgaactgagttcgttcagcgttcgcccacccccatcttctggggaactcccaaacctagggccgaggcccccttaatcgctggtgaatctctaatctcggccccccccctcccccagcctggaccgaccctcttacccatctatgctaaagtctccccctccagaattctgacacagaccgtgcttgctgtctcgagtctttccctatctcggcctggatccgggcagtgtgccccccacctttattagagcccccccattaacctgcagctcaactgtgtctccccctctatttcccgtcacggtctgaatgccggaccctgctcctctcctccacttcatcactgcccggagtctttcctgtccccatccatgtctgcccatagtttctaccctcccccgcgcctgtaccccgaccatgcttcttctctatttctgcccctagcgccccctcccccatatctatctgaccggagtcccgccttccctcgccaatcttgctgcaagtcccctcccctcagcttggaattggggccgtgtcccccgtgtctgctccgcgccccctcccctccagctgagatcccgactggacccgcatccctgactcccgtgtccatctttggccggagtctatctgtccatcccccatccctatcctcccacccctggtcatagagctgggcaccagacgcaccctcccgcagccccagggccggcatgatccggagggggttgtaggctgtgaagttggcggccactcccgcagtcagcttggtccgagggcacagccgggggaagtcctccgcgccgcggcccgtgcagagcaggcgacgggtctgttgcccgccggggggaggggcgcccgggccgagagatgccgcctgcctgcccgcctcgccagctgccggccgggctcctgggcgtc

SEQ ID NO: 168 - DNA, 1404 bp, Homo sapiens
agcctttttagatttgttcccttctgtccttccactcaaaactgaaaaattgcccaggctgcccaagagggccaagccaagtagagagcaaggaacaccaggggaagtgtcaagacattagaagaaactcagtgtttttggtgatctttactatgtgacctatccctgcttatccctaagtgctgtcgccacatggtttataaactgtctttgttttccccacaggccaggacgactggaatgggaccaggccgtcgctgaaggcccctcctgctaggccagtgaagggagcatacagagagcacccatatggacgttattaaaaacaaacatgaggggaaaatatcagttatgagcaaagttgttactgatttcttgtatctcccaggattcctgttgctttacccacaacagacaagtaattgtctaagtgtttttcttcgtggtccccttcttctccccaccttattccattcttaactctgcattctggcttctgtatgtagtattttaaaatgagttaaaatagatttaggaatattgaattaattttttaagtgtgtagatgcttttttctttgttgtttaaatataaacagaagtgtaccttttataataaaaaaaagaagttgagtaaaaaaaaaaaacacacaaacctgttagtttcaaaaatgacattgcttgcttaaaggttctgaagtaaaggcttgttaagtttctcttagttttgatttgaggcatcccgtaaagttgtagttgcagaatcccaaactaggctacatttcaaaattcagggctgtttaagatttaaaatcacaaacattaacggcagtaggcaccaccatgtaaaagtgagctcagacgtctctaaaaaatgtttcctttataaaagcacatggcggttgaatcttaaggttaaattttaatatgaaagatcctcatgaattaaatagttgatgcaatttttaacgttaattgatataaaaaaaaaaacaacaaaattaggcttgtaaaactgactttttcattacgtgggttttgaaatctagccccagacatactgtgttgagagatacttagagggagggagtaggttttgaagaggttgatggtggtggggagggaaggcctcctgaattgagtttgatgcagagctttttagccatgaagaatctttcagtcatagtactaataattaaattttcagtatttaaaaagacaaagtattttgtccatttgagattctgcactccatgaaaagttcacttggacgctggggccaaaagctgttgattttcttaagttgacggttgtcaatatatcgaactgttcccaagttagtcaagtatgtctcaacactagcatgatataaaaagggacactgcagctgaatgaaaaaggaatc

SEQ ID NO: 169 - DNA, 1210 bp, Homo sapiens
acaggctgactggggcattaggaatgtttgtacctctctgcttccctggcagcctggggaagggtgcagggctcagtgcgctaaaccatggtaaacatcttcaatagaactaccctagaatttagtgagtgtgagactgagatattgctcagaataaatttattccatagccatttaggattgcatgttctggaccaaccttgtccagtatgttttctgtttgagctttttcattcttttgttaagccaacaagttgagaatttggccctgctgggatccatgtagtgggcactagctgctctttggccaaggccttcataaatgattcagtctctcattatctgtcctctagccccacaccctgatttagaccgtggcaaaggaagaacttgaggtcaagaccaaccaaatctgtgaattaaagctgttatttttttctctgcaagggcgctttgcttcaggtctgggctatgtgcagaacctaagcaggctgtgagagttagaagaggcagtattacatgttaggcccagaacaccatgggaaaaggtttatgtagtgtatcttagtggcctgcctagctgcctctgggccaggctgacttctgatgtccacattagctcgtacctgaaccctgttgctgaatgccagccctgttctcctgtaactattatatacgccatggcctggggggcattgaaggaagtaagctctcagagatcctaacactggctgggaacctctgactcagagcatgtctttaaagagtccacatctggccaggcgcggtggcacatgcctgtaatcccagcactttgggaggccgaggcgggtggatcacgaggtcaggagtttgagaccagcctggcaacatagtgaaaccccatctctaataaaaatacaaaaaattagctgggcgtggtggcaggcgcctgtaatcccagctacttgggaggctgagacaggagaatcacttgaacccaggaggcggaggttgcagtgagccaagatcatgccactgcactccagcttgggtgacagtgcgagactccatctcaaaaaaaaaaaaaaaaaaaaaatccacatcttcagctgggcgcggtggctcatgcctgtaatcctagcactttgggaggctgaggcgggcagatcacttgaggttaggggttcaaaaccagcctgaccaacatagtaaaaccccgtccctacaa

SEQ ID NO: 170 - DNA, 1149 bp, Homo sapiens
agtggtgcctgggtgcctggcctccagtgtcccacctccttcaccaccccacttggctcctttgccatcttgatgctgaggtttcctgtttggtgagatcaggttgtttgtggtaaaagaaaggaaagggcttctgatggctttgccacaagcttacctgtgggtttcagtcctgagaggccaccaccagttcccatcagcactgtctccatgcagcagttgctgggtcccatgtccagctgcctctttggcttcatgggtttttctgcttcctgcccccacccccacatgtgcaatcctcaagatttgtcctgattctatttcctggcacctccctgcctgtccttggggattctacttcttcctgtgtgggagcccatagctgttgtctaacaggtaagaaatgaaattgaactattgactgggccccagaaatccataaaatggctgcagacagttgtttctgtgtcctgttctacccccactccagtacataactactatgtactgtgtagagccattctatatgctgaatgttctgctgttgcaaacttgccagggtattagccagtgtttgtgccaagcagttttctgggacaacagaatgactcagaccaagatggataggatggttagggctttgcttcttgctgtttttctttgaagctagttcattgtcctgcaggtcccttcatcttccatacctagcccactcttttagcccttaccttaaatctctcagataagttggttcacaaagaatgttaagtactgaatcatgtgtgactgagaccagagatggcaaatgaatggcacaccatttctccttctcctgccccagggcaggtaccactgatctgcatcagagttgcctgctattctctggtgtatccttcacatctaggtgccctcaagcagctgtgtgagtgttgagatctctgccatctctggctgagatactgctgtcctgtgaagtgtttcccatgacctttttcttcccctttgaatccctctgtctggagtagtccttgcctcttcctgctccagtagggccttttccctaccccagcccctgtgccaggctaagctggtacaagagctgccaacctcacagagtgtttgctaggcgagagaggtgcagggaagagg

SEQ ID NO: 171 - DNA, 1194 bp, Homo sapiens
gtttcaccatgttggacaggcttgtcttgaactcctgacctcaggtgatccgcctgcctcggcctcccaaagtgctaggattacaggcatgagtcaccacacccggcctggccattttcaagatgagaaaactgaagttcagaggagagaagcactgtatttgagatcatatagtgagacagtggcagagcaggcaccagaacccagacttccttactaccagctgctcccacttggataagacatcagagatactgtttttctggactggagctcaacttggccttttattctttggagccgttgggagtcccaggagagctggagctaacaaatgaggatgcctttacaagccgcctgactcctctgttgcttcccttcaggaagggaggagaatccaggagttggtctttttaccagctccctgctgtttcccaagaaataaacagaagagggcagaatcagccttgctacaggctgctgagggttcctggggcaaaataggaagccattgctcttactgggatgtgtactatcctgtggtttgacttttccagatcgtcaatgtatggtactctgtgaatggtgagaggctgggcacctacatgggccataccggagctgtgtggtgtgtggacgctgactgtatccttattttgggtctgagtccgtgttgctagggtctgtcagcgatggagaggctgagttgggagttgggagttgggggtgctgttgagggcctagagaacgatacctcctactccctggtctcttcactgactgaggaaacattcaggacaaattccagttctggataaggaggtaagaggggtagaaaggctctttggggctgaacagggagatgattcacttggcatcccaagaggacaagggctcgggtgaacttcgtcatatttcttaacaactcttcaggggacaccaagcatgtcctcactggctcagctgacaacagctgtcgtctctgggactgtgaaacaggtaagctgggttcattcacctttttagcaaatattgaggacctacagtgtacctgtttgagtaaacaggtcctaggaaaatagagatgaaatccatagatagtttccagtctagggaataagagacaagaaagatagatgagaaaatacacgccatggtagaggaagcatagattaagttttctttttttttttt

SEQ ID NO: 172 - DNA, 1203 bp, Homo sapiens
ggccgcggagctggggcccggcggggagcgcactccacccgccgacccgacctcggtggcccacggtctttttttttttaagggggagccgagatgcgggagagcctggggtgggtgggggccacttacacaaagcgggaggctgggaaaataggccgtccaggtgcagagagacagcgccccggggcggcttcccgcccaatgtcgcctagagcggctcgcccgcctgcccgggatccgcacagcagatccggagcggttccgcgcggaatagagagcgcgccccgggggacgggggtgggggccacgggaccccagcgcctcctgccggtcgcgccctctgcgcgctcgctccccgcgcgcccgtgaggggcgagagggaggtgtttgacgggatcctgggtgtgggtgaggctgaagccagactttcgggttgcagtagaatcgaatcgaggaccccttcctctagaagggatcagaagcgggctgggggagggggagcccctgccctcattgctattccctctgccctgcaggagaatggccacgtgaaaagcaatggagacttatcccccaagggtgaaggggagtcgccccctgtgaacggaacagatgaggcagccggggccactggcgatgccatcgagccagcaccccctagccagggtgctgaggccaagggggaggtcccccccaaggagacccccaagaagaagaagaaattctctttcaagaagcctttcaaattgagcggcctgtccttcaagagaaatcggaaggagggtgggggtgattcttctgcctcctcacccacagaggaagagcaggagcagggggagatcggtgcctgcagcgacgagggcactgctcaggaagggaaggccgcagccacccctgagagccaggaaccccaggccaagggggcagaggctagtgcagcctcagaagaagaggcagggccccaggctacagagccatccactccctcggggccggagagtggccctacaccagccagcgctgagcagaatgagtagctaggtaggggcaggtgggtgatctctaagctgcaaaaactgtgctgtccttgtgaggtcactgcctggacctggtgccctggctgccttcctgtgcccagaaaggaaggggctattgcctcctcccagccacgttccctttcctcctctccctcctgtggattct

SEQ ID NO: 173 - DNA, 1175 bp, Homo sapiens
ggtggtgcatgcctgtaatcccagctactcaggatgctgaggcaggagaattgcttgaacccgggaggcagaggctgtggtgaaccgagatctcgccattgcattccagcctgggcagcaagagcgagactccgtctcaaaaaaaagaactatttccttatgtgttttaacatttttgaatcattcattcaacagcattaattgactatctgttgtctaagagctgttcaaggagctggaatacataagtaagcaaaataggcaaagtctcttctctcttggactttacattttagtaggagaagacagataataaacaaatacataaaggtacagagagtgagaaggagtgcttatagattgttaaaggaaagcctgtctgataaggtgacgttggaacagaaacctataggaagtgaaaatgtgagctctgtttatctgggggaagaatgttccaagtagagagactggcaagtacaaaggctgtgtggcaggaacataccttgaatgttcagaaacaagcagaggtcctggtagctagaatgcagtgagtgaggagcagagcggtggagatgaggttagagaagtactgggatggggagcatgcagatcatatagggccttttaggttatgagaagaactttggagttggatgataaaccattggaaggttttgtgcagaggagtaatgtgatttcacttacgttttagaaggatcactgtggctgctgtattcagactaggctgaagttgcaaggaagctattaaaatagcctttagggtcaggtgcggtggctcacgcctgtaatcccagcactttgggaggccgaggcgggcggttgaggtcaggagttcgagaccagcctggccaacatggcaaaatccgtctctactaaaaatacaaaaattagctgggcgtggtggcaggcgcctgtaatcccagccactcgggaggctgaggtaggagaatcgcttgaactctggaggccgaggtttcagtgagccgagatcacaccactgcactccaacctgggcaacaagagcgaaactccatctcagataaatagcctctagatgataagtgatggtgacttggatcaaggtggcagcagcagtcttggagagaagtggtgggattttgctattctgaaggtaaaaccaacaacatggagtc

SEQ ID NO: 174 - DNA, 1162 bp, Homo sapiens
cgttgttgcaaagaacatgatctcattcttttttatggctgtgtagtattctatggtgtatgtgtgtcacattttctttatccagtctaccattgatgggcatgtggattgattctatgtctttgctattgtgaatagtgctgcagtgaacatacccatggatgtgtctttatgtgatttaacccattttataaatgaaaaactgatgtccagacaggccagacaatttctatacacccaggtggaaacaaagccaggattagagttccatgtcccaactccattgtgcatgtgttgcctctcatttttcttggatccctgtatattctcctaatttgataactaattgtttcatgtgagtttttcattttcaaaatactaaaatttttactttctgctgattgttgctagagttaatgattatgatttcaatatcctattttccttttttttttttttttctctaaccccaactttagggaacagaagtcaaagcaataacatattcagcaatgcaggtctataatgaagagaacccggaagtttttgtgatcattgacatttaagacaccaaaaaataaaagactcctacgaagaactgtttttgttttcctcttccttttgagaagacactatgaattaaattctacagcttttttttgatatatggaaatttgtagaacagaaatattttagttaaagtgtgactttcagaaagggaaaatcagggcacagccttggtctgtgttccccaaatattcacactttaaagaattcttcaaccccccaagggacagttatggtcctttgattctctgctgtggcagtaggtgtgcctcatgcccttccagtgcaatgcaagccctccagcctcaccccagagaggatcactgatgtcagcagcagcctgaggctgaatccaggttgaaagaagaataacttgaaaaaatatatttccacacacagaattttgtttttcttccaagttggttaagacatatattttgtttcttttttttttttttttttgagacggagtctcgctctgtagcccaggctgaagcgcagtggtgtgagctcggcttactgcaagctccacctcccgggttcacgccattctcctacctcagcctcccgagtagctgggactataggcacccgc

SEQ ID NO: 175 - DNA, 1108 bp, Homo sapiens
gtgactgggatcactcaacagcactgtgatgtattattttcaatgaggtgcctttcttaactgaccaaatgctgccttgtttggcccctaaatcaataaaatatgttaaaatttgtatcccctgttgtggcattttttttagataatctaagctagaaaaatgacattgaattctggacctggctggaaggaaaagaagccctttcttgtcgctggcagctgtgtggtagggaggtccaagtatgtgcatatgagataagcctgcaacctcttgaccttcagctcctatgcaggcttctcttgagcccagagacaaggcagcttggtctagtggagatagcactgtgcttggagttcaggggacctaggacaaatcccagccagttagttattcactgtgctcctgtttcctcagctgaaaaaggaagttggttatgccaccttcttggccttaatggcattaaatgaaatttataggaagaaggtttttgctcagtacctggcatgcaacagacattggataaatgttagttggatccagatatacacagaaagatatctgcttcctgccaggctggataactgttgaatggacacttgtccatagtctagaaagccagtgcttctaatccttaagccagatctttgactaccttttcagttgcttctttaacactctttgttgcttctctgtgtgtcctagtttaaattcatttcctctccagcaaaagtgagcttaaataatttctccaaactaaagctctcatgtttttggaagggctgcctttgcaagtgaggtttctgagaaatgactgttgttcccaaaacaagagggagctgggctggaagcaccactattcttctttaggcatcttgttacagagagaggcagggtcttcactgacatattaaatcctgttccctgaaccagcccctccctcttctgctccacttcctcacctgtgcagagtcattttcaggtgttagccttactgatttgcactgatctgtttgttccctgagctttttaaataccctgtgaaaattttctttcctcccttggtcatcatgcatctaattgtggggaaatgtttgtcaaaccaacctg

SEQ ID NO: 176 - DNA, 1202 bp, Homo sapiens
gggctgggtggcgggcccagggaaatggggtggggatgggctgggtaagacctggccctcccctgctgccctgaagaccaccccagtctacctcggtgctggccaggaaacctttcggctacctctcccaccatcccagactgtgggcagggggatggggagggagtgggcctggatctgggacctccctccagaatttcctccagatgggggcagtgcccagggaggggttatttgtcttccctgccatggagtgggaatccccagccgaggccctaggcccctcagcagggaagggatccccggggaggcaggtcccaggagcagaccctgcccccagcccccacagacacaccccaatctgaaagccatgcgtgtcggtgtatataggaaccatgtacagagcccagagaagccccctacatccccccgggaaaaaaaagaaaactagacagaaactcatctatatattctgtatctggagttccgttttgaatattaactgtgttatttttatacactttttaagccttaactcgccattgatttaccagtttaacgtttcctggggtttctttgcccatggggttctctgcccccacccccggccctttgtttgacttgcgtcgtctgatactcagtattgtagctttttgtccgcatgttactccctgtaaatacgctgttatacatactgttaacacccctttgctttttctatgggacctccaggccaccatatttagaactagttaccttattaaaaaagaaaaaacagtctgttggcttctcagtctgcatcttggaggcagggaggtgagggcaggtgcccctcagacacttcaggaaggtagtttgcattctatttaaaaaagggagtggggagcaaatgaaaatcaaatgtggggggaaaacactaaagggggcaagaaacaaaggaattacaaaccctctgctctttgtatttctctgttgtgaagaataaactgtacctgcacccgggtggcggtggtgtttggcgtgctctgtgcgagggcagggctggggggcacctttccattgctcctctcccctcccccgccccccagacttggagaaggaagaaagtggcctctcactgtgggctggcctcactccaggtgctgaactgagtgctttatgttgattgcctcacaactccctaagaagtgggcagcaaacca

SEQ ID NO: 177 - DNA, 1175 bp, Homo sapiens
ttaggctgcaggcctgggttttctattatttattcttctggttaatctgcatttttttgatttaggcaatcactgttatgcttagctgcctggaagtaatttggataattcttcactttttaaatttccctaaagtgagcctttatgtaaagtgcaagttttccttcttaatttttgtaaggcagtttttttattttaattcttcttttggctttttatatatgggatggggccataaaataatgagaacttctcaaaaaacaatgcctgaaattagtcttaataacttcttaagggttacagaaagcaagacccaagccagatattgtagcttgtgcttgtagtcccagctattcaggaggctgaggtcggaggatccattgagcctgggaatttgaaacaagcctgggcaacataatgagatcccatctcaaaaataataaaaaataaagttccatctgtattcagtcactctttcagatgtgtctaaataaaacatgtttagtttcacccagaagaacatgcagatgccctcaggaaattggtgcacgatgtatacaaagagatttaggtaataaataatagagactgtcggggtctgggtggagaatgtctgcctggcctaaagacattgaacgttagactggaccatattcaaaggcagtgagtgaagtagttaggcactcaggtgtggacccagattgcctgggtttacatctcagctctaccatcagatctgctgtggctatgtaactctaggtaggtcgatttacctcattaggtctcagtcttgtcacctgtaaaaagcaggcacctcaaagactactgggagcattaaataaattaatacacataagatagttagaccggtgtctgatccagatgttaagcagcagttgctgctgctgctgctgctgttgtgtgatgatgatgatgatgaagatgatggtagtggtggtagtaatgctgccaccatcacattacagaatccaggatctcttacactaaggcccattctctcttggagcacagaggtttgggaattatctggaggaggaaagcaagaataaaagaacaaatatttgtaagtgtttactctgtgctaagcactgtgttagctgccagtacatacaaagtcaaggtttccaatgtcaaccagactctcaaaattttcc

SEQ ID NO: 178 - DNA, 1186 bp, Homo sapiens
gcctccacttggtgtctggtcgagagagccctatctttgggaatccaggtggctcccttcttccagtctcactttgattgtgcccccttttaaattcttttctttcctttccaagggcactttgtcactgaattcttcctctagcaagtctattagtgttctcagctagatctttctttcccacaggctggctgaaatcagccgttgcggtggctgtaagatagtatatgtgctcttgcctctgctcgggtgacattagatagcaaggtttatgtggacgtgggtatagacaggtcagggttgctgggatgaaccaaggtgcagaccggttttcttccatgcttgctgattcaccttggaggcatgtgaccctctttttgactggccttccagtcacagttcactgaaacacatgagtgagtggatgtgcttggggctttttgctccccgcttacccccgtctcttcccagcccaatgatggtggtggctttagtatagggtcctctccgagcacggcaggaatcacttctctccctgcagcggttcagtgtctggtgcttttccactctttctagactctttcctgtgcctgttgctgtgttagcacaagtcggctgggcagctgccagaacaagcctgccagggagccttttgactctggtcagctccccagggctccaggctggtgggactgccgctgagtgaaacatcatggaattagccttgccagagtctgggttgggagccaggcagtgaaaatgtaaaagcccctccgtcttgctcacttttccttttctactttgctttagatctctaagcacttgtagggtagggagccagggcagtgtagcagaggaaaaataaagtggattctagagtctgacaggctcgagttatgaatactgccttaacaattaactggatgaccttgggcaagtcacttagcccttctgaacctcaatatcctcacctgtaaaataggggtaagaatttttgttgggttgttgtgaggatgaggtaattatgtaaggttcttagcatagtacgctaagaactttatatacattgtcacagactgtgctaaaactttacatacattacctcatcctcacaacaaccagtaggtactcagtaaatgttagcagctttaattgtattgcaggaagaacctatgtttcctgcaat

SEQ ID NO: 179 - DNA, 2443 bp, Homo sapiens
ggtctttgtcacttcattgagtgaattgaatctctggttgggcttgttaggcttacttggaaattaaatttccgttcagacgttgaaagtgagagtttgcaagtttttcagtgggttaatctgatgtgaaatttcttagaactcattttggaatggattttcacatctgcactaattcttaaattttttagcactacagggaagatctgttctttgaaacaggtgtatgagaatggctcaagtgggaacataccacaaggcatgtattaccgtaaactaattttcaaattacccttttttcctttctatgttcccggtacctgtggatcgactcattggtgattgtatcgacgaacgttgactacggaaccttctaaaatatttacttaacacacatggacatcaactacttataatgaactgttaattactgttccaatagcgtactgagcgctttgggcagggaggtgcggggcctgtgggtggacagggtcctagaggaatggggcctggaactccagcaggatatggtagagggagagaagagtacgaaggcccaaacaaaaaaccccgattttagatgtgatatttaggctttcattccagtttgttttgtttttttgtttagataccaatcttttaaattcttgcattttagtaagaaagctatctttttatggatgttagcagtttattgacctaatatttgtaaatggtctgtttgggcaggtaaaattatgtaatgcagtgtttggaacaggagaatttttttttcctttttatttctttattttttcttttttactgtataatgtccctcaagtttatggcagtgtaccttgtgccactgaatttccaaagtgtaccaatttttttttttttactgtgcttcaaataaatagaaaaatagttataatattgatcttcaactttgccattcatgcttctatgcatattaggctacgtattccacattgaaagcatgagagtgtctaggcctttgaatggcatatgccatttctgggaaatgcatctggaggctaagtattgctttctacaaataattgccccctttgttttaaaaagaagaaatgcatattgaagtagtttgatgatttgtttggcatataggaagcacgctggtgctaagtattttttaaatggttatgtaagcaaagctgaactgtaaatcttcaggaatatgtattaagattgtggaatgggtgtaagacaattggtagggggtgaaagtgggtttgattaaatggatcttttatggccctatgatctatcctttacttgaaagcttttgaaaagtggaaaggtcattttgttgcatttccccatttcttgtttttaaaagaccaacaaatctcaagccctataaatggcttgtattgaacttttacatttgaattaaagatgttaaacatgaagtcttttcatgtattcaagtgatttataaagatggggtgtagtctaaaaaacaaaacttgaaagtaagaaggtttagtaactgggccgggcgcggtggctcacgcctgtaatcccagcactttgggaggctgaggtgggcaaatcatgagatcaggagttcaagaccagcctggccaacatggtgaaaccccgtctctactaaaaatacaaaaaattagctgggcgtggtggcaggcgcctgtaatcccagctactcgggaggctgagccaggagaattgcttgaacctggagatggaggttgcagtgagctgagactgccactgcactccagcctggacaacagagcgagactctgtctcaaaaaaaaaaaaaggtttagtactgaagtaggtttagttatatatacatttgtactctgtaacttttacatctccttgtgctacttctgttgggcaaaatctataggactataaaaatctattggttctcttctaagagctagtggtgattgttaacaaatagggttgcagataatcattcttattgtaaatttaacttgttttcacatagtttcgttttcatgtagcactaaatctggagaaagttgctcatgctacacagtacaaatatcccttcctcccaccataaaggcttggaatgtttccatggtgttgtcagttaattgtcaacttcattgaacccccttccattagaacaagagactttgactattaaagtagattgtttattgttgcctgttagtataatgggagcctgatttcccagtgtaaatatgttagaggaacagcttcctaacagtaggtaaagtaattgaatggtttggctttgttctgagttacgttccattcaaatctgtacattgtagaattcttactatggaatgtgtcttcctccttttcacctcttttcttggtgctaattggcaaaagaaaaattctaagtcaaacctttattaacatgctgaagtttagtattgtgcctgtg

SEQ ID NO: 180 - DNA, 1099 bp, Homo sapiens
gctgtgggtatagtgcaggtatattgaaaggaatttttttcttgcagcgggaaagagacatgcgaatgggtggcggaggagcaatgaacatgggaggtaagtgtgaaatttaaattaatgatataagtagagagtagtatcctggtggagttgtaaccactatttttgttttctagatccctatggttcaggaggccagaaatttccacctctaggaggtggtggtggcataggttatgaagctaatcctggcgttccaccagcaaccatgagtggttccatgatgggaagtgacatggtaatgtatcctgtgggacgtagtaccaaggaaattctcattttcacaacttaggtgtgtttgttttgttttgttttgtttttttaagtaggtgactggacctcttttagtttcccctaccaatttcatacataaatatgtaatattgaggaatactttggcaacatagaagaactcggtgtgtggtaacctaaacagataacggttgccaacaaggagtcaatgctgttagtattatgtggaattacctttggcaataagtagatttaggtgcttttgaactctagtgcatggcaaatccaaattctagatgctagataatgtatctgattattctacatccaagtgagaataatcaaatggcaaactcattctttaagctggtatttgccataagtaggaatcagacttgtagtttgaagctttaggcacgttttagtgatgtgtaggactttgacctatatttggtgtggcttctatcctatgaaaagggaattgagtgttttgactcgtcgtttcccacctgttgggcctgtctgtaggtataccttctaaaatcaactgacatctccattttgctacagagtagcaaaaatcaacaatttttaagcatactaatggtgtgcatttgatctgaaccttcttgatgctatcatgtttcagctgtgaatatagcctgtcagatgcttagaacaatcagttgaactggtatgagtggctgcattagggctttacaaatcgttaggactgaattttggtgggtttagagagtgcatttttatagctgagttgaatgtgatg

SEQ ID NO: 181 - DNA, 1190 bp, Homo sapiens
atgcagagcatgcggcgtaggtttggagagaaccgggaagttccataaaagcgcaggcgcagatcgtgtaggttacagtggcatttggatttgtgttattttcctattttaattttcatactatttagatttttttagggacactcaacatatgtgggtgacagttgctgatggacgtctactctttggggaagtgtgtctattctcgaacattctggatgatggggctcctttttcaatgttaagatagtgctcatgttagaaatctcacatagtaaaaccttgattttgaccaaacggaacagaaaggcaactgataggtttcagataagcaaatactatcttggggattttcacttgcagaggtctctggtgtttgaaaacttctttcctttttcattaggggtttaaagccaatttgtctctcttgaggaggcctggagagaaaacttacacacagcgatgtcggttgtttgttgggaatctacctgctgatatcacggaggatgaattcaaaagactatttgctaaatatggagaaccaggagaagtttttatcaacaaaggcaaaggattcggatttattaagcttgtgagtgtaattgtttgattttacgtagaattaaaaagggtgggggatttttttgtcactacaaacgctgaaggcttggtttttaaactggggaggataaattgatcttttagatttttcaccattcttacaggaaaaatgcttgcggtataatgcataattgttgctacctaagagaaaagaggggtggggtgggtaaactaagtggtgttagtgggtgctgcctaaaggtaatggtcgaactgagctgaaggaagaaagggagtaggaagtaggcctatgacaatttaagagtagacatcatccaattttgaggtcattaacatgagtgtctctgatacacaggaatctagagctttggctgaaattgccaaagccgaactggatgatacacccatgagaggtagacagcttcgagttcgctttgccacacatgctgctgccctttctgttcgtaatctttcaccttatgtttccaatgaactgttggaagaagcctttagccaatttggtcctattgaaagggctgttgtaatagtggatgatcgtggaagatctacagggaaaggcattgttgaatttgcttctaagccagcag

SEQ ID NO: 182 - DNA, 1244 bp, Homo sapiens
gccctgccggccagggcgtgggctcccctcggctgtggtgcctcctctggccccccaggtccacgtcctttaaattggccctttggctcttgcccttggctcccttgggcagacagcaggcttaggccattgatatcgcagttcttcctatcagcttcagtgacccagggtctgaactgcctccatcctagggcaacctggggcagacaggcctggtggggggtggggaaacctccttccacctgagcttgcttgaagggacccagagtctttgggcccagatctttaaacctttgtgtcgtgttgcagcagagtgacgatgggggttggggggttatttattttgcctgtccttatccctgcttggacacctgagcatctgattcctgtccccctggtgccatctggcctggctggagccaggaacaggagggacacttccccagaatccgcatgtttccccagtgattacactccactgccaccgtggtgcctggctttaactcccacccctgctatgactcctctctgcagagacgcgactggcggctccagcagggactacctttcttataaacccagggggaccacacacacacacacacacacacacacacacacacacacacacacacacactcttgatcccttgcttccctcccccagtgcgttctgtgatcgccaagttcaaagctgtgcacatgtggacactcaataaatgttcattggtgacgagaagcctcctgcgtggtctgccctgcacctgctctctcccttccaggctccatcagttcacagctaccaggtgctgaacacatgccctgctaaacacatcatgagacctcattcagcccttccaagaatcctctgaagggttctgattttacagacaaagcaactttggcatggataagtgattggctcaaggtgttgccgctagtcagtgccagagccaggactccacacaggccatccgactccccagcccacatctttcacttgtacagcagattgccaaactcatgttgatgtggccaggccttgtgggggctctggtgctctcaagtacagatgaaacactgcacccccgcccccatgtcactgggttgctgccaagtggccctgccatatcctcccatttttaaagaagtcaggaatcctaatttgtatgtgaaacccaacttttgaatgtcagtaactatctttaattaaataactactgatccaacaaaacatgcagtcca

SEQ ID NO: 183 - DNA, 1168 bp, Homo sapiens
ctgtgtcctaaatcaatttcctgaagtttaaaaaacactgggaatgtacccattatttaacactcctggccaaacactgttcagaatggagttctgattagctcccatctgctttcaggtgattaatacacagaaaaacaaattattccttcccaggctcggggtgggaggggggataggttggagaagagagcagctgttttgcctcagggtagggaagctaaaccctactagagagggtatgggaaggcagaaacctttgagagatggaagaggccactgaaatgacccaagagcttggtcttgctagctgagcaactgctaggtctgccctgcctggagcccagagtcctttcacttctgctcccctcggccttttgaccaaagcagcagcagtgcccaagcaagagaaagaggtgcattcttggattctctctaaatgtctgctgcttgcttagtccagtgtgtaaattatgtgttagtgtgtttgggaggagaaacctgcaacttgccttcacttactttccttcatgggagggaatgttttcaaagactgcacttttcatatttattctggaacactatgatcctttaagagaaagtaggaaagtctttaaactccaaattggaatgcttacccagtctaaacactctccgtttaattcacagatacttgtttgcaaaaaagaagccatgtaaacaatctgtgtatactttatttttaatttttaatttaattttattattattattatttttagacagaatcttgctctgtcactcaggctggagtgcaatggcacgatctcggctcactgtagcctctgcctcctgggttcaagcaattcttctgcctcagccttctgagtagctgggattacaggcgtgcaccaccacacccggctaatttttatatttttgtagagacagggtttcaccatgttgactaggatggtcttggaacccctgacctcaaatgatctgtctgcctcggcttcccaaagtgctgagattacaggcgcgagccactgcacccagcccccgtgtaaactttattcatcatctacttttccttagggctagacccagttagaggctaaaacgtgatttattttgctgtggggaaaagaaaaacaacttaatgggaagaatcaaatgctgagacctc

SEQ ID NO: 184 - DNA, 1199 bp, Homo sapiens
catgaaacctgtccttgctgccaaaaaagttgaggactgctggcatagaagattcatagggcacagactttgaatatttatagtgtcgcacttaaaccacagtcaaattactcaacttctctaagccataatattctcatctgtaaaatgtggttaagaacaatatctgacctggcgctgtggctcacgcctgtaatcccagcactttgggaggctgaggcgggcgatcacttgaggtcaggagttcgaggccagcctggccaacatggtgagactccatctctactgaaaatacaaaaattagctgggcgtaatggtgcacgcctgtagtcccaggtatccaggaggctgaggcaggagaatcgcttgaacccaggagccagaggttgcagtgagccgagatcataccactgcactccagcctgcacagagcaagactctgcctaaaagaaaacaaaaaaaaattaaaatccaaaacacctctaatccccaggcatttcaggtagagaatgcccaacctatattattaatagataatcttgcttctttgatattttttaatgactttacttcatcttgtccaggccctctctgatccacccctaggaagaccagatctttctgttgcctaatcatgtaatcttgtttgccactcccattattttcaagtacactctagtttttttgtctctaatccgaggatgaactgtttcttttttctctttttttgagaccgagttttgctcttgtcacccaggctgcaatgcaacggcacaatcttggctcactgcaacctctgcctcccgaggttcaagcgattctcctgcctcaccctcctgagtagctgggattataggcgcccaccaccatgcccagctaatttttgtatatttagttgagacggggtttcaccatgttagccaatccagtcttgaactcctgacctcaggtgatccacctgcttcggcctcccaaagtgctgggattacaggtgtgagccgccgtgcttggcctgaactgtttctttttgttttctgaatcaaggttgttttctcattgggccccagatccaatcagcttagattaaaaggactgtcttaaattaaaagggctgttttaaattaaaagggctgtctttaaattgctgaaaccatgagttaatagtacttcttaccaactgggctttacctctctgtaac

SEQ ID NO: 185 - DNA, 1684 bp, Homo sapiens
tcttctattcactctgcttgcttgctggccggcctgcctgcctgcctgcctgcctgcctgcctgtctgcctatgtgatgatgaaatctctgcatggctgcaatgatcccactgttagctggcagggtcaggcttagctccttgactgcagaagaccaagaacctgttccccaagcccagagatgtccacctgggctggactgccctcaagcttatactagagaagagcaactgacctgcccaacttgtgtgaagtcaggagggtttctggcattttccacacctgtccactccttggagctggtttctctcattgctttttctaaatctggttctttttctctttacctggggcctggcttttctgagattgtcttagggttgagctatttgggtatcctgggtttgagtgttaggggatggacataaaggaaaaagagtgatgagaagagaatggagagaatttgaataaaaggtgggaaaggagagcactgttctttgattgtttatccagtccaacctgatccattagggatcgaggtgctacactggcctccagggataagcctggggctactgttgctgggaacttaggcttaacataaagccgaagaaggtacctagaaatttgaaacttccctaaaaagctcctaatgcccacctgctagatagcttctctgtggcctcctatttagctaagcagcagtgtttttggatactttttttttctgtttgtgaataaggccagcactcaagatgggcagccaagggtgcactgactattagctggcccataggatatctgtaaggctggtgggacagttttggacctggaatcatgtgtaactaacaaggttggacgtttcttccccatcagggtagaaaaatcatctcaaactagccaaaaggcagttttggaaactacattgggggacgttatttttatttatatatggggcctaggccaatccaggatggtagctggaataccttccttcttaaaatctgatcatggcagggatatgcagggcactttttactatttggccttctaagcagattgggaaggaggtattttctggttttcgctttcctccgacttaataggacttgccttctccctgggcagggagagaggctgggttggtgctctcccttactctactcatactgacttagagcctctggctgctgtttgggcatccaagaaagggaggggaaggaatgagctaaaaacaaaacagaatgaggtgggaaagggagattttcttctttacagaggaaaataggaaaccctccaagaattgtgcaagtaaagacatttgttgaatgcactgagtcccttggtgtagtagcaataaggaaaaatgaaattactttcctgtgcacacagtccagcctaattggtatgtgatgttgcacttagcagccatgtggtgggcatgtgtgactactctggttttcactttagtttctaaactttttatccctctcaagtccagcatggatggggaaatgtctctggatccccacagctgtgtacttgtttgcatttgtttccctttgagatttgtgtttgtgtcctgctttgagctgtaccttgtccagtccattgtgaaattatcccagcagctgtaatgtacagttccttctgaagcaagcaacatcagcagcagcagcagcag

SEQ ID NO: 186 - DNA, 1184 bp, Homo sapiens
tgcttggcacatagtaggtcattaaatatttttctaatgaagaagccaattctgtgtgagtcattgctagttttctgggacatcttgggagcttctggagctgaatcgcaacagcggaagacgctagctcgaaagagggactttccaagaccaaccccggcgagagaggaatttgtggagcatcatctctgagccgggcgcggggggagggggacaaggaggaagcgtgtgtgtgacccaggattaccgaaggctgcggacgccacccagcggccaggatgctgcccagcgcaagctgggctctaccaggcaggcgcgcgcggagcactccgggagttgtagttgactgtgttaagaggcggtgctgccaaaggggctgttgggtgttgtagtctgacgtttgttgggcgggagttgcccacgtcggccggaccactagtcccgtggtgccccgcgggaggccgcgcaggcgcagtgagtcagtgccggtcggtcttgtgggctgaggggcagcggcttaggctccggcgtctgcaggggtcgccgagctaacccgtggctaggcgagtggggcggggcggccggcaccatgtcgaggcaggcgaaccgtggcaccgagagcaagaaaatggtaacttggagcgcgtgacctcggcgggcggggcgaaattgaggcgtacagggaaggggcccggcgccgagcgcgaggtgcgtttggaaaagggccttcctgtgagctctggcaaggggaagcctcttgctgggtcactccgggggcgttccaggcaggtgaggggaccgtcggagaagttccccggaggagaccccgcccccaaggcctgagtgcagctctgtgctaagccaacaacaacgacggtaataaataccaataactgccacttaacttctctcttactatgtgttgggcaccgggccacgcacgttacagcatctcagttaatctgcagagtagcccctatcagatggataacattgccgttttacagcttggagagcttacgtaatttgcccatatttacacctgggaagttaggatttggacccgtgtttaactccaaagctaatgctaggagctgactgttaggctttactcttaggctacagtgtctcgtactgtggcgtgggtattgtgagagatgttcagatactggtcgtgccagaaa

SEQ ID NO: 187 - DNA, 1177 bp, Homo sapiens
agggacaggcttctgggggcaggcagggcaagggcagaggtggcagctacccgcaggccacagagtttccttggtcttcttccccagccttggggtgggaaagggagacttcagtcctcagcctgagctgcctggggcctgccttgggcttggtgtagctggagatctttggccagagagacctgtgagacagccgagctggagccagtgcccaagtggcccaggccagccctctcagcttcctcctgctgcccaagtcacatttctctgccccctgactcagagttctctctcacccttcctgcttttcatttttcagatgattcatttctccctatttctttcctccccattccctgcactggagaaagtgttgggcctagggtgggggcagagacttgggcaccaggcagcagagggcaggtgatcttagggtgccccctggagggcagggcttggccgagcaacagcattgctgggccctggatattggaaggaccttccctccctggcccaccttggagctccacagtgagcagtgtgcaggtaggaccaggaggggccgtgcctgggagagcctcccagagcctcctggcccccgaggaaagagagttccaatccctacccacctccagcttccaccctttagctgtttggctaaaatcatcatcactagcccgcagtgagtgcctaccccgagggcacctcattcagccctcactgcgggcctgcgtggcctgtgttcttagccccatgttacagaagaggaaacagggttagagaggactttcccaaagccacacagcttagaagtagtggagctaagccttgaacccaagtctcatccggaagccctgctgtctcctgtggtgactggcacggggacaccacttcagcttctgttaccatctgcctagaccatcccagggagctcagcatggggccctgcgtatgtggctcctccaggtgctgcgcccccagcccagggcttgctcgtacctcttgacgtgcattagccgcctcagggctcagagaacctttgcgaggggccagacagctaaggcttctgaggtaaagtgacctctcacgcagccagtgagttaggaagcatgagtctgcgtcagtcccgggtccgcagggcggcctgcaaggggagttgaggttggctggagggggt

SEQ ID NO: 188 - DNA, 1202 bp, Homo sapiens
atattcaaagcataaaatattaacagttgtatatctaactgaatttcagtcaggttccttaaattcttgatctttagtatcttttaagtggtgagtcatcgttcatgctatttctcacatttactgttagtgaaaatttttaaagcatgacactacagtttttagtattcttaccctttttgttttttattcttaatttacagatgtgtcatgaagctttgtcacatatctgggtaccaggtttgacctcaagagatggctgctgtacactttttgcaactggtttgatgtcacatttcagctccaactttgcatcctgagaacacttaaacgtttctgcaggtccattttatacaacttgaaagaccgtaaaactttctggttgccacaagcatatctttcttttctgctcatccaataaacagctgtgccctactgtgatagattttccaaacaaaaatacctggagcagcagtttagcaaaatatgccttcagtggcattcaacaaatggagtttccccaagcacagttctgtaagaagtgcgtgtgagagtgtgtgtatatgtgtgtatgtgtattttaagttattatttgtattgtgcaaaaatttttttttgatcttggggattctggctgtgaatttggtgcacgacaattatggtaaaaaaacatttgcttggtctaaagaagatcattaatgttttgtgaccatacaagttgtaacagtggattgtttttatgtgtaggtattgttaaatacagggactgtttccaggcacagaatatgaatcgtaagttaggatggacattagatgtgattatgatgataaagcgaaggtctgcggtcctatatctacagacacgtggtgagaaattagaacaaactggagacgggccattgacacatggactctgcctgggcatgttaggttaattctttgactccaagccttaaaatactcacatggagtcagcgctcacctcattcacacaattatcatagagctccctggacactgaacctctaaagggaaaaggtctaccctggagccaggagcatcagggttggcttgggagcatgagaggtgagcccagggctaggcctgggccaggccccggcagcactgctacttgggaggagccacttcacctttgtattagttattaaaaaatataatttgggctgggcgcagtggctcac

SEQ ID NO: 189 - DNA, 1226 bp, Homo sapiens
ctcgccaacatgctgaaaccccatctctactaaaaatacaaaaattagctgggcgtggtggtgcgcacctgtagtcccagctacttgggaggctgaggcaggagaatcgcttgaaccctggaggaggaggttgcagtgagccaagattgcaccatgcgctgcagcctgggtaacagacggagactccatctcacgtggtaggtgagccaccgctcctgaccgagaaaggatttctatgcattgttctttagttatagttctcttttccttgagttttgaaaaagcgcaaaaactgcttatctgccataaactggaagaacctatttaatgaaaaagtttggtgagaagaaatcaggagaataatatcaaacagtgttctagagggctacttagcatgattatctaattttttcttagaaatttctcagttgattgccctcttgtggtattttatttacttatttttttaaatcttccattacagccatgcctttcttggacatccagaaaaggttcggccttaacatagatcgatggttgacaatccagagtggtgaacagccctacaagatggctggtcgatgccatgcttttgaaaaagaatggatagaatgtgcacatggaatcggttatactcgggcagagaaagagtgcaagatagaatatgatgatttcgtagagtgtttgcttcggcagaaaacggtaaggaaatgatggaggtggaagctgaattactttcttgttcctttgggactctttttttttttttttgagacgaagtctcactcttgtcccctaggctggtgtgtgatggcgccacctcgtctcactgtagcctctgcctcccaggttcaggcgattcgcgtacctcagcctcccgagtagctgggattataggcacctgccaccacgcctggctaatttttgtatttttagtagaaacgggatttcaccatgctggccaggctggtcttgaactccagacctcaggtgatccgcccccctcagcctcccaaagtagtgggatcacaggcatgagccaccgtgcctggcctcctctgggattactcttaagtgtttttagtgggtcattgagcagtggcttgccaaatgtgaattggcaaagcttttctggtgaaatacctttcctactttggtaccatgatgaggaaattaaatgccttcagatatgaggatggtccattgttcctcagcattctttctct

SEQ ID NO: 190 - DNA, 1099 bp, Homo sapiens
tattctgcagtggttggggagagggatttttcgttattagagttctagaatgtcacaataaggacccttcaagtaaaaatgaaggacttacccatggtcacaaacacacacccacagtggcagtggtagcataaaacagtccccattagctgacccctcagctcttgaatagaaagaacatttaaataattagcttaggtcctggttagtgagatgagatgagatacttctctaggatgggttcagtccttaagggggtgtttgggtattcttctgtcttacaggctcagggaaggcctccatattatacacctaaccagttagcacagatgaggcctaatccacgctggcagcaaggtgggagacctcaaggtaggtggtggggaacagtaattgacagcccaggatatacctgtcctggtctcccctgcctttccttcttccccactctgaggcacagcctaggttctggtccacatcacttctcaatgatgtgcaatttttctcttcaccaggcttccaaggaatgccaagtgctatacgccagtctgggcctcgtccaactcttcgccatctggctccaactggtaatgctccggcctctcgtggcctccctactaccactcagagagtcggtgagcaaactggcctttagaagtgtggcctggggaggagggagtcaggatgactaggctctgtcctgggttggtcagtttgttgggctcgaatttatcgagtcctggttctgtaatcttagctgtgtgcttaggtggccacttcaggagcagagaaacagtatgagttctaggtgtgtcagttgcttttaacattctttgctcatcggtgacctatgtgaaaaaggttagttgtagaagtttgctagctggatgaccacagaggcagcttgttcttttgggtggggtgaggaatacaaggaaacagtgtatacagaatatgtcttgtattccaagatgtggaaagagttgtatgttatcctttggctcatcctcgaaagtagtagtggccccctgtgcaatgtgttgcgtaaacgtgctttgaaatttctccttccgtgggacgtggccagttggacatctgc

SEQ ID NO: 191 - DNA, 1138 bp, Homo sapiens
gagccaccgcgtccggccgagaatttcatttctaacaagttcccaaagatgctggtgctcctggtctggggccacccttggggaaccactttcttagggaatatttgtgatatagaagtgtagttaacagtgatctttttccttcagggggtgaatctctacattaagaacttggatgacactattgatgatgagaaattaaggaaagaattttctccttttggatcaattaccagtgctaaggtattatactgcgatctggggattgaaagcagtggtattccattataggcttattggcatttgtcccattgaaggaatagcatttaaattatgttcatttctgaaagtagctactacgtttttctagcaaaatttctggatgcattctggagaatgacatttcattaggttaacattacactgtttcccaagcactggagtctggagaggaatttgacccagcccctccttgccaactcagagcacctgaatctttcccattccttgctgcctcgtgccggtgtggggacagatggtgctacagaatgagcagaggaaatccagacaggttgttttccatttgtcttggggcctgtctctacagctctgccacattttctccttgagaatgaaggtattttgaagattttggaggtgggcttgggaacttctaccctggtcttaaaaagagaggaaaggggagtggaaggtttttctatgtttcgtagtgtgcatcatttgcttgattttctttgataatcatatcaactaagttagcagggtaagtaggaacctcattttaaagataaggaattttagtccttgaacaagagaatgctgactacatggggatggtgtactgcttgtccttggcactttgggagcaggatggaaactggtgccatctgaacattttgagttatggccggatgcagacgccggtcttgctaaacaggtgtaccagatgccacaaaatcctttagttgatgagaagggaagccacgtgggctggtaagggcttagtggccctgccctggctcttagtggactttgctcccaacctgggaatgtggaaagcaatgttatcagttgtagtagggagttggccagaggccaactgtgggtttgcccagtt

SEQ ID NO: 192 - DNA, 1138 bp, Homo sapiens; identical to SEQ ID NO: 191

SEQ ID NO: 193 - DNA, 1153 bp, Homo sapiens
gatctcctgacctccatgatccatccgcctcggcctcccaaagtgctgggattacaggcgtgagccactgcacccagccccataccatttaattttaaacctcatgcgtgtgtgcaggttaaatggctcctaggttccattcccgggtgatgggtgggagggtgttaagatttatttgttatagaaaggggccctggggtctcccgcagccgcgagctgggcggtcctcccggcgccaggggtcgctgtagcgccgcgcggccgcgccgggtcgctctcgcgtggccgccccgcctcgggcccccgggccgagtgggcgggcacgactgcgcccaggtcgcgaggcgcccttcgaccagcagcgcccggggcgggcgggtataaatggagcggtggctccctcggccgcctctctccgccccgggtcgctgccgcctccgccgctttcgggcttcgcagcctgaggaaaaaaagagaaaaagataaaaaaaatctgaaaacgcttcaaaatcctgaaaaaaaaaaaggaaaagaaaaaacgaatcctcggagaacccgcggggaagtcactttcgtacgcttccggcctgccccgcgcccgccgccgcagcgcttggcgtccgtcggtctccgtccgtcggtccgggggtgagccgcccgcccggcccgccgtgccctccccccgctcgggccccgagccccgcgccccgcgcctgccccggcgcaccacgtgtccgtgctgcccttcgccgcccgcccggggctcgccgagtcggcgcccacaaagatttggtttccctctgccccggcggttgtaatcttaaaccgccggagcccgaggcctatatttatagagaaacgcgtgtccccgaggccgccgtgggcagcgtccggtcgcctcttaaaggatttttacccttcggaaggggattccccgtttaatttttttcctactttgattttttgaaatttggagcttcgcaccaggaccgcggagaagtgcaaagtcgcggggagggccgtattgtgcggagagccttttgtctgcggtgctgcggccgtgggagccggcccccgcctcccgtttccgtcccgtctccaagcccgccgactccagctcgtcctcgccgcgccggtgccacctgtgagccgc

SEQ ID NO: 194 - DNA, 1225 bp, Homo sapiens
ccttttgccaaaaggccaggaaatgttcaacatagggctatcgaatgaagaatttgaacctactggtattctatcttctactctgcaccatgtgggcttggcagacttataggttaccgtttagcatgttcaattaataatgcttgaagggcagatttacatgccttctgttttacaaaaccaggtaggggaaacattctccaataagatacagtgttcattcccatgctacaatcaggtaaaagagatgcaaccacttcacatgaggtgtattcaaatataccaactttcaaaatcctatcaactcttacatttttatgtcctagtttcaggaacttctccatccctagaccattttacccactcttgtgcaaaaagctttgggttcccagccaggggttgagccaaaggaccctggcccttttgcttttggctatctttatcttttttttttttagacagggtctcgtcctgtcgcccaggctggagtgcagtggtacaaccatggcccactgcagcctcaaactcctgggctcaagtgtacctcctatctcagcctcctgagtagctgggactacgggcacgtgacaccatgtctggctaattttttgaattttttttttttaatatggggtctccttacgttgcccaggctgatcttgaactcctggcctcaagtgatcctcctgcctcagtctcccaaagggctgagattacagacataggccaccacacagggcctcaatttacatctttttttttttttgagatggagtcttactctgttgtccaggctggagtgcagtggtgcaatctcggctcactgcaacctctgtctcccgggttcaagccattctcctgcctcagcctccctagtagctgggatacatttttgtattttttagtagaggcggcgtttcaccatgctggccgggctggtcttgaactcctgacttcaagtaatctgcccacctcggcctcccaaagtgctgggattacaggcgtgaaccaccacaccctgccttgatctacatcttgattaatctgtttgaccgtttccctaggcaatttcagatcagatttctcattgtaatctctgccttccagatttttcaatttctcccagctgggggaaatataggaaactggtttggggccctttaacattggggaccagtaagggttccctttggtccacccaggcttcaaaagtgttgtattaaga

SEQ ID NO: 195 - DNA, 1356 bp, Homo sapiens
ccataacctttaaaaaatgtttacgagcttcttctccgagaaaacaccaaatggcggatgacactggtgcagcgggggggcctggaggccctggtggccctgggatggggaactctggtgccttccgcggaggtttcggcagtggcatccggggccggggtcatggccgtggacggggcccgggccgaagctgcggagcttgctgaggcaaggccgaggataaggagtggatgcctgtcaccaagctgggccgcttggtgaaggacatgaagatcaagtccctgcaggagatctatctcttctctctgcccattaagggatctgagatcattgactttttcctgggggcctctctcaaggatgaggttttgaagattatgccagtgcagaagcagacccgtgccggccagcgcaccaggttcaaggcgtttgttgctatcggagactacaatggccatgtcggtctgggtgttaagtgctccaaggaggtggccaccgccatccgtggggccatcatcctggccaagctctccattgtccccgtgcgcagaggctactgggggaacaagatcagcaagccccacaccgtcccttgcaaggtgacaggccgctgcggctctgtgctggtgcgtctcatccctgcacccaggagcactggcatcgtctccacacctgtgcccaagaagctgctcatgatggctggtatcgatgactgctacacctcagcccggggctgcactgccaccctgggcagctttgccaagggcacctttgatgccatctctaagacctacagctacctgacccccgacctctggaaggagactgtattcaccaagtctcccgatcaggaattcactgaccacctcatcaagacccaccaggctccagctgtggctacaacatagggtttttatacaagagaagtaaagtgaattaagcctgttaaaaaaaaaatgtttacgagacagagtcttgctatgttgcacaggctggactcaaactcctggggaaaagcaatcctcttgcctcagtttcccaagtagctgggataacaggcatgtgccactgccattacagccatttttaagtgtacagttcagtggcattaaatacattcactttggtttttttgtttttgtttttggtacagtagggatacaaacctgtcggttctctaatatttcttttttgggcagtgcagttttaacattccacattaaggatgtaataatcaaggagtttgtttgtttgtttgagacagggcctcactccgtcaccaggctggagtgcagtggtgcgatctcggctcactgcaacctctgcctcccgggttcaagtgattctcccgcttca

SEQ ID NO: 196 - DNA, 1159 bp, Homo sapiens
cttctgcaggaaggtgcagcttttccatatcagctcaaccacgccgccagtccattcttaaggaactgccgactaggactgatgatgcattttagctttgagcttttgggggttattctaccaacaaacagtccattggaaagaaaacagtccctggaattaacagatcagaatgttcacactggttaatctttttttaacaatgagcatgaaggtagcagaagctggtgtgtttccagatggttcttctaaccaaactaatttttcactgttgacaagcgaggcaagggttgcactggaccaaaggctgaggcttggccatctagcattccatacaaaattgtttcctataagcattccttttattctctattctatcctgggtctgcctcaaccgtgagataggagagtctctggtactagctgctgtagcagtgcccttcatccagggcagttaatggagtcttggaccctttctttctctgggatccctgcccagcaccttcctatagagatgactttaaaaggaaaaaaaaaaaaaaaaaaacccacatgatttcaaggagtctggcattcctgaatccttcttccctgccaggtgcctgtcacctgtcttcactgcctccttttccctgtcatgctcatcagcttatggcttctgtctaagcacctgaacagaggactgaaacctccactgcaggctggttttaggtcttgaattatgtaagaatcttgcacagcactgctaatgtaaatttcagttgtttttccctctaggacaaacacttaccaaaatatgcaacttttttttggtgggaagagagattgtcctgtgatttctacccatttcctgaggcctgtggaaataaacctttatgtacttaaagttatacagaaaatagaataaagttaataccaaacttgcttagttgtttacctgtgatattggctgtacagaaatgcaaaaaatactgaaaacaccaaggataagaaactactctttattttagacaacctcataaaattattttcacatcccccccaacttcttgctcttaatcctcatcttttagttgaagaataaggcttaagagagagaaaggaaaaaccataatggctaaacttagcagcaccaacacggttctttcatcaaggcgta

SEQ ID NO: 197 - DNA, 1188 bp, Homo sapiens
acccaaattaagttgcttaagagaggaaatgtacatcttgtataacttagggagcgaagaaaatgtaggcgcgaaagtgaaaagtgaggcagctagttcttcctattccattctcgaccaacctgccctttcttaatatgactagtggtcttgatgctagagtcaacttactctgttgctggctttagcagagaataggaggaaccatatgaaaaagatcaggctttctgacttccatccccaaaacacatttaccagcatactccaaactgtttctgatgtgttccatgagaaaaggattgtttgctcaaaaagcttggaaaatactacacactccctttctccttctggagatcaacccacattagagtgtctaaggactcctgagaattcctgttacagtaaacaaaactaacgtaatctaccatttcctacactatttgagcatggaaatcatagtccccactctgtgaaaacttaacgctttttggaagacatttctgtagcatgtcagtttggagaaatgatgagctacgccttgatgaaagaaccgtgttggtgctgctaagtttagccattatggtttttcctttctctctcttaagccttattcttcaactaaaagatgaggattaagagcaagaagttgggggggatgtgaaaataattttatgaggttgtctaaaataaagagtagtttcttatccttggtgttttcagtattttttgcatttctgtacagccaatatcacaggtaaacaactaagcaagtttggtattaactttattctattttctgtataactttaagtacataaaggtttatttccacaggcctcaggaaatgggtagaaatcacaggacaatctctcttcccaccaaaaaaaagttgcatattttggtaagtgtttgtcctagagggaaaaacaactgaaatttacattagcagtgctgtgcaagattcttacataattcaagacctaaaaccagcctgcagtggaggtttcagtcctctgttcaggtgcttagacagaagccataagctgatgagcatgacagggaaaaggaggcagtgaagacaggtgacaggcacctggcagggaagaaggattcaggaatgccagactccttgaaatcatgtgggtttttttttttttttttttccttttaaagtcatctctataggaa

SEQ ID NO: 198 - DNA, 1202 bp, Homo sapiens
aaattttatatttattataaaaataaatataaatttaaggtattcgataacttatgggacgtctcaatttgtgctttaagggcgcacggcgcagagaggcgcagcagaggttttccaggttccggatgccaggggccggatggtgaactcctccctgcagcgaatcctcaaaagccactgctttgccagagagaagaaaggggatcaaagccagcgccaccgtccacgccagccgcaccaggccgctcctcagcctgcacagccgcagcggccgcagcagcaagagttccagggtctccctccgctgctgtagtaacccggtccgggatctcggtggtgctcctgatgcccctcgcgcacccctgatgccggtcgcccacccctgaagattccgggtgggcgagggaatcgtcagagggatcacgatctttcagctactctactcctatgatcgactgcatgtaacagagattctaacgttcaacgacaagaggattctcaacgtccactccaggctcacagatgccaaactggcattaactggcgagccgtgctgagcggcggcagcctctgcatcggagattcctggtggtgcgctgccccaggggagcgaggatagctttgcagttctccagcagttcgccgaggagcagctgagcgccgaccatgtcttcatttgcttccacaagaaccacgaggacagagccgccttgctccggaccttcagcttttggggctttgagattgtgagaccccttgtccccaagagacccgacacttgcttcatggcctacacgtcggggagagagtctttgggcgaggagtagtagcggccgcagcgggactgggcatcaagctcctggggccgccccggcgtctgccgggtgggtgcgaacggtaggctcgctcatctcgcctgggtttatccacatgttgtaactgcaaatgaacgctaaaaaaaaaaaaaaaaaaaaaaaattagctgggcgtggtggcgcctgcctgtaatttcagctacttgggaggctgaggcaggagaattgcttgaacccaggaggcggaggttgtggtgaaccaagatcgtgccgttgcactccagaatgggcaacaagagtgaaactccgtctcaaaaaaaaaaaaaaaagaaatgaaaattgagacatgatatgctggaagatataagtgccattaacgaaatagag

SEQ ID NO: 199 - DNA, 1192 bp, Homo sapiens
tgtcacacctattcaacttccccattttagtacaaaacagccagagacaatatataaactacagtatctgaaccttggcactaccaatattttggaccggataatactttgctataggaagctgcccagtgcatcctgggatgtttaggggaatccttggcttctacccacaagatgccagcattcaatgctgatagctgcccctcccccagttgtgacagtcaaaaatgtctccagacatggccaggtgtacctagaggccaaaattgtccctggttgagacccactgatgaatgtgtgcaatagtggttcccataaactgcatttaaaaaacagctgttaggtttcgtttggctcaagggctgtcatttttcactcctccccccatagagtatgtaaaatgattagaaatgacaacagactatcatttagtatcagattagtgtgtgtatatgccataaattatttccttagcaattcctttagtatttttgttgcaataattctttaaacgctacatttgtaatgctgtcttggagcctaggaattatttttggagatatttatgcagacttccctctataatgatcggttttttattatggttaatccataaatattttgagatgtatctctaaaaaacgagcactctttgaaaacataaccacaatgccattattatacctacaaaaattaaccacaattccttaaaacataatgatgcctttttgaagagagatatattgagacttcattctggggagaaacctttcagataactttatttaccttttcctttgccaagcatacaacattagatttgaaatatgctttgtatcaagtggaagtgtctcttaagatagcccctagaacaacacatcaagaggcccaccaaagaggaccagagaaaggtgactgaaggagccatactcaggcagggaaatacggagagaaagcagaggaattggctcctaatgcttcactgtacttaatgaaatagatactccatccttacagacataattggaagtaagtcaagttcaacttctttgttttatatggagatagaacagtttcaatcacgtgagtattataagtgtgaattatctaaagtaaagctataaatccagaatatataccagtatctctagaatttttcatattactacatttacttaaaaaaaaagctggc

SEQ ID NO: 200 - DNA, 1248 bp, Homo sapiens
agttagtatcaggaggagggcctgtgtgctaggtaagcgtttaacacggatggactcattaatcccctgaccagggagtttgctataggctgtttcacagtcttaaggagctgatacaacaagaactgttaccagtgaaggaggtagatatttggtcagttacatggaatttctgactgcctcgcaagtggagaattgcccgttagtgacactgttacgaggtgctgtggagaaagaatgcttgcattgggtggttgtagaagtcgatgtgtgaggtcttgaaaaggtctgattctgtaggaattataaatttagcgtctaattattcccagtaggctccttctactgctctgccatgaaaaacaggcttagtttcccatggcagctgactagaaattctaacttttctactttaatgtacatcatataattcccacttttttttttcttttaaacagggatgattcttcaagagacccttcaaacttgggtagagtttacagctctgactttacactcggctttggagactttctttaaattatgtttttattaagattattttattatgcggaaaggtatttgggaaacttgtcacttgcatgtcccatcacgtgtactggctcctctgtggtgtctgcctgttgcgtgacactctccttgcagttcttgagttgcggcagaacatcgcgatgggaaccgatggtgggtggggctgcagagtgccccatcggtcaccttgtttctcaactacctcgcatcattgcagatgctagcgcgttgcctgtcgctttcccttggatacctagaccgttataaagtgtgccacatggacttaccgagcatggagagaggattttagctaggatttgaacacttggtgctgggaacctcagggtattgcttgccactaagccatgaaaccagagacaaaatctctatactgccctgagttggggggaattctcagtgccaactgtggctggtcctcattcaaagggacggtcagtttggtgtcaacatgaaacaccaagatgtctgtctctgaagcgtgattttaaaatccccatgcctgtggctgcgcttcctatttctagggctgggaaacactccttgcatcaaggggtcacttacagaacaaagaatcttttgggggaaacttcctctaaaaccctctcatatatagacagctttgactggagggtccatttttcttccaggatggtgttactgcagttgaaagggcaa

SEQ ID NO: 201 - DNA, 1164 bp, Homo sapiens
tgaaatattccacaaagagacactaagaatatggtagtttaataggacgtagtagtcctaaaaagactaaaaagggattaaaagtccctacctggaagggtagggagttagagaattatagaatgagaaaacatttaattaactggcctatataagacattcttgtcctttttttaactggtatgggtctatttgatgcttcgttggaaagtaattttttccccttcatcttatctttcattgtttcttttgcatgaaaccattcttaattattagggaataattcagttggttgtccctggcccagctataaccaatctgaatccaaaacatgaattttggggttttactcttaatctgtctatacctcatgccttgtttttcccagtcctacacacctccaagcaacgagttcaagatcagtatgaaattggaagcacaggaccccaggaacaccacatccacctgtattgccacagtagttggactgacaggtgcccgccttcgcctgcgccttgatgggagcgacaacaaaaatgacttctggcggctggttgactcagctgaaatccagcctattgggaactgtgaaaagaatgggggtatgctacagccacctcttggtgagtaagtaaacccaaactctttctagccaattattaatagttagcgtccaaaaactgaacatcctattatgggaaagcctagggtacccagcttatcccttatttttcatatagtctcctaaaaaggcccacccaaaatgaaacaagctgcacaatttggacatctccatctctacattagcttatgatatccaggcttcttccaaattctttctaacaagaaatcacaccctttgttcttcttggccagtgcccatttacctgagagagagaatggaaggaggtcttgccgtttaacctatctcaaaaagcataaagctttcaccaaatcctatcataatgacaagaaatgagagaaaatctgccagtagaaagcatggctgttataaggatctcttatctcctttctcactaattctcacctggtccttggagttttctcgcttcgaatccattattacataaaaatcattttttaaaatttaagctaataacctcactaggtttttctttccagatcagattcccctccagcttt

SEQ ID NO: 202 - DNA, 1104 bp, Homo sapiens
gtcatgtggcaatggccccagctgagagggggacttccaggagacagagagcggggtcaggcctggagtcaggcaggcctgggaccaaagcctggatccttcacttacagctgtgtgaccttgattgagtcacctccctcctctgagttcagttcctcctctatgaagtcacctcctcaaagtggccttccttggcccacctcccacccttcatttcttccatacctctgatcacaggccacagttctctcatttgttctttttattgtctgtctcttccttccagaatatgcattccaggagagcagggatatttgttttgttccccgatgtatcccctggatctagcacaggactggcaggtaataggcactcaatgatatttgttgaatgagtgaatggatgaatatgtgaatgcattggagttagtacttccaacctcccaagggcgtttagaggcgaagggcgagatgcataaggtgtccggcccagcacataacaggctcgctcagtgaggatggagctgctgttaccatcctgaggaaaaactttgcagctgcctcccaggaaactgggctcaaagtggggggcgggagagctcagcaactcccacagtgtagcttccacttcctggctggggctgagccctgtaattgctcccatctccttggcagcctcagcagctgtctaatgagtttgcacccggctggcccctgggcttggccgcacagcccaggcctgcctgcccaactgcaggcagacaaaggccctatgtccctgggatctgcttcctgcccgcccactgcgtccctgacaaaccgaggtccccagctgccaagctctgcttctgcagtgaaggagcccaagattcccatgtgggccaggggcacagagcagtggagagggcatttgtcctggaggatggagccctgggtccacatccctgctcttctccggctgagaggtgctaggggaggcggtgggatgtcatgcccaagagcctgaccaacagggttggaaccacgcctccaccacctctagctgtgtgaccttgggcaagtcccagactgctctaatcctcagtttcctcatccatcaagcagg

SEQ ID NO: 203 - DNA, 1148 bp, Homo sapiens
ggccttttctgtgggccctggccagacagggttacctggtgaggtgcagagagtccctctagtggccattttgtatggtagttgctaatgcagaacaagttctgtcttgggcttaaattgactgaagactttagggggaaagaatagtaaatgcatgtaaacaaatggggacactctgttcaggagaataatccgactggcatttgtggcagtttttgaaatgtaaatgtattcatgtgtgttcttgtaaatacgtgtcgctcagatgtcctttgaagtgggagggaatcaatccggggataatttcaaatggaatagagtattttgatattgttcattcagagggtgatgtgtacatatctatattgtatatatgtgatgaaaatgcattggctttttgtgcagatacaacctgctctctgtactgctgttggacagtcagtgttttaatgtttctacagttttgctattgcacgatttcatattttgcctctatgatgaacggcaaccattatttgtaactgtttagtgctgtaaagaaatattccaagtgtcattaggattgttgctgccagaactgatatgcatgaatggcacttaaaataaatatattatgttaactctatttacaacactgattggtctccgttgtttgctgtaattgaagaagtgagaatggagctagtccaggtgcagaaaccccacagccaggaccccagagtccttggggtcactgagattgtgtcctttgcattactacctgaggacagtaattgctgccatttagtgagcatcttattagctccatgaacttggggaagtcactggatttccctgggcctcattttccttatttgcagcgccagtacaatgaggatagtatctgcctcctagagttgtagtgggatttacataaatcagtacatttaaacatttaggacagcacatgggacataaagcatactggtactcagtatgtgccaggtgctgtgctaagtagatattgtggtcctccttttaccgacatgggaacagctcagatagaggtatagaaacttgtctagattcttcagttggcaggtgatagagcagaggtttgaatccaggtcatttgattccaggcatcatgttttttgcacaatcctctc

SEQ ID NO: 204 - DNA, 1137 bp, Homo sapiens
ttttttctttttttgagatggagtcttgccctgttgcccaggctggagtgcagtggcacgatctcggctcactgcaacctccgcctcccgggttcaagcaattctcctgcctcagcctcccgagtagctgggagtgcaggtgcacaccgccatgcctggctgattttttgtattttagtagagatggggtttcaccatgttgcctgggctggttgcaaactcttgagctcaggcagtctgcctgcctcagcctcctagagtgctgggattacagacatgagccactgcgcctggcccagcgttacttttcttgataagaatttacagataagacactcagagagacattgtgtcattctctatcatcactccttttaccatgtgaatagatttctctgtcttggcattcttgctgattcagacttattagttaaatcggatttttctggaatttgaatcagatttcatttgggcaacaacagcagggcagggtttctaaagcaggtttccccactcatctaggttgtcttgaaaggaggatagagccacttacagttttatttgcttcagtgtttaatgtagatattatgtggcctgctgtttctgttgtcttgtatgtctgtgtatgcatgacatttggtccctttctttgaaatgcagcccctcttacgggttttttagtggtggtggtttgttttgtttcatatcatatcacagtttgcatggactgattatcttagttttatgataaaactagaagaaatgagggtttttttttaatgaatagattttgaattgattctttagaccccccaaaaagtgtcagttctaatggggaaatatattccatcaagtcaaagagtaataactgctcactagttgctttttagcatctctggtcttatcagccatgctaaatcactttaattagccttagtgattctatggttgagtaatctctacttgaactaaacaaacatcttttgtttctgtgtgtgtgtgctgtgtgtgagagtgtgcgcgcgcgtgtgtgtgtgtgtgttttaatggagtgttgccttgaatgaatcactgggaagccagccatggtaagggctggtgaggttggggagaaaggaagagctttatgtttctctg

SEQ ID NO: 205 - DNA, 1109 bp, Homo sapiens
gaagaataaccccaggaagtaccttcgcagtgtaggagatggagagactgtggagtttgatgttgttgaaggagaaaaggtgaggatgctttttgtgtaaaggtttgacttcagtatggaaatattttggaggtctcatccattaggatggtggctctaatgtggatggatgtgttcaggtgacctcatgaacacaggtgcatcaagcctaatgttctggctgcagttagagggcaatctcttcagaacagtgaggaactgatatttagtcatttctgtgcacccctggtcacgcagttgcgcccccccccccttttttttccttaactttgttgttttttgctttgtttgaaaatgttctgatttccttttgaaagtgttgaaagtgttctgatttcctttgtcactatcaatatgtaatggcttttgtagggtgcggaggcagcaaatgttacaggtcctggtggtgttccagttcaaggcagtaaatatgcagcagaccgtaaccattatagacgctatccacgtcgtaggggtcctccacgcaattaccagcaaaattaccagaatagtgagagtggggaaaagaacgagggatcggagagtgctcccgaaggccaggcccaacaacgccggccctaccgcaggcgaaggttcccaccttactacatgcggagaccctatgggcgtcgaccacagtattccaaccctcctgtgcagggagaagtgatggaggtaagtttcaccatcaacaacagcaatgtgataagttctggtaggactgtttagagctgttaattatatggaaagcaacttggattcctagtaagaaccaaaaggattaatttataatgtagtcacaattactagatggtctgttttgtttgttttttaactcttggatttatctggttgggtttttttattatattactgacccagtaggcttaatttccattgtctttttcagggtgctgacaaccagggtgcaggagaacaaggtagaccagtgaggcagaatatgtatcggggatatagaccacgattccgcaggtatggtccacgtaaacatgtttctattaaaatttcctcaaacccgtgttaggact

SEQ ID NO: 206 - DNA, 1203 bp, Homo sapiens
ctgtttggagaaagtggcaacattaatataatcttttaatcatttctaattgttttttttttttgttggtttatgttgttcccggaaaaagacgagagtgtttcgtgtctaaaaaactcctagaatgacacgtggtttatcatggtttatttaaactgcctgtagattaataataataattctctggcagaccacatgatacaattacgttcttgttactttagctcattagctcacttgtttttattacccttaattccaaaattaagggattctttttcatttcgctttttacatgatatcgagaggtacgtgattgttgttccctccaaaattagcattcaaccagtggtgcttttggttttttcccgtttactatttgctggatggcaagagatctgttaatgtctcccaatacacaagtaatgtaaactagggcatgtactacactaaatgaagatcaccatgaattctacatgatcatctttatttttttctttacagtttagtcatccaacaagaagaaatatgaaattccagcaataagaaatgaacaaaagattggagctgaagacctaaagtgcttgctttttgcccgttgaccagataaatagaactatctgcattatctatgcagcatggggtttttattatttttacctaaagacgtctctttttggtaataacaaacgtgttttttaaaaaagcctggtttttctcaatacgcctttaaaggtttttaaattgtttcatatctggtcaagttgagatttttaagaacttcatttttaatttgtaataaaagtttacaacttgattttttcaaaaaagtcaacaaactgcaagcacctgttaataaaggtcttaaataattgtctttgtgtaaatttgtctagttttgctttagtttgtaagtatttagctatttataggacccttagcttgacccagtctacaaatagatgatgctcactggtaattccctcaggtaaaatgtctcaaaatctctaatcctttaagtggcatgcctgtgggcccatactaaaaattagaaaatacatactctgataacctggccatttttcattgaaggatttagctcatttgtaagaaagacttgagtgtagattttgggtgggtccctttggctgtgaggcattgtttaaaagggcattgctctagcctagaccgaccagactctca

SEQ ID NO: 207 - DNA, 1238 bp, Homo sapiens
agctattttatatttttactaaaatatttgttgtttttaggagtgattacttggtgagtgtcagccactgcgtagggcgcttgggcatatagcaggggtacttacaaatgagccctcttggagcagcttccttttggctggttcagggaggtgaatgctgttggaaagccttagctcttcacatgctgctgggttttggttgtctgtggatatgtagggaccttgggtcttggtctgtaagcccattttctccctgggtggccacctgaatctagcaaggtgtagtttaagtagagtctcttcagagagttgaggatgttgtgcttgttaaggaagaccggtttacatctgtgtgtacattaccttcctcaggcttcctcaggcccagtgctcatggaagggacgttgagggactgactacgtattagagccttgaaggccaagattatgccttgttcatttgaaattcttgctgtcactggaataggggattatgtcttgtaatgttcataatgcctaataaacccctgtaagtggtttacatgtttctttttactttcaaaaaggtactgtaccccacgctatagtgagtttgaagagctcgagcggaaatactggaaaaatcttacattcaatcctccaatctatggtgcagatgtgaatggtaccctctatgaaaaggtgaggctcactggaaaccctctgtgcagtgtttttgtaattttgtaatacctttttttcggcccggcacgtagtaggcacctaaaagctgtttggtgaatgggtggatgaacagatgatctacccccagctgatgttgctgtgctggcctaattgtgggccattttgcatgtgactgaattttatttctcctgctttacatgtgaattggatgatgtggtgttcttttcaagggttgttagcatagtcggtgggtggtagctgatgagttcttgaaagggtgggttggctctcagataatgaaatgaggcagtgtggtttctgcagaaaaaagatgactgactaatctaatgaaaggggtatacatttaagaagagaaatacatttagatttttcagaaccctcaaacaagattctgtggcaaaagctattttaaccacttttattggcttgaaatcctgccttaaatatggtgaaaggggagaatatttgggaatatcttcagatgactgaaaaacagtagggcattcagggattatcactcataattgttttca

SEQ ID NO: 208 - DNA, 1204 bp, Homo sapiens
ggccccagtccatagaggggtcaactatgctggctggactggctgccttgttcctggcctaggacttagcttcataactatcacctgcaccgactaggctgaggtgctggtacttgccccaacccctacttttgtatttatatgtgtgtgtgtgtgtgcgtgcgtgcgtgcgtgcgtgtatgtttggtctggaccagcttctgccagcccctggcctttactttcttccttgcctatgcagggcaaacaaaatgtgaaattctgccctcagctgagctgagtaagggctcctgggggttggctggagatgggtgtggcatctgtccaggcctggaaccgtctcaagacagtgctggcaaagctgcagtattgagatgctaaggagctgatgccacctctttgtcttcccctaaaggagaacatggggataacatgggtgtgtgcccacaacactctaggtgcagagcccctgtggcaaagtattacagggtgtgggtggggattaccctgaatcggggattttaatgatggaagcaggcagagcctggtgggtgattctgtcaacagaaaattgcaatcatgcaggggctgggagggttaggatgaaaaaactggggccattggaggcccactgtaggtgggagggagctgattttggggtggggggtgggactagagggcaatactgaaggggttaaacaggtttttgctcctcaagaatttgtttgcctgggcccaggattggagggcttcacaccaataccctgtgtatacaagaatcagatttataatacttccccttttttgttacgtatgaacactataaaccaaattattttgaaaactggtgcatcaccttgtccttagcaataaaatgtgttgagcagaggattggctgtctgccccaaggagcccacgtggcccacgtcaggctggggggtgtatctagagtcataggctctggagcggggctgtgtattttaagacaaatcagtaaggcattccctaggaagttccagagagtgggtcctttgcttgtcaagctctgtattaggccaagtatggtgggtcatgggagcagggacacttctggctctgagcacctctttgttgtgcttgctctgccttagagacgggcaagatgaggtaacagaggaagcaccagaccaatgagtcctctcaacagagtatctctcactgctgc

SEQ ID NO: 209 - DNA, 1193 bp, Homo sapiens
tccccaaatgtaaggcctcttattggaccaggcccaaatggggattgaatgatgtccacctgcaccttcacctgttccctgttcaagcctgagagggatgcagagccttagcgtggactctgtcctgggagactcagtgcaggcctcctgctcccgagccagcattcaccacccagcccaggcttctcaccaagcctctgagaccagctcttcgaggattctccaccatttcctttgcggccatcaccagtggccgcagctctttctcccatgcctcttatccctgggagggccaggagatttcacgtcactgcctgttgccatatcttaaccattgctcctctacccccagataaaaatgctcaagaatggggactccctcagctcctcttcctcactgtcttctgtaagctcttggtcactgcctcataattattaccatgtcattctcctcctcctgctccccttcccgtcactcttcctcccgctccctgtcactcttcctcaccctccccctcctgctcctcttcccaccactctcccctcctcctgctcctcttcctgccactcttcctccccctcctcctgttcctcttcctgccactctttcccctcctcctgctcctattcctgccactcttcctcctcctcctcctgctcctcttcccgccactcttcctccccctcctcctgctcctcttcccgccactcttcctccccttcctcctttctgccactcttcctccccttcctgctcctcttcccaccactcttccccctcctcctgctcctcttcccaccactcttcctcctcctccccctgctcctcttcccaccactcttcctcctcctccccctgctcctcttcccaccactcttcctacccttcatcctcttcctgccactcttcctcctcctcctcctgctcctcttcccaccactcttctcctccccctcctcctgtttctcttcctgccactcttcctccccctcctcctgttcctcttcccgccactcttcctccccctcctcctcctgttcctcttcctgccactcttcctctcctgcctccttctgctcctcttcctgccacttttcctccccctcctcctgttccccttcccaccactcttccccctcctccttctgttcctcttcccaccactcttcctccccctcccccttctgctcct

SEQ ID NO: 210 - DNA, 1171 bp, Homo sapiens
ccgccactgtttctccccctcctcctgcttctcttcccgccactgtttctccccctcctcctgcttctcttcccgccactgtttctccccctccttctgccccccttcccaccactcttcctccccctcctcctgttccccttcctgccactcttcctccccctcctcctgctcctcttcctgccactcttcccctgccacttttccttcccctcttcctgtttctcttcctaccactcttctttctcctcctcctgttcctcttcctccccatcctcctgtttcctttcccgccacttttcttcacctcctcctgttcctcttcccaccactcttccccctcctcctcctgctcctctcccaccactctcccctctcctcctcctgctccccttcccgccactcttccccctcctccttctgttcctcttcccgccactcttcctccccctccccctcctgctcctcttcctgccacttttcctccccctcctcctgctcctcttcctgccacttttcctccccctcttcctgctcctcttcccaccactgttcctccccctcctcctgttccccttcctgccactcttcctccccctcctcctgttccccttcctgccactcttcctccccctcctcctgctcctcttcctgccactcttcccctgactcctcctcctcctcttcctgccacttttcctccccctcctcctgtttctcttcctaccactcttctttctcctcctcctgttcctcttcccgccactcttcctccccatcctcctgtttcctttcccgccacttttcttccacctcctcctgttcctcttcccaccactcttccccctcctcctcctgctcctctcccaccactctcccctctcctcctcctgctccccttcccgccactcttccccctcctcctcctgctcctcttcctgccactcttcctcctgttcctcttcccgccactcttcctcctcctcctgttcctcttcctgccactcttcctcctcctcctgctcttcttcctgccactcttccccctcctcctcctgctcctcttcccgccactcttcctcctcctgttcctctccttgctgcttttccttccttttgttctcctcttccttctgtcatcactatcattatcattatagctgtcacttat

SEQ ID NO: 211 - DNA, 1247 bp, Homo sapiens
ctggcttagcctcactgcacccctctctatcctcccaggctactccatgtttggggctggcctcaccgtaggcctgtctaacctcttctgtggagtctgcgtgggcatcgtgggcagtggggctgccctggccgatgctcagaaccccagcctctttgtaaagattctcatcgtggagatctttggcagcgccattggcctctttggggtcatcgtcgcaattcttcaggtgatgaatccccttgggaagcctctgtgtccttgtccccaacctagccttaccctccttctggagaagctgaagtgctctccttctctacctataactatagattcccccaaacagcttccacctcctcatttccatcttctggttttctcctacaggggctctctatttttgtctctgatttggtgtcactgacaacagccctgttctttttcccccctttctaatgcgttgtatctgtatagcacttagtcctccctctttctgttctctcattttatctgccatgcttttcatgtctccagtctgtatttgtgatctagactagaatggaattttgtctgtctatatcagtctgtcatggtgtgtttgactgtctctcggagctatgtgtatctccctctcacatgcctgtcagtaggacaccattgtctaaattgtgtgtgtctagtctgtctgacagtgtgtgagtttgtgactaaggatcagcctgagggtctgagtgtgactgtgggtgcttgactgagttgattcttagtgactagctttatccatatgccacttctctccgtctgtcccacagcgtaactctgtggttgtctgtccctgtctgccttgtctgtcacagtgtgtccatcctggttagtcatatatctcttgtggtctgtccatccaaccatgtgctagatgtcatcttctatcatttgtcactgccttacctattcctctgtccctgcctgatttctcctgttctttttttgcagacctccagagtgaagatgggtgactagatgatatgtgtgggtggggccgtgcctcacttttatttattgctggttttcctgggacagctggagctgtgtcccttagcctttcagaggcttggtgttcagggccctccctgcactcccctcttgctgcgtgttgatttggaggcactgcagtccaggccgagtcctcagtgcggggagcaggctgctgctgctgactctgtgcagctgcgcacctgtgtccccca

SEQ ID NO: 212 - DNA, 1184 bp, Homo sapiens
attgttttacacttgcatttgccatggttaccctttttcttccctttactcttaattgggagaatacctgcacatcttctgaaactcaactcaaaggtccgctcctctataaaacctttaccaactctccttcttatcccgcctcaatccctccatcttgtattctacgaaacacactgtctttatttctagcaaggcacctgtttattgcatttattggttaatatgcctgcctcttccatcatattatacatgagtcctttcaagccatgggaagccccttgaaggtagaggaattgcttcatcatctttttgttcttgcgcctagcacagtgtctggcacagagcaggatatgataaatagtagtaattgttattaatgttattactggtattgggtatgattgggtgccaatctgttttccttattagactgtaaattccttgaggagcctggtacttgggtggcatgtggtaacatttgtctagtgaattaataacttatgaaaaacttctgaaaatcacaattgctttaagcagtatttggagtaggaacataaaaacatgagtattaactttgcagagaaaaaaaagctggtttacatccatctcatgaagatgaaatcttaggctcaaactagttcaaagtaaaattttataagaacaaacgtaatgttttatgcttcggttaaaaagtaaggggtaaaagtggggaaagcctaacttgtcagttcatatagaaaagaagctcaaatctgttatatggtattgtctttcatctaaaaaattaagttttgcagtgaactgtaatttgtgtgtgaacgtgactgggaaaataaaaattctgctagagagagtatgatttgcttagcacctatgtctgcagtctgaagagcttgtcactgttaaagtgaaatcttatagatgtttcagctaagactgtctttgctcaaaaagagggaccgggccgttccttggagtaacctttttttttttttttttgagatggagtcttgctctgtcacccaggctggagtgcagtggcgtgatctcggctcactgcaacctccacctccgggttcaagcaattctcctgcctcagcctcccaagtagctgggattacaggcacatgccaccacgcccagctaatttttgtatttttagtagagacggggtttcacca

SEQ ID NO: 213 - DNA, 1123 bp, Homo sapiens
agagagagagagagagagaggtgggtggggtggggtgtgaggagacagtggggggttgtatgtgaaggaggtagacgggtgtatgtttatttcatttcccaaactgtctttgagactggagatagcgcactgaggaagacagacaagggcgccgggaagaggaggcgtgtacatgagagaaagaggtccatgtaagagtgagaaagaccaagaagtgtgcaaggagaaataaaaaagtgtggctgagagaggggtgaatatgtgcatgtgagaggcttctatgagacagagaggtgcgtgtgtgccggagccatctgggagacattcgtgagaaacggtgtgtgtgcaagagtgggtgtgtgaggggagatgagagaaaggggtgcataacagacatgttgtgtatgaaaagaacgtgagaggtgtggatgggagggaggggcacagcgtgagagagggaggtgagggaggttcgtgtgtgtgtgtgtgtgtgtgtgtgtgtgtgtgtgtgtgtgtgcatgagagagagagagagaagggcgtgtatgtatgttgagacagagaaggatgtacgttttctgtcttgttttcctttgtctcttcaaattctcccctccttgccccttttccccccaaagtttttggagccatgctaacctgggtttgaatttcacttctggctacttcattcatttatttatccattcattcaccaaattattacggagcatctgctagcttttaccttcctgtgcctcctttgtcttacctataaaaagaagataataattatacttgcctaacagggtgattaggataccttggtggtataacttacataaaatgtctcgaaagagcacagaatttggagctggatgcactctatagcacagcatctggcatgtgggtcaggaaatggtagctacagagctgcagctcctctgccaatccctttctctcttctttttccatgtcccttatcctcctcccttcctctctcccactcgcttgttctctctcaatcacagctgagccatagtattaattattagaaccaattgactgtttagactctgatgttttaactaatcaccactaatggcaaacactggtgggcaatcac

SEQ ID NO: 214 - DNA, 1231 bp, Homo sapiens
cctgcctcggcctcccaaagtgctgggattacaggcatgagccaccacgcctggacttttttttaaatttaaattttattttttttctgagacaaggtcttactctgtcgtccaggctggtcttgaactcctgggctcaagcgatcctcctacctctgcctccttaagtgcagggattacaggtgtgagtcactgtgcaccgggcactgctactctgaacacatgtggctacatggaagacaggacttggccatgtgctctccccagctcagtagtcaagtgcctctctccatttactggtaagagagagagggtttagaggaactcttgttccggcgctcagctcatttgcatcccagaatgcattgtagatacgagaattattaccagggttatctgtttgaataataatatttaaactttttttctttgtcaggagattttacccagtgagaacatgtttaggacacttttctacagtggaagaaaagcttctgtctgcaggtccaaaggcaccgtaagtagagggagaccagtcaatagctgggaagccaggcaaaaggctaacaggcagatctctggtttctcttcataacgaataaatctttcgccttttactaaagatttccgtggagaaaaacaactatgagtttatggttaaattttttgaagtcttgcctaggcaaggctgaatgttctgttactaaagagagacgtgtgggtggggtgtttcatgctttgggaggttggggtagctccacaaatgtcacccaggttgtagcggagtggtgtggtcgcggctcactacaacctccatctcccatgctcaagcaatcctcccacctcagcctcataagcctgtctaattttgtgtactttttgtagtgcccggcctactgtcatgtttttttagcttcttgtaaacatttaggaagctaaatgtttataagatttttttttttaaaagaaaacctagtttttgacagtctgtatctaataatttggctgaagtcttgtgagtctttctagtgtgctagttccaatttatagtgatgactttgtgtgcatgattatcttatactttggactggtctcatatttgaaaaattaagtgtaggaaaaacttaagagttaggatgatgatactttcttccagagatagttttcttttgtttttatcaggtacctggggacacaaacaattctggactacctttgtccacattcaaca

SEQ ID NO: 215 - DNA, 1227 bp, Homo sapiens
ttagtagagacggggtttcaccatgttggccaggatggtctcgatctcctgacctcgtgatccgcccgcctcggcctcccaaagtgctgggattacaggcgtgagccaccgcgccaggcctatgaatacaattattttaaagcttttaattttttttttttttactttaagtgccaattataaaataaagtcactgtctagttggaccaggcatctacagttctgtaaatctggcttccgctctgccccctggtggtggcctaacgcctagaaaaagtaacgaactatttaaggtatttctggaaaccgagggggtggtgactcagcgtcatttacatacccacaatgcactgcacacagaccacgtcctactttaaaaggagattctcccttttttccccctcttttcctttaccataataacgaagctcctttcacacaatcgtctgagacaaaaacagaagtcactcttttgggttaatagtaaccattgctaatctagtagtgaccgtcccccgaggactgtgtgcaaccattccaacacatgctctggtttctcttcaaatcgtataaatctttcgccttttactaaagatttccgtggagagaaaccgttttgagtttcaagcaaattttttgaagccctatgttggtggggttcatcaacggtgtttaaaaatcagatagaaagttgtgtgtttgttgcgaggtgtgagacaacattttgtttgaacatttattttgggctgttgtaatggtgtgagtgtgcgttttttatttttttggaagtggggttttagactagactgtagtgagcaatctttgcctgccggcttcaagggattttcctgcttcagtctctcaagtagctggggctacaggtggcaacaccattccctgttagtttttgtattttaatagagatggggatttcccacattggccaggctgatctgcccgccttggcctcccaaagtgctgggattacaagcatgagccaccgtgcgaaaatttggttttgttttgtggttttgttttgttttgtttttaattaatttattctagaaacggtctcactgtgtcactcagtctggagtgcagtggcacgattatagctcactgcggccttaaactcctggcctcaagtgatccacccacctcaacctcccgtgagccaccgcttcccgcttggccagtttagtttttaaagggtttttttttttttta

SEQ ID NO: 216 - DNA, 1962 bp, Homo sapiens
agcagcctctgaaactagtctaaacacgcccagatctgccgacgccgcagacccccttcccccagcccagggtcggaggcgagtcgccgggggtcggcagaggtcagcagcctgcgagaccctcctaggctcgtggccctaggcgcggcagctgacacgtaagtctcgtcgcccgacgttgtttcggcgctcagaaacaacgtaaagtaaaggggcggggcagcgttttacaaaccgaaccgtgaatctttgcggtttctctttccagccagcgccgagcgatgggtgagtgtcgctctgcattgaggcgggtgaagggaggttgagctcaatcaggccccatcctgcttcacagcctactgaggagtccagacgccccgacccccggccagggacagccacgaggagtggtggccctcgggtttcggccgcccagcccgtctctgggggctgcgaaggctctgggctccgggttccgggccgcgggctgcgggctccgagcggcgccaacatggctgccgcgaggaggaggccccggcctggccgcacgtgtatgatgacaactcggtaatgctgcatactcccgagtgcgcggtggggaagccaaccttggagagctgagcgtgcgaccggcccggcgcgggggtctccgggagctggcgagtcgctagcaccgagtcacagtggctcaagcttccttccccgcttccacatgcaggcatctctcgggacaactggcacaagcgccgcaaaaccgggggcaagagaaagccctaccacaagaagcggaagtatgagttggggcgcccagctgccaacaccaaggtgggtgcgagcgtgggcctgtccgcctgggaggtcgccttcccccgctctccagcgtgctcgggtctttccgtgtgacagttgtgcgttctttcttgggctctgatttctctgtagtagggcctgggtgtcctgtccccctttagctgttggataagtaagtaccaaagagggaatgctccctcaggcccccaaacctggagcttaggatttcagagagaaggatactgtgtggggacttgagcttctggagagggtggcgcctcgcgtcatagtcagaagcctagtcttgttttttttacagaggcttaattttcagcatttggggtcaggctttcctcttggaggcaagtagggtgatgaaaaagaatccttaggcgtggttgtggccgtcttggtcacctgtgtgccacttgccaatgcaaggacttgtcatagttacactgactgttgcctcctcccggcccaggttcctctccctcacttgccttgctctccttggtaacctagttcctgtaaccttgtgttttccagattggcccccgccgcatccacacagtccgtgtgcggggaggtaacaagaaataccgtgccctgaggttggacgtggggaatttctcctggggctcagagtgtgagtgaggccctttgggagtgggtgggaaaacgcacctaaacggtcttaagattcaccaagtgggcctggcgcggtggctcacgcctataagcccagcacgttgggaggccgaggcgggcggatcacctgaggtcaggagttcgagtccagcctgggcaacagagcgagactctcagtaaaaaaaaagattcaagtgcttttagcaagtagtctgtggcttagaccaaggcatttgaagtttctccttgctgaaagatcttaaggtagctggggagttctctccacccaggctgtcctgctccaatctctttttttgagattgggtctctgttgctcaggctggagtgccagtggcgtgatcttggttcactgcagcctccgcctcctgggttgaagtgattctcctgcctcagcctcccaagaagctgggattacaggcgtgtgccatcacacccggctgcttctgtatttttagtagagacggggtttcaccatgttgg

SEQ ID NO: 217 - DNA, 1962 bp, Homo sapiens; identical to SEQ ID NO: 216

SEQ ID NO: 218 - DNA, 1962 bp, Homo sapiens; identical to SEQ ID NO: 216

SEQ ID NO: 219 - DNA, 1722 bp, Homo sapiens
ttcttggctttaagtgatccacccgccttgacctcccaaagtgctggggttacgggcgtgagtcaccgtgcccgacctgctctgatctttctgaactctgcagcctgagagattggggctggtaaagactgcgggttgccaaacataactagaaacgtgggttagggggttgtggaagacgaactgatgccccatggcttgtaaaggctgagagttcccttatttctccttaaggcctcatggggctgaagaacctggaggagtgtgccagggccatttgtcctccagtttacttgatgccaaatttctcctgtgagcaggttgtactcgtaaaacaaggatcatcgatgttgtctacaatgcatctaataacgagctggttcgtaccaagaccctggtgaagaattgcatcgtgctcatcgacagcacaccgtaccgacagtggtacgagtcccactatgcgctgcccctgggccgcaagaagggagccaagctggtgcgtgttacttccctgtaggggttgtggggagggcagcctgactccagccttctcgtgatgaaaactctgtccagttctgctactgaagggagagagatgagagccttttaggctgaggaaggccagcactggggtgtgcagggttcgagaaagctcccagggcctgccttccttccctgagctcatatatttgtatccccttttcagactcctgaggaagaagagattttaaacaaaaaacgatctaaaaaaattcagaagaaatatgatgaaaggaaaaagaatgccaaaatcagcagtctcctggaggagcagttccagcagggcaagcttcttggtgagaaggctgttgtgttggaggtggggagtcgcagagattgagtgtgccgaggcacttttcccttgtctcagttcctttgactgccagccatgcagtctaaagggttcactgataacaggctgcgagcacaaaggggaacgtttggtcaccctattcgtatgaagctgaaatgggaagcattgggtagaagagtctgcataggcccgtgcttggagtctttgtatttggggaagtctctgcccaggctgagggggctgtctcagtgatgaaaactttgtccagttctgctactgacagtaagtgaagataaagtgtgtctgaggagacagctggcttcatgcttgcccccagggtacctgaacccacagagattcttaagcgggtggagaggtttgggtagggccaccttgtcgttgtgctaaggatcacctactctcttgcagcgtgcatcgcttcaaggccgggacagtgtggccgagcagatggctatgtgctagagggcaaagagttggagttctatcttaggaaaatcaaggcccgcaaaggcaaataaatccttgttttgtcttcacccatgtaataaaggtgtttattgttttgttcccacatttatgttgcctgaatatatgactgttttctctgctttatttccttgccctgcaaaactgatctgggtgggtggctgcaaccccttgccttaacctctgcctcctactgtcctgagccaggctcaccacactgtaaagtccctgttctcaactccatgtccctgaaggccagatttattatgtgggctatgtctatagtgggaacatttctcaccacattttggtggggatagggatgtggcagaggctatgagggggtatcccaaccttggggt

SEQ ID NO: 220 - DNA, 1722 bp, Homo sapiens; identical to SEQ ID NO: 219

SEQ ID NO: 221 - DNA, 1722 bp, Homo sapiens; identical to SEQ ID NO: 219

SEQ ID NO: 222 - DNA, 1227 bp, Homo sapiens
accccatatcacccttcgaggtgaattggatcggatgccatctcctccaggaggggtggggtcgtgcctcctgtgaggtcccagtgcccctgagtgtctgtgcccgtctgtttccccgtccctctctctaagcccggaggcttactgcgggtaaggacggcgggacaggaccttaacccctgggacgaacaccagctccgcaaaggactccgcacccggcgccgcccacggggtgcgggtcccaggaggaccagcagagaggagcataggagagcaaaggagatcagtgacccatggcttccccggtggcgcggaacagcccggagccgcctgtgatttgcatacccatggtgcaccacgaaaagataccctcaagatgcttgcactccctctgtgcgcgcatttctgcactgttttagagcatgatgcctcttacacgcatctgtgtgcataaactacatatagggagtgcgtaccacgcaggcatccaacaaccataagtgtgttaagtgttagttctccctgcgaggttcgaagcggaagtcacgaatatactcgggtttctcttcaaagcgcataaatctttcgccttttactaaagatttccgtggagagaaagttgtgagtttttattcaattttttgaggcctcttatttcctgaggctacatttttaagtattaaaagttaggcaactacaaccaaggaacttggtcatttgttatttgtaccaaatgttcacaaacttattcgggcgtggtggtgcctgtttgcaatcccacctattggagaagctggggcgggagagtctcttgactctagaagacggaggttgtagtgatccgagatcgcgccactgccctctagtcagagtggcagagactcctggggcgggagagtctcttgactctagaagacggaggttgtagtgatccgagatcgcgccactgccctctagtcagagtgacagagattcagtgtaaaacaaaaaaaaatcagaagtttgcgtgacaccttgttttgagctacatttggggtttattggcttctgcagtgtgcagtaagactggcttctattgtttatttcttgcgtttttgttgcatttcgttgcagatttaagagataaacagtggaaggcgctttcaagtcgtccggtcattaattaagccttattgtggctagaggttcaggggcggtatatcgcgccaaccaaactccttgttctat

SEQ ID NO: 223 - DNA, 1278 bp, Homo sapiens
gctactcaggaggctgaggcaggagaatcgcttgaacccgggaggtggaggttgcagtgagctgagatggcgacattgcactccagcttgggcaacaagagcgaaactccatctccaaaaaaaaaaaaaagagcaaactctgtttagatgacttttctcaaatccttaaaaaagatttatatccaagtcatcttgttggtataggtggtgacatacatctgtagtatctaaattggacttaagagttttgactctcaggaccttgatttcattatttaactgtgtctcattttagcagatatatgtatatatgatagtgattttgccttctgtgattttatgttttgttttttcatttacagagtgatagattcgtgtggcctttcaaatgattgtgaagtggtggaaatggatccaaaataataagtgacttctctaccaaagcatagaagattcttcatatctccttccagtggctcaatttagattttgggaaggagcagaacaagtgaaacacagaaaactgaagagaagaaatcctcattttggacctatatttctccttgactatttcttaatatccatcctacccatcgttctaatgttttaactttgctctgaatttataaatagtaaaggccaaagacatagaatatacatttagtagctttataccaagaaatttgccttgaaagctgctgttcgtggagggaaaagtgtagcaaattcctgtctatttttattttttatttttttttaacaaagacaagatttatgtccctagattttgaaggttaaggcaaatataaatacatatctgcacactattttttagcagttgcatgagtaagagtaatgagatttgtattttaaggactttgtcatgtggatgttttggagttgactgctcagatcttttatagggctttaatatttttgatctattaccttgatgacattatttgtccacacttgagcccatctgtctttctagctatgaccttgttatgaacagtatttgcactcggtgcaaatatccatgtcttacctaattaagcaacatcatagtgccataactcaaggaagttgaatgaggtgaacatagatacagctctttccccttccccccctttttaaatgtaacaaatactttttatgttccccttccccccttccccttttcccctttccccttttggaaacgtgtcaggaaccaaatagtttaagatgagcagttgaggggactgagagagtgatcgacacagaacctggcttctt

SEQ ID NO: 224 - DNA, 1150 bp, Homo sapiens
gagaggagggggagggttcatcctattgccaagctggtctcgaactcagggactcaagcaatggtctcgaactcagggactcaagcaatctgctcactttggcctcccaaagtgttgggattacaggcgtgagccacagcgccaggtctaagtagatactgttttataccctattttgtagttgaggaaaaggagtccagagattcatccagctggtaggtaacagtctatattcaggccgggcgcggtggctcacgcctgtaatcccagcactttgggaggccgaggcgggcggatcacgaggtcaggagatggagaccatcttggctaacactgtgaaaccccgtctctactaaaaatacaaaaaattagctgggcgtggtggtaggcgcctgtagtgccagctactcgggaggctgaggctggagaatggcatgaatccggaaggcagagcttccagtgagccgagatctgcgctccaacctggggacagagcgagactccctctcaaaaaaaaaaaaaaaaaaaaaaaaaaaaggcctatattcaaatttaggcaatctaagttgttgtgtttaacttgactgttatggtcactgcctttaaacatgaaagtaagactgttggtctaaaagatgaaaggcagacaaaattttaaaggattccaactaaaaaaaaaaaaactaatgggaaaggcaaattttggtgtatttatggttgttcagatagatgaggggaaaaataacataccccctaagtggctgtagttgctgttgtctggaatttaatacgtggttgtgctgttagagacctaattgcccaagttacttctaaatcagacttagtgtttcctatttcccactgaaatctgcctcaaacagcctataatcaaacttggaaaatagttcagtaagaggaactgaacttttgtccacaggtatactttaactgaggtagatatatttctaatgttatgtaaattgaatttttataggtgatttcaaacgtgctaggcaaacatttaaaagagcctattatttttctttactaaggcaaataattgatctgttagctgaatcatttttcagctaaaacagctcaatcatttatttttgttaagaaactagggattgggagtatctagatgacc

SEQ ID NO: 225 - DNA, 1226 bp, Homo sapiens
tggagaacccctccccctcacacacatactgccccaagatccagggagcctttgctctggaatcttcaacctcagaacctcctctttatactcttagaacacctcttccaacctccttgtccaaattcatattctaaaagatgctatctcttacaaattgaggtggtttctgaggaggggtgggggctgggccaaagggtcgtcagtgacccctccctacagctctctgacccatgtctctgtctccatcccaccctcactagtgcctccatatctgggacctggatgtgcgtggcaaccatcggggcctgtggagattgtttcggaagaagaaccacttcctgatggtgggggtcccggcttccccctactcgtgagtgacccttttctgccctgggaaacaggaggcctagtgagatccagggatatagctaatggcttcttctctatacattcttgtattattttcccagagtgaagaagccaccctcagtcaccccaattttcctggagccacccccaaaggaggagggagccccaggagccccagaacagacatgagacctcctccaggaccctgcggggctgggtactgtgtacccccaggctggctagcccttccctccatcctgtaggattttgtagatgctggtaggggctggggctaccttgtttttaacatgagacttaattactaactccaaggggagggttcccctgctccaacaccccgttcctgagttaaaagtctatttatttacttccttgttggagaagggcaggagagtacctgggaatcattacgatccctagcagctcatcctgccctttgaataccctcactttccaggcctggctcagaatctaacctatttattgactgtcctgagggccttgaaaacaggccgaacctggagggcctggatttctttttgggctggaatgctgccctgagggtggggctggctcttactcaggaaactgctgtgcccaacccatggacaggcccagctggggcccacatgctgacacagactcactcagagacccttagacactggaccaggcctcctctcagccttctctttgtccagatttccaaagctggataagttggtcattgattaaaaaaggagaagccctctggggatgtcttgtgattgtgattttgtgtgtcaggggggtgctggagggaagtggtggagagaatacttgtgttggatggt

SEQ ID NO: 226 - DNA, 1127 bp, Homo sapiens
aaactaattccgattggctaatttaaagacagtgagggggtgagtggtttggcgggaaaaatggttaccgcagagcaggaaatcggaatgaaccacggtgaagaatgagtgagggaggagcaggtaatcgaaaaatgttgctttatgaggaagttaagtttaaaagtagaaggcaaagaattgaagatactgacatattgattcttttaagataaatttagaactcatatctaacagctggcatgtctggcatggggctccggctggggcgcagtcttcagcatttggggctctggggtgcagggggcagaggacggccggggctgtggtgcccaaccggtgctaaactcaagcttgggaggtcgcccacgagaaacagtcgcccttccccacccgcctgctcggcttggcggggagcgggatgtcgctgggggcgatgccaggcgggccgcctctgatagcctctaggctctggcgcgcttccccgcccctcccgcgcaggcgggcgtgggatcccggctgatccagtccgggttttgcggcggagcgggcgggctgcgcgtgcggcggcttcaactgtcgcggtaggcagcagcaggctgaagggatcatggtgcagtacgagctgtgggccgcgctgcctggcgcctccggggtcgccctggcctgctgcttcgtggcggcggccgtggccctgcgctggtccgggcgccggacggcgcggggcgcggtggtccgggcgcgacagaggcagcgagcgggcctggagaacatggacagggcggcgcagcgcttccggctccaggtgactgccggagcgtagtgggatgggcgcggcctgagggtactcgcagcggcactttcagccgccggacccgccgagggacaggggatggggcgggcagagcagatgtgtaactctccagaatctctccttgccctaagatattccgcactttctgagccaggtagagcacgggggaagaaaggaaacggtagtgtcaaggcaggtggtggaaggcctttccctcactgggtcaaagaggagttttgctttgtgccaaagaatctcacgattgctgcctattggaatgcgaaaacgcaagcgtgacaaccagtgggatgcc

SEQ ID NO: 227 - DNA, 1251 bp, Homo sapiens
cacagtccagaagttgaagctggagagccttccttgagaggaataccaaatcagttaaaccaggataaaccagctcttttgagacactgcaaagtaagacagccacctgcctataagaaagggaacccccataccaggaacagtattaaaccatcttctcataatgggccatctcatgatatatttgaaaagctccaaacagtttctgctggaaatgtacaaaacgaagagtatcctataagaccctccacacttaattctaggcagtcttctcttgccccgcagtcccaaccacacgattttgttttttcaccccataattcaggaagaccaatggaacttcagatacctactcccccactgccatcttactgttccacaaacgtttgcaggtgttgtcagcatcatagtcatattcaatatagtccgctaaattcttggcaaggagcaaacacagttggatccattcaagatgtccagtctgaagcccttcaaaagcattcattatttcacccaagtggatgtccagccctgtactgtaatgcattctgttcttcaagtagtcctatagccttgagacctcagggagatatgggcagttgttctccccacagcaatattgaaccatcgcctgtggcaagaccgccttcacatatggacttatgtaacccacagccttgcacagtgtgcatgcacacacccaagactgagtcagataatggaatgatgggactatctccagatgcatatcggttcctcacagaacaagacagacagctaagactacttcaggcacaggtttgcttggtgctttcctagttctattaatttcttggtattaagatttcttaaaaactggcacctctcctcagtaatgatgttttatagaagtatagaatgtcagaattaggagggaccttggaaactgaattctaggccctcttgttttacaggtaagtaaaatgaggattagagagaataatttaacccaatgccacgttgctagttagtagtagaaccatcttatgcatatcctaacctacaatagaattgtatttttattttttgcctctaatgaaaagtctgttataattaactaagcctttatatacagctaaatataaagtctggacagtggcttatacttcatctctagtttgtcagccctatataatgcctatctatatagttagagcctttctgcatatctatactggacttattctacttcttgttttctgaaatgttccc

SEQ ID NO: 228 - DNA, 1178 bp, Homo sapiens
ttctgggttcatatcctagctctaccacttgttaggtgggtgaccgtgatcaagttaattaactaagcctcagttcttcatctgtaaaatgaggatggtaatctctgtctcacagaagattattgtgtggggttgaataagattactaaactaaagggtctagtatgtaataggcactcagtaaatactagttccgtccctccttcaattattttcgtaatatagatctttattgatgggaaatagtacctgaacttaggaggctaaaaattatatcggtgtttgtttactttctagacaagtgggaaattggttgggttccttccctcttacaaatactgattccttgatgggaataatttcacattaggtataccaagtttcctcagatgttcctaagcctttgtcaagtgaagtaggagcttgccacctgtcttccatttttctcagtctgttactatggggactgggcaaatcagcttgtattatttggctctttggatcatttattgctcttttttcccctagggaacgacagttaatgctgacatgtgaatttttttttcttccaaaccagaattgcattcatgggtcgcctttattctctgtaatgtctttctttgtgccagatgttcttgatgaagatagtgggaaacatgacccaaggaggctatcgtattccttttgctttaattttggcccttgtgttctacccccctgccatctcttatttgaaaatttgtcggtgggcaaggtggcttatgcctgtaatcctagcactttgggaggctgaggtgggcagatcgcttgagctcaggagttcaaaatcagcctgggcaacatggggaaaccccatgttgacagaaaaattttgtcttctattcttagaagggtacagttgtgtaacaagttcagtgtattctgtttttaattaaaaaaatttaaatttttgtgggtacatggtgtatgtatttatggggtatatgacatatttttataaggcatgcaatgtgtaataatcacatatgggaaatagggtatccatccccttaagcatttatcttttgtgttagagacaatccaactgtacacttttaattattattatttttttttttttttggagacagagtctcactttgtcacttatgctggagggcagtggcgccatctcggct

SEQ ID NO: 229 - DNA, 1178 bp, Homo sapiens
tggctttctcactagaggtctatgtgactgtgggcagttctcctccccaatctgtcccagataaactatgtaccaatgttgaatggtcttagcagttccttcgggccctcagattccatgacacacatgcgtttgacctgaagaacttgagttttgctccatctagcatccaccacccccacccccacccactaccttgcactcccaatctgctgagaatcagagctccagaggaacacctattgtgtcccatctgttggcgacagagccagagagaggaatgctgtgccacatgtgctcttgtttattcctgatactttccagagaaccagggatgggggaaaaagggagggaggaagaggcctccacgcaggatcagttacaagcattgttgtcccactccatatgtagacactggacaagcacagcagacaatcagcatgtgggaaaacctgggccttttaccaactagcatcgtccaaaggtcaaatttgagacttggaatttaaaagggaaacaaataaaataaacgagcaagcagctctgaactggttgcctcagatgagagaacatgagaagaccacatccctgccctttgtgctagtcagtataggctgggctaggccattaatacagaaaaactcccaaatctcagtagctcatcacagtaaagttcatttatttgttgaacactaataaattttgccaaagctgaaattttgaataaaataatagcttccatctactgagtacctatttatgcccaggactatgctatacactttgcataaatcagctcctttttacacacgaagaagttgagattcagggaggtgaagtgatttgaatgaagttacaaatctaatcaatggtagactgggattgaaacccaagatgatctaggcctgaggcctgtgctctttccttactctacactgcctctgaaggggaccttgaagtggacccgatcccttatccacatcaatcaggcacatcttgcacggaagaggatgagtaaaagaaatcatctgacaaatggcttagggaatatatttttacaaaaataatttgcattgtcctttcagcttgcccactgtcaacagtggaggctactcagtgcccaactctctattgtggacttgtatccccagatcagaagcacctcaagcacaggggct

SEQ ID NO: 230 - DNA, 1176 bp, Homo sapiens
tacatctcatcttcagtttacaaagagctttcatatgtagtgtatttcatgttatccataacaatgtgaggatagtgtaccatatttcacaaagagaaacctgagaaccactgcagtaaggaagtggaaagtttagaaatgctaccattgcctccacctgccaaatataaattaatgtgagctttttgagagacgcataacttactttgtctctgacttctccagttgtacccattttctcatttgttttgcacttacttgtatactatatgctggggaaaaagacaaaaatccctgtctttatttagtttgtaagcattcttcatttcccgaaggttggagaccttcggtctacaggtatcacagaaagtttaggaagtatgtaagccttaaaaggaaaaaatagtaagctttactctagcaaatgagtttatttgataaaaattttataacgcttatgtcctgttgttattattataacttattcttagaatttgataggccaaaatcaatatgaaactaatcaggactttccttaaatagcaaatcaccgatgttcatatggttagtgatagcgatggagatgactttgaagatgctacagaatttggggtggatgatggagaagtatttggcatggcgtcatctgccttgagaaaatctccaatgagtgagtattaatagctctttgggtccagcaatagaattctttcttctagtacacaaacttatgaagaacattaaacttaaacatctcttactgacctccaggtttgaggagataagataatagagagtaggcattcttcattagaaccagagccttttgaatttagattttattaaactcaaaaattctcagtgcattaggaaaattcattaaaaatgcaaggtagtgtaacttttgttttacatgtataatgaattatgactgtctctctttaaacctagaggctgattaacaaacaggtgtactttctgtgaccgatacttgtttccccacatcttattagagatatcagttttaagagtaataatgttacttttctattcaacggtacccatctttggaaggaaaaaagtaaactaaatgtaccatctctttcacttccacttacaagatgtgtactatagaataacaagacatgctacgtgcaaaatgaccactaaaataat

SEQ ID NO: 231 - DNA, 1222 bp, Homo sapiens
acaatgggtaaaaaaaatggtagagaacttagtgaactagggcacaggaagtgaaagaggaaactgctggtcttgtccctggcttctgtgaaatctaacgtggtatgtatgaccttgtaagtaattctaattggctctatttttccactaagagaaacaaatctagaatggaggaagggggagtgggaaagctacatattttctcatttaaactctacccttgtggggagaatcatcatgggcagaaattttatcttccctgtgaacagaggcagaagcctgagaaaaagcaaaagaaacttacaccttctccctgaagccttttcagactctctgtgtttgttatgcactccactatacccattaagtttggtacaataagcgaaaaattctgaaatactctttatctctgcttcttataaccatccagcagcagtggtaataggtatctacctgtgctcctagccctcgtcctagcaaagaggtgcatgcatccactgagcaggggtgtgtgtgtgtgtgtgtgtgtgtgtgtgtgtgtatgtgtgtgtgtgtgtgtgtatatgtatatatatatggttgttttttttttttttttttgaaagacagtcttgctctgtcacacaggctgtagcgtggtggcattatcatagctcattgtaaccttgaaccaccctgggctcaagcagtcgtcctcctgccttagcctcccaagtggctgggactaactacaggcatgtgccatcatgcttggctaatttttaaattttctgtagagatggggttttgtgctgggtgtggtggctcacgcctataatcccagcactttgggaggccaaggcaggtggatcacctgaggtcaggagttcgagaccagtctgcccaacatggtgaaaccccatctctactaaaaatacaaaaattagccaggtgtggtggcaggtgcctgtaatcccagctactcaggaggctgagtcaggagaatagcttgaacctgggaggcggaggttgcagtgagccaagatcaggacattacactccagcttgggcaacctgagcgaaactcagtctcagaaaaaaaagaaaaaaaaagagatggggttttgctgtgttgcccaggctggtcttgaacttctggcctcaagtgattctcccatgtcaccctcccaaagcactgggattataagtgtgagccactgcacctggtcggaatgtgtattga

SEQ ID NO: 232 - DNA, 1211 bp, Homo sapiens
ttccgcggaggtttcggcagtggcatccggggccggggtcgcagccgtagacggggccggggccgaggccgcggagctcgcggaggcaaggccgaggataaggagtggatgcccgtcaccaagctgggctgcttggtgaaggacatgaagatcaagtccctggaggagatctatctcttctccctgcccattaaggaatcagagatcattgactttttcctgggggcctctctcaaggatgaggttttgaagattatgccagtgcagacgcagacccgtgctggccagcgcaccaggttcaaggcgtttgttgctatcggggactacaatggccacgtcggtctgggtgttaagtgctccaaggaggtggccaccgccatccatggggccatcatcctggccaagctctccattgtccccgtgcgcagaggctactgggggaacaagattggcaagccccacaccgtcccttgcaaggtgacaggccgctgcggctctgcactggtgcacctcatccctgtacccaggggcactggcattgtctccgcacctgtgcccaagaagctgctcatgatggctggtatcgatgactgctgcacctcagcctggggctgcactgccaccctgggcaacttcgccaaggccacctttgatgccatttctaagacctacagctacctgacccccgacctctggaaggagactgtatttaccaagtctcccgatcaggaattcactgaccacctcatcaaggcccacgccagagtctccgtgcagcggacccaggctccagctgtggctacaacatagggtttttagacaaggaaaataaagcgaattaagcgtaaaaaaaaaaaattgtcacaaatctcaaacaaaaattccaacatacttgtgtaaacaaattagcactgtaagtggacccacgctattcaactctatgttgttcaaaggtcaactgcatttctatacttctacacacctattaaaatgtctaaaataaaacagatctacaattccagagatctgttgtataacatagtgactacagcttagcataatgtattgtgtatacttgaaaactgctatgaaaatacatcttaaatattctcacaatagcaaatcataactgtgaggtgaaggatctgtaaattagcttgtctgtggtaatcatttcatgatgtatacatatattaaaacaccatggtgta

SEQ ID NO: 233 - DNA, 1180 bp, Homo sapiens
tatcaagcctctttctggaacattctttcactcaaaggaggccccttgagaagaggcattatcaaaacatcaaataggcagggcttctgggatctcttagtttcatctctcatttttatatgggaaagctgagacccagaaaagtcaggggtttgctttcctagccttagactcttcattcattcattcattcattcattcattcattcattcatttacctaacagatatttattaaaagcctactttgtactggatactagttgctggggatacagcagttaaagattcttgcttcctggaagcttatagtttagtggagggagacagacaataaacacaaaaataagtaaaatatatcacgtcagagggtggtaaaagctatagagaaacgtaaggactggaaagggctcaggtattctggaggagccattggcaaagtgaatttgaaaggccctgggcctctcgtttggggctgctgacccatagtgtgacagcccattgtgacaacgtcagggattctagagtccaggcctgggggagggaggaggccttggagaaggaggagggaaaaaggggctgtgggatttagtggctgggctgcaccccctgggggggcagcagagcccaatgggccagaagggccacaaagactccctttacccttgtggagggtaagatcattgattcctgaggcctctttgcaccttgcccttggcccctcccccacctccaacagatctctgatgacattcccttctgctccccctcccacccttgggaacaccaagaggtgggtccaaattgtccctgcgtcccagtacagagtggcagcctggaggagctcgtgacaggcacccaaggctggccagggaggctgagtagaccctgtgaggctctgttccagccaggagaggctggagggttggagggcccctgtgtcatgccccgcatctcttcccccaggactcctgagagcagcctccatgaggccctggaccagtgcatgaccgccctggacctcttcctcaccaaccagttctcagaagcactcagctacctcaagcccaggtgaggctcaagccccggttggggtagggggtgtgcatgacggtcagggagaaccagaggtcttgtatgagaggaaccctgtgtaactaaatgcctttggctttctgggt

SEQ ID NO: 234 - DNA, 1202 bp, Homo sapiens
aaagaactacaataaccagtgtcctgggatctcattgatttcagattccctgccccaagcctacacccaattacctgccatagttggggaatcaagtagcatcctgtggctggaagtaaatgcaaaacactagtccgtgagatataaatactgttaaatgatggttttttaaggtcctgatccattatatgaagtagacaaaattcaaatttatttattcatttattttctcaacaaatgaatatatattatgtgccaggatacaagtagtggcaaattagacacagttcttgctttcatgaaacgtatagcttcatgatttagtatagacattgtcaaatcatcacccaaatataattacaaagtactctaaaggaaaggcacgtgatgctgtgagaacactcaactgggaaaccggaatcacctttgagaaactgtttcaggggctcttggaagagtctactgctcccaaatatctctgctacccactggccattgctttacattcctcaactaagctttcaccttttagtactaacctttgatgactgatcaaatacaaatgccccaagaagactgaggataggagaaagaatatctctacctgtgaaacattgttagactgcctggctaggagttcattgttgttttctgaaggacgtaaccaaccactccaaaacttacaggcttaaaacaacaaacatgtatcatttcttatgattctgtgggttggctgggtggttcttctggctgaggcaggatggtctaggatagctacatccacatgtctggggtcccagctgagatgactggggctgttgaggcctttctccctgtggtgtcatcctccagaaggctgcccagatttgtccatatggtagcaggagtttcctcgaagcaagagagggcaagatccaacacagaagcacttttcaagctctgtttccatcacatttgccaatgtctcactgatgaacacaagttccatggccaagtccagttttaagaaatggagaaatagggcttggctcagtggctcatgtctgtaatcccagcactttgggaggccaaggcatgcggatcatttgaggtcaggagttccagaccagcctggccaacatggtgaaaacccatctctactaaaaatacaaaaattagctgggtgtggtggcgggcatctgtaatcccagctatttgggagg

SEQ ID NO: 235 - DNA, 1203 bp, Homo sapiens
acacttagttcagccccatataatttacccaagtccttgcttgcttgcttgcttcctttcttttatagctggtcactactatatttgtttattaatttttagatagcctttatgaggtataattgatacacaaaaaaattcacttatttaatgtatacaatttgatgagtttggatccaaaaccctggtttctttgcctcatttccatccacccttcaaactgaagccaggaatttttctaaaatgcaaatctaacttgtttaaacccttctatggctccccagtgcctatggtggtggtctccaacttacatccctttaagtaagaaaaatgtaggtacagcacacacagtatatgtgtattctttagattatatatctatatgtctacttctatacacaagatattaaaatatataaaattaaaataaacaatatttaaatgtttaaaatctaatgtattcatgaatagtccagaaaactttatttttgctgcataaaagcacatacacacacataaaaaccctttgctaattttccttcagcaaaagcaatgagattgaccatgtcatctatggctataccaccctgaacgcgcccgatctcatctgatctcggaagctaagaggggttgggcctggttagtacttggatgggagattgactatgtcgtatctaattagattatcattgattttacctcgaaacgtggctgacaatgaacttgtgttgggagttggaaaaacaccagttcagccattttctttatgctcacttggattcactataatcttctagcatagtcttcaatcagaggtttctttataggactctttaaaagccacatatccattatgaggtttcatttagttaaaactagaccatgtaatcaataaatccacttacccaggcacaagaaaaccacaaaagctcacaattggctgaacataaacaaagaagtgagtcagtccactgtcaacccctcagaagggcacaatgcctcctcctatctcaagattttttgagtgtaggctatctgaccatctgatatgggggtcaaacaaagacacttctgtcaatccacatagtaaatatcagtaaaaaatatcttatgttcaaagattaaaagtaagctctaataatttcttcagttccctaaggaatcatcaagcatgaatcctctgaccgatgacaagaactttct

SEQ ID NO: 236 - DNA, 1142 bp, Homo sapiens
gtccctgagttgaggataatgggaggacctaggaaggggctcactgctcctgccttggggtggcacaagcctaggtttgaatcctagctctgccacttaaggattgcagtgataggaaaattaatgttggaagtttctcagtttattcaatatatgaaaaggggatattatccatcttgcagatttgttttgaagctctgttggactttgaaaatctttacagatgtgaaaggtgttgttggaggttggagagagtggatggccatgtctatgtcaggctaccgtaggcagaggtgcagagaaaggagcagcttgttgcttggtggggggccaaggaaggtttccctgttgagggtcttttgaactgggtcttaaaggaagagcagttttccaggtgggactctgctgtgggagggaagagggatttctgcctgggtggatctaccaagcccctcctttactcatccctgaacttatctgagttgtgctgacttgttgtgacctttttcccccagcccccctgcccatggcccacatcgagaagttggcggcagactgtatgcgggatgtggaggaggaggaggaggaggaagggctggaggaagatgcagagctgctggtgtgtctgccaggctggtatcccagggctctgaggcaagcttgggcctggtggaggagagggcagtggagaggaggctgggggtgcccctgtattctctgactctgagtgagtgcttgcccctcctggctgtacagtgggtggcgtgtctctttgacttctggtctaagctctgcagttggggattctcagatttggagtaattactattttcaaggctatcctcggtcagattaaagaaatgttttggtgaaggggactcaggcacagtgactgacgttagggaatattgctgagagagagggtcctttactctcaggtcctgttgtgggtatggtcttgaggcccccaagctcctgggctgtgttttgtctccctagacggagctgcaggaggtcttaggtgtggacgaggagactgagcccctggatggtgatgaggtagctgacccaggcggctctgaggaggagaacggcctagaagacactgaacctccagtgcagacagccgtcctgacagcttc

SEQ ID NO: 237 - DNA, 1182 bp, Homo sapiens
tagtctacaaagcatctgattttggaagtacatggaattgttgtaacaaagtatattgaatggaaatggctctcatgtattttggaattttccattaaataatttgctttttcctgagtgtttgtgaagttattacattataatcattacaaacatctgattatgaaaccaaactgtccttcctacaatagtccttccatgtgacttttatttctgttactaggcctgccatttatttaatgctaacatatataaaatataagtacacgatttacttgtatctatataaaatagttctgggagagtatgcaaaaaactggttacactgattacctctggaaagaatcagatggaaagaatcagatggccagggttaggggttagaggaggacttttcactgtatgtcattatctgtcttaagtttcaaataatataaataaaatttaggccaggggcggtggctcacacctgtaatcccagcactttgggaggccgaggcaggtggatcaggagatcgagaccatcctggctaacacggtgaaaccctgtctctactaaaaatacaaaaaaattagccagttgtggtggcgggcgcctgtagtccagctactcgggaggctgaggcaggagagtggcatgaacccgggaggcggagcttgcagtgagctgagatcgcgccactgcactccagcctgagcgacagagtgaaactccgtctcaaaaataaataaataaataaataaataaaatatagtttataaaaaaggaactactggaaataatataaatcataagtaatctctagccacaaatagctagaaagtgtaatttttacaaaggtaccatttaccataaaaacaaaacaaacctttaaatacaaaagatttatatgtcacagaaaatataaggtacttagaaataaattgatttaaatatttatttatttatttattttttccctctgtcaccaaggctggaatgcagtaatggatcatagctcactccagccttaacctcctgggttcaagtaatcctgcctcagcctcctaagtagctgggattccaggtgtgggccaccatgtccgtctcctaggaataagtctaataaagagatgcaagtaatctctagatagaaatcaattccaatcaaaatcttggcaaggtttcttgtatgactttgc

SEQ ID NO: 238 - DNA, 1109 bp, Homo sapiens
gacagtagaaagagagggagagggagaccgtggggagggggagggggagagggagagggagaggggatttttttatacattaaggaaacaagcctttgactatgatattgggtgcatgtattttctcccattttactgtttatctatttttaattcatttatggcatggtttatgatgcaataattttttattttcacgtagttgaattcattctgttttactatgcatctgggatcgatggcacacctgcaaagtatttccctccatcatgaagtatttttaaaaaattctttgttttgttttgtttaagagacttgatctcatcctgtgctgaagctggtgtgtagtggcaagtggcatgatcatggttcattgcagcttcatcttcctgggctcaagcgaccctcttgagtagctatgtttgtagccaccacattcagcctcctcacgtttttaatcctgtgatttctgttcttttttttctttggaatttttttgagatgttgggtcgttcaagttttcttctctgtgtgtttctacttgtctttgcactgtttatgctacctttatcatattaaattcccgtgtatatatctatttttggactttattctgttccattaatttgcatgtctgtctactcactaacttttatcttttttttttttttgagacagagtcccactctgtcaccaggctggaagtgcactggcgccatctcggctcactgcaacctctgtctcccgggttcaagcgtttctcctgcctcagtctcctgagtagctaaccacaccaggataatttttgtatttttagtagagacggggttttaccattttgttcagcctggtcactaactttatcaatacttaaatatttaagatctgtcctcggatttcttttagttatccttatctatttgttgtttctgtgcagacaccagaattggcttgcctgtttctgaggaaaaaaacccattttctttgggattgtattatagattgatgtaggaaaattgacgtcctgtaatttcccctatcttggaacaagagtatgtttattcaagtctttcatgtcctccagaagtatgttcaagtgtttgtcattt

SEQ ID NO: 239 - DNA, 1130 bp, Homo sapiens
ggccaagctggtctagaactcctgacctcaagtgatccacctgccttggcctcctgaagtgctaggattacaggtgtgagccaccatgcctggccaatttaaaaaaaagatttttttttttttgagactcggtctgttgcccgggctggagtgcagtggtgtgatctcagctcattgcatcctccacctcctgggttcaagtgatcctcccacctcagcctcccaagtcgctggactacagctgcatgccaccacacctagctaacttttgtacttttagtagtgacagggtttcaccatgttggccaggctagtcgcaaactcctgacctcaagggatctgcccacctcagcctccaaaagtgctgggattacatgcatgagccatcatgcccagcctaatttttaagttttcctgttcgtccaaggctactgtttcctgcaagttgctttttttcctatttattttgttccattgtgttagagattttcctaaagttagggtgattctgagctgtccatggggacagctaagagtgggactgattgaaaactgcagacaggtagaatgtgtcagaggcttgctctgtcacccaggctggagtgcaatggcatgatcatagctcactgccgcctctgcctcctgggttcaagtgatccctccgcctcccgagtagctgggattacaggcgcctgccaccatgcccagttaatttttgtatatatttttttagtagagacggggtttcaccatgttggtcaggcttgtctccaactcctgaccttaggtcatccacccacctcggcctcccaaagtgctgggattacaggagtcaggcactgcacccggccaataaataaaattaaaaaaaaaattagctgggcgtggccgggcacggtggctcacgcctgtaatcccagcactttgggaggccgaggcgggcagatcatgaggtctggagatcgagatcctcctggctaacatggtgaaaccctgcctctactaaaaatacaaaaaattagctgggcgtggtggcgggcacctgtagtcccagctactcgggaggctgaggcaggagaatgacgtgaacctgggaggtggagcttgcagtgagccgagatcgtgccact

SEQ ID NO: 240 - DNA, 1198 bp, Homo sapiens
gtgagctatgatcgtgccactgcactccagcctgggcaacagagcaagatcctgtctctaaaaagaaaagaaaaaaaacacagctgaatccatttctcaaagtgtaatgtgtatttactatttaagaaggaaatctgatgcaaactgtggatattgacagtttttttctgggctgagaaaactctggaaccatttgctaccctatcagagtggtttgtccactagatggtggccatctacaccatccctggccctctcctatccggaaacctttattctgagcacccagtaacataggtggaagttgaagttttgtttttcaggttgacccagaaggtctcaactctgggattactcatgccagtacttgtttttggtagactggtgttttggtatacaaagctacttttaagtactgaaaatatcagtaattatatagtaccaatattttagtatatttggaaatctgaattattttgtgattgttatttagttaaggcaaaaagacaaaccctatagtctacaggtctagatatgaaagctgcaatcagccactccattgagtgacccagagttctgtattagttcggagactttctaaccaagtataatagaaacttgacagcattaatattgtctaggcaatagcatcagactcttcatttatatatgatgaagcttaaaaaaaaaaaagacaaatgctttcaaaaagctatagtccctcacctccaaattaaagaagatctgttttaagaagtattaggattatttacatttgagagacaggaaagaaaggatttttgttcaaaattatactattttattttattaacagaatcttgctctgtcacttgggctggagtgcagtggtgcgatctcggctcactgcaacctccacctcccagactcaagtgattctcgtgcctcagcctcctgagtagctgtaataaaaggcatgagccaccatgcccagctaaattttgtaattttagtaaagacagggttttgccatgttggccaggctggtctcaaactcctggcatcaagtgatcctcctgtcttgacctcccaaagtgctgggattacagcaatgagccactgcacccggcttcttttctgttttaatacaaatgaggtctcactatgttgcccagcctggtctagaacccctggtctcaagcagtcttcccacctcagc

SEQ ID NO: 241 - DNA, 1228 bp, Homo sapiens
tgtatagtaaactatagtcaccctactcctgtttcaaagtacttggtacagtttgcagttattttgtgtttacttctttttctcctccactggaagaatataaactaagtgagtgcaaggactgggtctgatctgttcactatcatatccccagtgttttgaaatgtcttgcttggcatgtagcaagaagtcattaaatatttatgaaacgaggccaggcacagtggctcacatctgtaatctcagcaccttgggaggccaatgtgggaggatcgattgagcccaggagtttgagaccagcctgggcaacataacaaggcccctgtctctacaaaaaatttgaaaaattagctgggcatggtggcatgcgcctatagtcccagcttacttgggaggctgaggcaagattgcctgagaccaggagttcgaggttacagtaagctgtgacaggaccactgcaccccagcctgggcgacagagtccctgtgggaaagagagagagaaaaagtatgaaataatagaaggaaaagggaaagaggaaggagaaatggatttgaggactgcagggagacatacatgagaggagaggggtagaaaaagacagatgcttattgaacaactgctgcactttttttttttttttttgacaggttctcactctgtcacccaggatggggtgcagtggtgtgatcatagctcactgcagcctctatctcccaggctcaggtgatccttccactttagcctcctgagtagctaggactacagacacatgccaccataataggttaataaataacttatttatttagaaatggtctggttccatcacccaggctcaagcaatccttccatctcagcctcctgagtagctgggactacaggcacgcaccaccacaccaggccaatttttgtgttttttatagagacggggtttcaacatgttgcccaggctggtctcgaactcctgagctcaagcgatctgtccgccttggcctcccaaagtgtaggattacaggtgtgagccactgtgcctggctaactatattatttatttttttgtttctaaattgtctcctccactaggatgtaagattcatgagggtagcttctttggtttactgtattttcaagaaaaacttctagctcctaatgagctgattatgtgttgaaaaaatgagaagaagagcttaattgtttctttgtttatgacggagtttcgctcttg

SEQ ID NO: 242 - DNA, 1179 bp, Homo sapiens
ttgggattacaggcgtgagccaccgcacctgggctcctttcccatatttatacccttaaatttttttctggccttactgcatagctagatctctaagacaataaatattagcaatgataactgccttgttcctgtctttaatgcttatcaattattgtaatcttactaaaacagaaaccccttccatagcatcctagataggtgatcattcagcctccactgggatgctcagagtgactgctaatcaccttacaaagctacttgctccatttttacccagctgtgttggagagagcttcctcctttaatcattaacatagtcatttattctaaatcagagcttgtgttgccctctgtgtctccttctagagatgttcttcttcaggtggagcctcacctttggaaataaacactctgcctggccccatcccactctccaccccccagttttgggagagaatcgttttcttagagaaatctagggaagcagcagcattagggcaaaggtgtggtaaaattcactcattcattcagcacatgttactaggcacctagtcagtgctaggaactgggcgtagagagtttaaaaacaaaaaaaagacacagtccctgccttgaaagagctatctagttgggagtacagatacataaagtaagatactgtgtgtgatctgggagcacacatgagagagcaactgactctgcccacagttggggaagacttcacatttgaacaggatcttgaaggatgaatagttagtaaaggaaagaagggatgagagatgggctttcaaacagcagtaaaagaacatgcagaaacagagcctgaggagcaaagggtagtaaaagtggagtggtgacaagccttgtacagatgtctgagcagtgggttggagcctgctggaggtccagtgtcctgtgtccttcctccagtggtgatagccctcctgtgcatgagtggatacctgatctggagaaactggaagcggaagaacaccaaaagcatgaattttgacaacccagtctacaggaaaacaacagaagaagaagacgaagatgagctccatatagggagaactgctcagattggccatgtctatcctgcagtaagtatttctcactgggagaattcctaccttccgaccatcttcccttccatcctttcttcccctcccatcc

SEQ ID NO: 243 - DNA, 1670 bp, Homo sapiens
acattgaaggtgctgggtaagtggtagctcttgttgcttcccgttcagcgtcacatctgcagtggagcctgaaaaggctccacattaggtcacctgtgcacagccatggctggaatgatgaaggggatacgctggagttgccctgccatcgcctccatcagccagacgaggtcctcacaggagaaggacagctcttccccaccctgggatctcaggagggcagccacggagtggggaggccccagatgcgctgtgccaaagccaggtccgaggccaaagttctccctgccatccttggtgccgtcctgccccttcctccttcatgcctgggcctgcaggcccaccccagccaccactgagtccactcggagtgccctgtgttcctggagaaggcattccagggttgaatcttgtcccagcctcagcctgggacacctaggtggagagagtggtctccgctctgaattggatccaggggacctgggctcattcttcttggctcaccaaccctgcaggcctcatctttcccaaaacccactttgtcttggtgggagtgggtccgcgctgctctgcagcaggggctggggagtggacagcatcaggtgggaaagtggagtccaccctcatgtttctgtaggattctcaccgtggggctggaagaaaagagcatcgacttgatttctccaaccactcatccctctttttctttcttccaccactccccaccccagctgtagttaatttcagtgccttacaaatcctaagctcagagaaagttccatttccgttccagagggaagggaacctccctaggtccttccctggcttgttataacgcaaagcttggttgtttatgcaactctatcttaagaactgcccagcctcagctgaaaacccgaatctgagaaggaattgcgtcatgtaagggaagctggaattaagggagctgagccagtcatggttgtggcgtgtgagtcaggagacctaggtttcagcccctctctactgtcagcgagctgtgcaacgtgggcaagtcattgtcctctgagctgcagtttcctcatctgtcacatcgctacagacaagacctccctggaacccttctgattgtcttagacactgtggttgcaaaacccacggaaagcctcatttgtgtggaaagtcagaggaaaaatgatccagtggacacttggggattatctgtcattcaagatccttccttcaaccccaaggtcagctcccatctcatttccagaaaggctcatacctggcttgcagggaagcatctgtcttgtcattccaggtgccagaatcctctcagagtcattgaagggtgttcacccatcccacccaaggcttggcacactgccagtgtcttagcagggtcttgtgagggctgggggcatccaggcactcagaaggcaaaggaaccaccctacccatttggcctctggagggggcagaagaaagaaataaacctcatcctatattttacaaagcatgtgaattctggcattagctctcataggagacccatgtgcttccttgctcagtgcaaaactgatgattctacttgctgtagatgaatggttaacacgagctagttaaacagtgccattgttttgccagtgaagcctccaaccctaagccactgggacggtggccagaga

SEQ ID NO: 244 - DNA, 1189 bp, Homo sapiens
agtgattgcatcactgccttccagcctgggcaacagagtgagaccctgcctcaacacaaaacaaaaaactcttcttgtcccttcttaaaacaaattacctatttgtaaactgctgatttctttgagtcattgttcccataaacttttcataaggcctcaatgatttcaccatacttccattaatgcttcgatataaatttgatgtttgtttttgctttaacattagcagaattcatgttgctttaatagggactctttttaaactgttgcttatccttcttagtgcctcaaactagatcctgttcagacatgtaatagtttattttggtacaaaagttttttgatatccatgcatagttttttcataatatgcatttccatgaattttttgaattttttaaatatttttctttttagttcagatgttgtttctggtctaatatttacttgtttatatttaataagttatttttactttaaaaatattttgatctttttttacatgcatgtttgtgtgtgcagtttctggtgtatttttaacagtagcaataggactgttcaggactcttaggaaatgcaaagagagcaaatttttttccccttgagacttgctttggagatagcaaggtatagctttgaatcacagctccaaaattgattgcttatatgcaatttggttaagtgtcttaaactctgcgagcctgggttttctcttctacaggaactcttgtagaatttaaattaaaaaatatataaagtgcttaatgcatttatatacatagaaacacatgtatgcataagtatatgtgtacacacacacacacacacacacacacacacacacacatatatacatacatacaaacagcttgctaagtatgaggcacgcattaccattactattagctgcctttcagaattacctgttttctattgatatcataactacctttcctcaattgctttatcttttaggccccagaattgtctggtctttcctgccttggatatccgctctagctagttcctatcttttttttttttttttgagacagcgtccaaaaaaaatccaggccagagtacagtggcactgtcttggctcactgcaacctccgcctccccggttcaaacgattctcctgcctcagccttgtgagtagctgggattacaggtgcccaccgccacaccc

SEQ ID NO: 245 - DNA, 1252 bp, Homo sapiens
agaaggacgtgcgctcagcttcgctcgcaccggttgttgaacttgggcgagcgcgagccgcggctgccgggcgccccctccccctagcagcggaggaggggacaagtcgtcggagtccgggcggccaagacccgccgccggccggccactgcagggtccgcactgatccgctccgcggggagagccgctgctctgggaagtgagttcgcctgcggactccgaggaaccgctgcgcacgaagagcgctcagtgagtgaccgcgacttttcaaagccgggtagcgcgcgcgagtcgacaagtaagagtgcgggaggcatcttaattaaccctgcgctccctggagcgagctggtgaggagggcgcagcggggacgacagccagcgggtgcgtgcgctcttagagaaactttccctgtcaaaggctccggggggcgcgggtgtcccccgcttgccacagccctgttgcggccccgaaacttgtgcgcgcagcccaaactaacctcacgtgaagtgacggactgttctatgactgcaaagatggaaacgaccttctatgacgatgccctcaacgcctcgttcctcccgtccgagagcggaccttatggctacagtaaccccaagatcctgaaacagagcatgaccctgaacctggccgacccagtggggagcctgaagccgcacctccgcgccaagaactcggacctcctcacctcgcccgacgtggggctgctcaagctggcgtcgcccgagctggagcgcctgataatccagtccagcaacgggcacatcaccaccacgccgacccccacccagttcctgtgccccaagaacgtgacagatgagcaggagggcttcgccgagggcttcgtgcgcgccctggccgaactgcacagccagaacacgctgcccagcgtcacgtcggcggcgcagccggtcaacggggcaggcatggtggctcccgcggtagcctcggtggcagggggcagcggcagcggcggcttcagcgccagcctgcacagcgagccgccggtctacgcaaacctcagcaacttcaacccaggcgcgctgagcagcggcggcggggcgccctcctacggcgcggccggcctggcctttcccgcgcaaccccagcagcagcagcagccgccgcaccacctgccccagcagatgcccgtgcagcacccgcggctgcaggccctgaaggaggagcctcagacagtgcccgagatgcccggcgagacaccgcccctgtc

SEQ ID NO: 246 - DNA, 1177 bp, Homo sapiens
gagagagagagagaatagaataagggaaaagaatctaaaacaaattatttaatacattttaaaggatcatttcttttcccttgttttcttaaaatcatccaacaccattgcatcttggatatgtttctcaagtacaaaactgtttctgaaaatgataaaagactcatttccatgtagcataaggatgcttataagaataatgcagtttctaatctttaaagctccaacttcagcattaggtctgctgtggccaaacgtaaaaaagcaccagtgtgcaggcaccaagcccgacttcttggaagaccagctaaaatagtgaggggcagatgcatgccagcatggaaatcaaagccatacctggaagctaagcagagttggggttgttctttcagaattatttttcatgtgtttgaaacggaaacttttcagaaggctggaagcgttcctttaagtcacttgacctcttaaacacaaaactcttttcttcccccttagagaaaaaggggggctgaagggttggaaagacttttgaaaagccatagaaggctttacaagtaactgtcctggagcaatccctgcggaggaaaagaaccttaccactcaggaaatctgtctagcccgctaccttgccccactcagctgcccttcgtcacagatgttaccgattttataagatagcaattccctgctcccaaaacagattccaagtgagaaaataggaaaagtaattggttgctattagatacacattctgaagtagaaagaaatgtgggtagcgaggaatttctggcctggattaggggttccatggtaattaaaccataatgacaaaggagattcccaaaaacttacatgaaaacacaaatgggcaatgtgcttctttcaaatcatctaaggaaaataggctattctttctataaaaggattctttttcccaggaatagactattgttactgaatgtcactgatgcaacttcaattgtacacgtatttgttgagaagacatgatgtgacaggccttatgctagatgtggggtgcactgacgtaaaggacctcccttacctagccatactgcactcataatttcccagtttttaattatattttaggaggtgctatgatacattttaaggaggagtgaataatcctataaggaatactccttcccatgtagaa

SEQ ID NO: 247 - DNA, 1174 bp, Homo sapiens
agaaagaaagaaagagaaagaacgaacagacatagatagtctattcccacttcaagtagagtaaacaggcaaagtggggcaaggaagagcggatgaaaaagccacaaggcaattcattaacccattttaagacattttcaggcaacttgtgaagcttcaaaggtcaaactgaccaacatttaattcatcacagaaaaaaaattctgggagaagaaaaaagaaaacttgaccttcacggtttaacaagttttcttaaaatgtctttatacaatcttgatagagttctttgctaacatgattcatcttccaatctatgcaaatcagacttttaaatcatacttggttttatataagggcttccttctgattgactttggagcaggtaacacagagctcttgatggcagtgccttgctgtgtgttctgttatggtgacagagagagcaccccctgcaagggtgatttagtgtgaaagtactagggtctttgactgagaagtcaccaaaaatcaatggctgtattgttttgaatgttatctgggcttgcaactgagaataggacctgggggttttactctttttattccttttcattcgttcttcactctctatctgaattgcagtcgtggtcctctggcaggcagcgtctgtatgcgaccggaaggcagtgctgaatagtggggtgatgttggcagagcactttccaggcatgctagcacctagcgcacaagcagagaactttgcttctgccaactgtgacttcagaacccaggtctgttcctgaacctggatgcccagctgtcagtgtgtcgccatatgtcaccagcacatggcaccctaattaaaatttcaaattgcatgcatttgtgtttgctggctggcttgcttaaaaggcagagacctcaccaccccggcttgcccccctccttcatcactctgaagtattatgtttgccatccttaggaatgagttggaaaacggcctttgcccactaaaaaatcatcactctccaattctctcacctcccattttgaaataggaatagtccttattttaagggagaaggagtggtgtgaagaaacgtggctggtacccttcagtagaattctaaagaccagaaatgtggttctcgtgtttccagtggttcatacagatcactcttcaatgctgtcctct

SEQ ID NO: 248 - DNA, 1137 bp, Homo sapiens
cccagtccagagaaccctaaactcctctaatgtagatggggctctctaaattggtttcttttcttgtgtaacatctaaccctttcttggtgaggaagaacgagaaggaaagggaagggtagagtaaggtagggtaggggaggggaggggagggaaggggaggggaaaaagaaaggaaagaaggagggggaaactgtgtggagagaagaaaattctaaggcaaggagaatatacgcaaatatccatttggaaaaggaggagcatgctgcctcttctatccttggcttttccctttaaggcatccatacagtacttttcccattggaaaagtcttccaaaacatattcctttgaaaatagttaagaccctcttgtaaacactaacttagatatggagcaccaggggccaggcgcggtggctcacgcctgtagtcccagcactttgggaggccaaggcgggcagatcacctgaggtcaggggttcaagaccagcctggccaacatggcgaaaccctgtctctactaaaaaaaaaaaaaaaaaaaatcgaaaattagctgggcatggtggcacgcgcctgtaatcccagctacttaggaggctgaggcagggagaattgcttgaacccaggaggtggaggttgcagtgagccgagattgtgccagtgtactccagcctgggtgacagggcaagactccgtctcaaaaaaaaaaaaaaaagaaaagaaaagaaaaaaatatggagcaccagaataaatgtagaatttgaagaactttattaattttattaatatatttattaatttagccaacaaatctttattgagaccctttatgtgccaggcactaatcttgggagcagtgttgaataagatagataaaggcctttgggagctttcattagcattgagctcacctatactctcatgtttcataatctattaaaataaatgtcctctcttgaaatcatagcagtggtacaatgacagattaaagtatccatacaaggttacatacaggtaggtgcttagtataattgctttgtaatgataaaatgatgacaccattaaaactctgagtatagtcagggtaatttcttaaactttataaggcaatggaaaaaataaatttttatcaagaat

SEQ ID NO: 249 - DNA, 1244 bp, Homo sapiens
ctaagcatttccctttgttatacaaactggaatagccctggtttctcgcaagtcactgtgccattcaagacatagtttttatagtgagcatcaaacataagcctctgaatttattttctcctcagaaagctcttgaggtggtgtagagtctagttgtaactttggatgtatgtgcttttgtgagtttgacaactctgaaaaatgtttgtctttctctgttatatattcaattttaagatttgtgggggaagaaaggaaaaatatatattttagatatatattatttacaggcaagccctgttactattttgatcaacttctaggtgttacgtaagttttctctattaaactctattaaagatgatctttgcataggggattacagataaatttaggagtaagacaggctttgtattcagacttgaccatgtacttacaatattcagctttatcaaattaatctctcagaacctcagttccctcatctgtaaaatgaggatgtagttataaaggtcattgtaaatattaaatgagacaatatgttgcaaagcacctgagtgcattccaggcccttgggatacatggcaacattatgatacatagtacatccacacacacatcaacacacacacacacacacacacacgcataattagaataatatttatatatttaaatgctgctttacacatattaacaataaattttttatataaacatgcttttaatagctgcacaatgtttttgattggatgaagagtcttttaattggtttcctattgttggatacttaggttattttctatttttctttttagtggtaaccttttccatactcttggcaaactattttcttgaaccacctgtatccaaaatgaacaaattctgagattaaaaattgaccaaaggccaggcatggcggctcatgcctgttatcccagcactttgggaggccaaggtgggaagatggcttgaggcaagaagtttgagaccaatctcagtgacatagcgagatcctatctctaaaaaaaaatacatatatatatatatatatatatatttaaattagccagcagtggtgatgcacacgtcctagctacttgggaggctgaggcgagaggatcacttgagcccaggaattcaaagctgcagtgagctaggatcatgctactgcactccagcctgggtagcacagtgagactgtctctaaaataataattttaaaagtgaccaagatctatagc

SEQ ID NO: 250 - DNA, 1224 bp, Homo sapiens
aatttttataatgaatgttctgttacagtgaatgttcttcataggctcagagttcctcgattttaattgtatgttactggacttagtgaatagactgtatgacttgacctttagctggggaaattgagaaactcatttaggttttctgggtattagttttatatctgtgagattaaaaaactagattatttcctttttgtgcatgtaatatgcagctgtttaaaagcatccttttgagactaaaaataaattatggaggataatgtaattactatgtacacatccactcccaaattatcaaatggtaatattttgtctttacaaagtatgtacatagctagagccctcatgtagatctgttgaatttcttcagattcaaaaaaaatggtaaaaaggaacattacagataaagatgaaattcactttctactactctgattccattccctcccagcctccttgtctaggggcaggcactgatgaatttggtgcatattttccaatttatgcaattacattttgatagccattaaagctgttcacaaattcttgttctttttcttctgagcacaaggtaagatagtacttacctgtgcctctttgaagttgagagtggacttgtgatttgcttgttgatgaatgaagtgagagtgaaaatgacatgtatcccttccaggtgaaagatttcagagccagcatgtgatttcctgctcacacttccctgtgctaaagtaattggggaagtaacagaacctctttcaacctaggtctcagagtgactataatgagcaaaacgtccttccttccttaccttcagcatgggatatgcagcatgaatcagaagaaagccttttgttttgttatgccattgagattgtgcagaagtttgttaccacagtatcttgactaacctataattttaccatatgtgcctatatataattaatggtagtctctgttttaaacttttcataaatggcattctaatgtatatttcatttagcaacttgctttttttgggttaacgcaacattgtttttcagatctttccacattgatatatataactcaggttcattgatttaagctactacatgtaattatcatgtgaatttattacgattaatgtatttgttactgactggcattcaggaagctttacctttcccagtatttcaaacagtgatgcaatgaatagccttttagttgattactaatatacat

SEQ ID NO: 251 - DNA, 1149 bp, Homo sapiens
agtgaaaacctaatcatgcagttgttcatcctcattaatatggataagtcatgtgttcatctttcattctaatttaattcaactgggccttttaatatttcagcctcaccacttgctgggctctgatccttctttttcttctgcctcctcacgtctccaaccagaaggtgatcttttagtccttcacttcatggggagccttcagagagagtaatgcagccaccagaaaggatgccgttgaccgacacagtgactgacaggctgccctggctcagttatcacagtgctgatgctgtctattctaaaggtacagtactgtgataactgaaggatggcagccatcttaccttccatcagaggagcctcaccgtacccaggaagaaagaaggtgaaagaggaatgtgaaacaggtggctgggacccagaaaccctcttaccctgcacctctgtcatacttctcccggggcatagggagagttattctgcttctctttgccttgttttgtaacatggggtagttgttggtgcagccatgttgtgctgagtgaacatatattaagatctttggaacctttaggagactgaaaataggtaagtatgaattagtatttctggaatggtattcagagaacttcgtaccatttttataaatgtgaaaggtaacctaattagaacagcttggcacttgtcagtacactactagatttcaaaatcagattctacttacagggagaaaaaaaaagcccaatatgttgaacagtattgaaattgttgcataaataaaagtccatcattgtagaccagcttactgaagtgaagaaagaaaaaaagtatatctttgtcttgaaggagtagatagtgacatgtcatgtttctttcaggatatttaggatctggcctaattcaaaagaatatttactgaatgcctatgttattgctgctgctgtcacatttacatgaaaataaaatgtaaattattttatttctatcaaataaggactagtctgcagtgatatctggcacatatcgatttcaggaatacgaagctgtaaacaccaagccagcatcacgtgcatgaaagactaggaaattttttttttgttgcccacacgggagtgcagtggcatgatcatagcttacttcaacctt

SEQ ID NO: 252 - DNA, 1149 bp, Homo sapiens; identical to SEQ ID NO: 251

SEQ ID NO: 253 - DNA, 2024 bp, Homo sapiens
tagattataacccagacgttttggattatactgagacaaatatgtaaataagttttagcaagtctgaacatgtaccagcgagatcttcaggttaactaagaaaagcccagaaacttcattatttactgtgctttgtatggcataactggtaacaaggcagtaaaatgatacatatttgaactggaccatagtaattaaatgatttatcaatatcatttgcaagataattgtcaggttgagttaatagtaagtggcagcttcccagaaatttgggttatttggcctaagctgtgccctgggattacctcttcatcttccttgacttttaagttcaaatttggaggttatgtgaagtgattgaaataaatctttcaggctgaggaagtcggtaatttcaagaatatagtgaaaacaaggttgtaatctaaacatgagaagcttaagtttaggaaatggttagaatataaattgctaaagccatcatgattttggccacagatgaaaatatgaacactggaaatgagcgccatttaaatgagatgctgtatgtaagccaggggtcagcaaagttcagcctgtgacctggtgtgtgtgggggtgtgtgtgtgtgtgtgtgtgtgtgtgtgtgtgtccgtgtccctgagttaagaatggtttttaggcttgtataggattaaaaaaaaaaaaaacccacagaaaaatgtaggcagcccagcataagataccgcctttcacagaaatgtttgctgaccccggaactgtcactctcgggttacaagagtttgtttctttgaaacagtctggctctgtcacccaggctggagtgcagtggcatgatctcaggtcactgcagcctccacctcccgggttcaagcaattctgcctcagcctcctgagtagctgggattacaggtgtgcaccaccacagacagctaattttacaggtgtacaccaccacacccaagaatcacttgaacccgggaggtgggggttgcagtgagccaagatcatagcactgtactccagtctgggtgacacactgtctgaaaaataaaagtttagttctaggtacaaattaagtggtctacccaacaggaagctgtgaaattagaagtaattttaaagcatactttacacctctatataatcaaagtaagggcaagataaaacttgttagtaaaacatgttttattattttttagataggtagcctgcaacataaaatatattttgaaagctgttaaggggtgtataatctgttaaaaaataccatgattagtatttcacatttagtgactcagatccctttgtgtaagtcctttgcgttgtgcaaagaggtttttctatgagatgagaattatgaacacttcatataggtaaattccataggttgagctggggcagaaattaatggctcctggagattgcatctttttttttttttttttgagcttagaattcccatttggacagaatttagcttttgtgctgttgattacttctgtactaaactggtagccaattgttcacttctaaatggaagggaaaaagttacccacacaagttagaaaatgatttaccgaattatttttttgagttagtatgtatatactgttttaaatcagtaatgtttgttccttttgctgcccatttgggagtatgtggcaattcctagtgctcttgtatgacattactcttcttgagacttgtatatgcaagaaagtatatataaaagatgcctggtggtaactttgtatctgagttctgattcattatggacttttagaaatctatttagataattggttcatactaggtgctcaattactctgaccttgtgtggcttaatccttaaatagttgctttaggtgttactgggtggaagcatggaaagtgaagggctaatattaaggatttttatgtattactgagtagggaaagtgggaagtagcttatctttggacagttgtattactttgcactaatcaccttgtttgcagttgtagctgattcagttctagatt

SEQ ID NO: 254 - DNA, 1184 bp, Homo sapiens
ttgtcttgatacattttacctagaattttaacagtaggatttttttttttttttttttgagatggagtctcactctgtttcccaggctggagtgcagtggcacagtctcggctcactgcaacccttgcctcccaggttcaagcgattctcctgcctcagcctcttgagtagtgggatcacaggtgcctgccaccacacccagctaattgtttatatttttagtacagacaggatttcaccatgttggccaggctggtctcaaactcctgacctcaggtgatccacccaccttggcctcccaaagcgctgggattacaggtgtgagccactgtgcctggccaacagtaagatttttttagagttctgtcttaatgtagacactagctaacaatgtaattttgaagaactgagaactgtggttaattttggtttttctttttcagtcaagtgcttctgctcctgatgtggatgacccagaggcattcccagctctggcttaactggatgccataagacaaccctggttcctttgtgaacccttctgttcaaagcttttgcatgcttaaggattccaaacgactaagaaattaaaaaaaaaaagactgtcattcataccattcacacctaaagactgaattttatctgttttaaaaatgaacttctcccgctacacagaagtaacaaatatggtagtcagttttgtatttagaaatgtattggtagcagggatgttttcataattttcagagattatgcattcttcatgaatacttttgtattgctgcttgcaaatatgcatttccaaacttgaaatataggtgtgaacagtgtgtaccagtttaaagctttcacttcatttgtgttttttaattaaggatttagaagttcccccaattacaaactggttttaaatattggacatactggttttaatacctgctttgcatattcacacatggtcaactgggacatgttaaactttgatttgtcaaattttatgctgtgtggaatactaactatatgtattttaacttagttttaatattttcatttttggggaaaaatcttttttcacttctcatgatagctgttatatatatatgctaaatctttatatacagaaatatcagtacttgaacaaattcaaagcacatttggtttattaacccttgctccttgcatgg

SEQ ID NO: 255 - DNA, 1191 bp, Homo sapiens
cgattctcctgcctcaccctcccgagtaactgggattacaggcatgcatcaccacgcccagctaattttttgtatttttagtagagacaggatttcaccatgttggccaggctggtctcgaactcctgacctcaggtgatgcatccgccttggccttccaaagtgctgggattacgggcatgagccaccacgcctgacctaaaatcatgtttactttgccagttatttgttacagtattgtggtttaaagtcttggattacaggttatttaggacagtgattcctaaccagaagcatattcaagttagttggggggtgggaggggcagatgttttctaaactttttcttttttcttttttttttttgagatggagttttgctcttgttgcctgtgctggagtgcaatggcgtgatctcggctcactgcaacctctgcctccagggttcaagcaattctcctgcctcagctcctgagtagctgggattacaggcatgtgccaccacgcccggctaattttgtatttttagtagagatgggtttctccatgttggtcaggctgatctcgaactctgacctcaggtgatctgccctccttggcctcccaaagtgctgggattacaggcgtgagctgccgcaccttaaactttttcttttcttcagaaagaatttgctcttatggtgagcactgttaatgatgggaatatcatattccgtggatttgttgggataaggaaaaatgatatactattggagggagtagataaaaatacatggtattgggtgatgttttgaacttggtaataaaaatttatgcaaaactataatggaatcataattttgcatgataaacaatgaagttgtgattggtgccttaacaaatgaaccctatgcaacgttaagtttctcatagtggtcaacacaacttttttttgtttctttgagacacagtctcctgtctcccatgctagagtgcagtggcgcgattttggccattctgaagttcaagcgattctcctgcctcagcctcccgagtactgggactacaggcatgctccaccatgcctggctaatttttgtattttcagtagagacatggttacaccatgttggccaggctggtcttgaactcctggcctcaagtgatcctcccgccttggcctcccaaaatgctgggattacaggtgtgagc

SEQ ID NO: 256 - DNA, 1363 bp, Homo sapiens
tcatagctagtttttttttttcttctaaaaaatgtcaggtttttaaaatcatttaccttattaaaatgaaaagtgccatacttaacttttaaaggaaagacctgacttgctttttctctatttagactgtttttgtactttactaatctttaaactatcaggaaaaaaaccaaaactttataccaatgatttagtaattttgaggcatagggtagcttacgtagtggaggatgtgccaaatattctcttcaaatgccaccttctcaatttataactaaaatagtgttatctgactaattcctctgaattttgatgtaagatctatataggcccccaaaatgatcgtagtacatgccagtcatttctcagtgaaataaatacaataccagagtacattatgggttttattgctttcttttatggtagacctgttaatggggaaaaaatacatcaaatcaaatagaatcttatatctgtatgttaaaatagagcacttacctgaagtcagtggcctggatcatagccctggatcatttcccagtctgtcctgtgctgtgtgaccttggacaaggcgcttcatctctctgggcctctatttctccatttgtaaaacaagtggctgcagtagatgatggctgagagcccttcctgttcccagatgccttggtccaaagaccccacccctctgctggtcctgccaacgtgttggtgctataagctgcttcagatataaaattggtttatctataatgtttgttcatttaatagcttctaaaaggcctttttgttatacagtgctttttttctagttttatggacttggttactgtaataatgtcttgtttttagccatgtaactacaaacagatattctcttgatgtcttagtaaatttgcatttgatatatcattgatgagattttgttgttatgtaatattctttggctacgcatctgtccagcatcttattaaccataatactgtgatcattatttggaaatatgtcctatggaaagaataaaagcatgtacttcacagctagcatgttcacagatttgaaagaagtttcattaaaagcaccattgctttctgtactgcgtcagtgcctcattgtatcatcctacttgtgttttgctcaataaatgaataaaagaccatttctcttcccctttcccttccttcactcagttaacattttctgagcacctcctgagagcaagctgctgagagtcaggctcccatgacacccaaatgaataagacttacaccagcccatgtcacagtctgagcaaggaggatgggaatgacagatatgtaaactaatcatcgtagtatcatgtggcaagtgctataactcaggtgaa

SEQ ID NO: 257 - DNA, 1144 bp, Homo sapiens
acatagatgttcatgtcatctttgaaaaaggcagttttatttcctcttcccctatctgtgtgtcttttatttcttttatttactattgcattacctgggaattgcagcaaaaagttgaaaagcagtgatgagagggacatcttggcctttttcctagtcatagagcaggaaagctccaagttactcactattaaatatgggctattttgtagatgttctttatcaagttgaggaagttcccctctatttttagtttacatagtttttttaaaaaaaaatcatgaatagatgttggattttgtcaagtgctttttctgcatctgttgatacgatcatgtgacttttcttttttagcctgttgatgggatggattccattaattgattttcaaatattgaaccagccttacttaccctgaggtaaatccgctttggtagcagtgtgtaattcttttttacattgttggattcagtttgttaatactttattgaggatttttgcatcttcattcatgagagatactcttaagttttctcgtaatgtctttatctgcttttggtcttagggtagtgttagcctcatagaatgagttaggatgtattctgtctgcttctgtcttctgcaagagattctagagaattgttataatttcatccttaagtgtttagaagaattcacaagtgaatccatctgaacttggtgctttctgttttgaacagttattaattattgattcaatttcattaatataaataggccttttgagattatctgttttcttttgtgaatgttggcagattgtatctttcaaggagtatgtccatttcatctgggttatcaaatttgtgtacatagattgtgcatttattcccttattagccttttaatgtatatgggatctgtagtagtgtcccctcctttatatctaatattggtaatttgtcttctttctttttttctcagactcactagatgcttatcaattttattgaccttgtcagagaaacagcttttggtttcattgatttttctcaatttttttttctgtttaatttcattgattttttttgctttgatttttttctttaatttgaatttttttattttatttttctttgtatattaatctttgcccatgcttaat

SEQ ID NO: 258 - DNA, 1198 bp, Homo sapiens
tgacctcttttatactattcccttttttgcttattaacaaggataaagtgaatatacatgctcttttgaggcccagagcattttcaaatttaaaatttgttagtctaaggtattattttttgcaccctgctgctttgggacagctgaattcagttttgtaagggtacctccactggttcacacgtgtattttctttgtagtttttatgataaaaacattatttaaataagaaaactttgaagtatgtaactccaacaatgtataaaacattcttatatacctgtcatttagttcaacgagaatcttaagaagttggaagggcaaattctatcagttttactttacaaataaatgaattgagactcagttacttttatgttcacatgactttaaaatgtcagaacaagaacagaacccagatgctctgtcttctgtcattcaattatacattttccagaatctttctgttttctccaaatggattcaatctaatacatacatttcattttttttacacttccatagtcaaccgacggtattaatgacaaaagtaacattcctaaacagcagtgcatggttgactgtagctttgcattagaatattgtacacaaagtacaagatggtgaatgtcctttggaataaactaatgactctttcaagtggcagacagctaatgctatgataatattttattattttacaaaaccttaaagtggaacattttaaataaaataacatttggtaaaaataaagttgattttaaaagtattggtgtttattactaatgtcaaatctttgttctatgctatcatggtatttagttttctagggctatcatagcaagttgtcacaaactgggtagctaaaaccaacaaaaatgtattctttcataattctggtgaccagaagtttgaaattatgatgttagcaggttgaagctccgagaatcaatctgttccatgcctctctcctagctgttggtggctcgagaatcattggcttacacagtcatggaccgtataatgatgttcaggttagcaacttatggcatacacagcagtgatcccataagattataataccttattcttactgtatctttttatgttaagataaattttgatacacaaataccattatgttacaattgcctgcagtattcaggatagtaacctgctgtacagatttatagcctag

SEQ ID NO: 259 - DNA, 1306 bp, Homo sapiens
aatatcattagtaatcggatagctctgtagatgattatcagtatataaagacatcgtgagcagtatttaataagaagagttgctgaagtgacttttgcaggaggatgaatgctttttttaaaaaaaaagtttatacgtgcctcttcgctcttccaaaaaaaaaagagagaagaaaaagaagaataaaacgagagacgaaggtggataacacctttctctagaccccggtgcctctcatttctcgggctgcaggcgacggctgctgggcctgcgcggggtggagccgacgctgacgcgccctgcgccgcaaagcattgtgggagctcgggcccgctagtgtcgtggttggaggcgaggtggggcggccgtttgttttctcgtggtctcgagctcgcgcgctctcatcccctcccccgcggcgtgcggcggggcggagaaacggcggcggcggcggcggcatcggcagcagtagcagaggctgtagcatcggacaccctcctctctcccgcaatccggttcctcttccccctccttctcactgtttgttgtgtgtttgatgtgttaaagcaggagcgagaacccgagcagcgccatgagcaacactaccgtcgtccccagcactgcaggtccgggccccagcggcgggcccggtggcggaggtggtggtggcggcggaggcggcggcaccgaggtaatccaggtgactaatgtctccccgagcgctagctctgagcagatgcggactctcttcggtttcctaggcaagatcgacgaactgcgcctcttcccgccggagtgagtatcgtccaccatcactgttcctgctaacgccgcctcagcctgggcctaacacacacaatttccttaggcccctgtcgctgcttccccgggccaggctgcttgagtggctggtggctggtggatttacttaagacggttgtgttccaggcctacaaaaaaatgcagagaggcagggccagggctttttggaattaggaaacactggctgttattctcgggaaattttttttttccgccttaaattgtgccaacgtggtcgtttggctttggggacttaacgcaagactaaccgcagtctgtacgtcgtatataggttaaatcccttttttaaaaaactgagtatttgttctttgcgttcttggaagaaaggtaacaaaattattcatgcctgtgttaatttggtgttaaactttgtaggttgttcacttattgttattgctgttatgtggttctggcccagcaatataattcaaagatcatattctttttgacagacgcttagttt

SEQ ID NO: 260 - DNA, 1190 bp, Homo sapiens
acccctctaaaaagctgtggctgattggtggcttttttttttcttggagagggggtgtcaaagatttctttaaaatcgttagtgatgtggtctcgctttaagatttttaatgggatcagaagaaaattcggtacttaatcacttccggtaatcttcatgacctgttatagtgactgcagtgtactctcaatgaggaagatatagatacgaaaagaactagagccgcatcacatggggacttctgcaaatacagagactcggattaaaggtggagaagatggagctaaaggaactgcttatttaatacatttgaacaacttttggggtacttagaaggtgctttgaaacctgcatttgattaagcaagaattcgcttgcaagttaagggttagatttttttattttttaaaaatatgctttctgccacatgtaaaccgtaagttgtcctgaaatgataagctttgatattctatggtgtttattttttacttatctttttgaatgaaaagtgaacaacaagaaatgctggtggtaattttttgggtcaatgatgagttggcatgtattctgaatctaaagttgattattactactttagctctagaattactctgagacctgaaaattacctgaatcgtgactaagacgaagcctgaatgatttaagttcttttttgttggatacaatttgttgttgttgttgttgttttggttttgtttttgagtcggtctccggtcgcccaggatggagtgcagtgacacaacctcagttcactgcagccttaatttccctggctcaagcgatcttctacctcagcctccctagttagttacaatttttaaatggaacgttttcctattacaagatgaaatcaagtgaaaattgagatgtatgttgaatctatgctgtggggcagaagaacgttgtagaggtaaacattgatgagattaccactttattttgaaagggcactccacagaaggatgttattatcaagtcagatgcaccggacactttgttattggagaaacatgcagattatatcgcatcctatggctcaaagaaagatgattatgtatgtataatttttttatgttggaaagtttattttaaagaagtgtgacagtcataagcagtgagacagtatttatgtcttaaaatggcatccaactccatgcagagaactgagg

SEQ ID NO: 261 - DNA, 1190 bp, Homo sapiens; identical to SEQ ID NO: 260

SEQ ID NO: 262 - DNA, 1224 bp, Homo sapiens
gatcaagaaatattagaattaaatgcaaaaaataatccatgcatttatggttttgatttttatatattcccagctagttgaaaatgatgattcccacaagaagcataactcagcttgtttctgcttactgagtattttctactatggtatatattgataacatttcttccattatgtatgttgtataccagagttacagttactgtgggaatcataatttgaaattttgactcctgtgtttctggaatctttacaacaaatgttgcattaacatataacttttttcagttgactttaccaaaattaagcccatctttagtagatactgttttaacatgtgaaagaaatacgttataaacataccacaagatatggctataaaacaatgagatcagtatccatttttgctttaaagaattggccttattgcttcagtgtcacatctcatactcaagggcatttactacaaagaaagagttctccaatattgctgttctgttgctgcctgccctatttacacatgtacctgctacttaaataggaaagcctttcaattcatggacaatacaccttggtggtaaccaggcttttatttttatttttttttcttagtgtaaaaactgtactgttttggaaatgtgctgtgaaatattaggtttaactgtgtagatcctagaataaggggatttatatagatgaagttgtaaccaagaaactggttattaaaaatttatttactccaaacatggaaaggtggcagtgtcattcttgtgtcacctgcacagtttgcagtctcagagacttcagaggactctgagatttgcctgctgaggtatacccagtcatagggtctgccaggtgggaatcacatgatacgacccacgttcagttttctctcttttgactatggtagtgccagctttgactgtgctagagtttcagggacggacatgagcgaaactttcttagggggggtcatttaataaggtcataaatgtaaagcaaattggctgggcatggtggctcatacctgtaatcccagcactttgggaggcagaggcgggtggatcatgagttcaggagattgagaccatcctggctaacacggtgaaaccccatctctactgaaaatacaaaaaattagccgggcgaggtggcgggtgcctgtagtcccagctactcgggaggctgaggcaggagaatggcgtgaacctccggggggcg

SEQ ID NO: 263 - DNA, 1187 bp, Homo sapiens
agcactttgggaggctgagaataggggattgcttgagcctaggaattggagattacggtgagctatgaccatgaccctgcactccagcctaggcaacagagcaagaccctgtctttaaaaataaataaaattggctgggctcagtggctcatgcctgtaatcccagcaccttgggaggctgaggcaggcggatcacttgaggtcaggagttcaagaccagcctggccaacatggtgaaaccccatctctactaaaaatacaaaaattagccaggcatggtggcgggtgcctgtaatcccagctactagggaggccgaggcaggagaatcgcttgaattggggaggtggagattgcagtgagccgagatcgcaccactgcactccagcctggatgaaagagtgagattctgtctcaaaaaaaaaaataaaaaataaaaagtgcaaacctattattattctataatattagggttttttttgttttattcagcccccccccttttttttttaaacaaagcatttgtgttaacagaaataacactggaatataaaaataggtgcccttagtggattggaagctaagtgaagtttctgaaaaaccgaaaaagcagataggatcagatcaaagaagcaagccaagggccacaggaaatgactgtgtgggctttaattttggaagtgacagatacggatgatgaccttagcattctgcctgttgcactgtaccaggcagcaagtataaaggtatctgcctgggtagagcagtgagtgtagaccatgtgaagtatgattgatattcagggagatacataaggatattgtatcctaaataacaaaacaaaacctcaatagatgggttgattgaatggcaaaataaatactattggagaggaaatgagtatgctgaaagatatagcggaaagatttcttctaaggtgaagcacaaaaagataaacagaaggaagaaaagttttgacatgttggatagctataggatccattgtttttctattatgtattttttaaaagagaacagagtgagaactacatttagagtaaccatttagataaattttccagaactagagagaaacacatccttaaattaatgaggtaactgtgcttaactaaattttaaaaagcgcctacctaaacacataggaagtaacttcttaataccaaagata

SEQ ID NO: 264 - DNA, 1138 bp, Homo sapiens
agcagcatcttatcagttttgtttattcgatttctaaaatgtgctgatccttttaaaactcctgcttatctctgcaacaaagaaaaatattcaaaaatactgccttcattttcacacacagtgctgaagatgctgcaagcaccaaatcatagctcataaaatcaggtcctgagatagttacccataaagaggaatcctttgagtgtatgccattggtgagccgatgagcatggaccatagaagggctcaatgtagaaggtaaaattggcaaatcataattgagaaatatgaaatgtattcccatacataatatggtatagggtgtaatgtacctgcttttgatcacttttcattttaaagtgctattcacttgatcttaaatgttccatgaactgttaaatttcttaagttacatagttactacaccacatttatgtgtatgttatgttttaatagtcaatgataggtatgtacaattgataatataaaggggctcattgaaacttgagagcctgttgagttttggttagttgtagattgcatttttataaaaaaaaatacagatagattgatgataatagatattggggcattgtttctgtctcatgagaattcttttattcattaccataagccttcactgatactataagcattattttaaatgacgctgatcttaagtctgaaataaatggaaagcagaaaaggtgagccagttgatttgaatgcattggatattagtgttagaaacaatgtatagtttagattgaaactgaactgacttatttagcacttaaacaaaaatttgacaatgtttttagttttttttaagacagcttagtgtggtgatacttagaattctatggtttgatgtttcttttagaaatgagaagtatagttttattttttaatataaaaaatggttttaatactaaaactagtaatttgatactagttgtttataaacattgtaaaatatatcttttaaacaaattatcttggtagttaattcataagggtgggtttgggtaggaatagcagagtactttcagagggaaaggggagtcattcagaagtgatagcattttatttgtttgaatactctgccagtaaaatcagctgtacttagaaagttatc

SEQ ID NO: 265 - DNA, 1177 bp, Homo sapiens
ctaaaaggggggaaagaaaactagacaaggtaagtaaaatttgaaagaaattttttaaaaaattttttaaaaaaggaagttttgtcttaatagaaaacaatttattttccctcttttaggattgtgccagattgaaagtttgcacagacgtcttgttaataatattaaaaaacatataaattgcttagaagacacttcactggttttactcatacgtgaatggattttaatatgctgtattttcgtcatttttctatttccaattgcaccttaaaggttgaaattcctatagtttgctactctagtgtgttgcaggttataccattttttttttaatgttctttactttcagtacttttgtgtttcacgtttagctttaaacctgtggattaaaacagtggatttacagtgctatgtatttttaaaaatcgtaatcgttgaagcttctgaacttagaagtctgcatgtattttttgttttaggtttgatatatgagttttgatacattttctttttacccttttttttaaagggaggattctcactgaggctatagaatgtatttgtagcttttgaccaggagaacttggtttccttttatttaagtgtctttcatatttatagtgaggtttttaatgtagaaaaaaaatgagctaatgatgcttcagatgttgtatgtaatgtattctttttattttatgtgtagatggctcttggacaagtccgagcagtacaacacactgggagggaatgccctctccttttaaaggcaggaatttttatttattacctgtgttcagtatgtaaacgtgaaataaaccagtggattcttaaatggacacaaatatttcttggattatgtgtctgcgcatattttatttttgctgcacaacattctgatgtttaatcatttaagtttgaaggggggaggagaatgtagtactttgagctataggttgtctgttccaaggtatgcattgtattcatctgtgtaatggatttaggtgaaggtagtcatgtagttgctttgagattttatttttttgctaaagttttatgcagtgaaatgtttgtttataaataatagaacagtttaggttgagattgccttgtaatgttgtggggggtttttttgtttttttttttttgggcatagctttgtggtcactgtcagata

SEQ ID NO: 266 - DNA, 1244 bp, Homo sapiens
tgatgaaaccttaatgctaaataaaatagatataatataaccttgcacatggttctgtttttaattttgcagcatcatttttaagatcctacagatggatatttaaaattcaattgaaaagtttataggtaggcttcggccagtagtcaaattttgtatagttttccttctaatctcagaattcgtacttcaaaattgtattctatactttcagttttaaaaatcttagcattttagacaacttaaaagtttgaatattacctgattttcacaagctagtttgatagtattgttgtcttctttgctttttaaattatagaaaagatagagatgtcatttagtcatgttagttcatgggcgtttgaattatatgttttttatcagcaattttgctgatttgagacagtttttgtacactttcctcctttaaaaaaaaaggatttgccaaataatgaaactgctctttccagaacctcaaaagctaggtcattagttctgacagatttatatgttcaaactatcaatatttctaaaaccaaagggccaaattctgatagatctgctgtgtccgatatggtagtaatacattctgacacatgctgtgaaggcactctccatcttttctctgacacagttttgacaaattggctttttgtgttatcagttaaaggccaaacacagattatcttttcatccctgctctgtgttcatgtgttactgtgaaatggatgctttttatgttttcagtattttctgtaccatttgtaggattggaagcctactgagtacactgatctttatatcatttctcctgtgtagtgttggtggcttacgtaatcattctcctgtgccactagaggaacattgtattcttttgacctaaccaaaattttgttccataaagtcactttcacttgaatttagcatggtttctgtcttcaaattagagaagaaatacagcatccattcccaaacagtggaatcagtcagagctgccaagaattatctttctggagccagttcctgtaacctagtctatagaccaagaacagtgttaagcaaatattattttcagactcataagctatttcttgtgctgtttaagaaaggaaaatgtggatatcttctggaacatctaacttgcaaaattttactttttcagttccccagaagtattgtacgttgtgcactaaacttgcaaatagctatactcagagaagtatttgttccttttagtttttgtc

SEQ ID NO: 267 - DNA, 1197 bp, Homo sapiens
gaggtgagatggctttcatttgcatctccctcatgattagtgatgttgagcattttttcatatacctgtggccatttgtatgtagaaccaatgcttttaatcacatgtcaaactgcctatgtcccagtcctttccagagagccctctggaaccctttttctattgtaaacaaatttatttaaacctacaggttttccatggaatagaagtttattcctcagtaccttgcatctactagttgggcagttatggtgagcatatctttttgacttaattctagagtaattatataattggagataaagctgggaaccattctttacttaaaaagtctcaagtgggactctccttggagtgttctctaaaaacaaaacaaaaaaaatcgttttcttaaaggcatttagttagcagagcacagctgactgaaaatttcttaaatacaattcaggatagtttgtataaataaccaaaaggtaaataaccaatgtagtcctcatgagacattaaaattttttttcaactgaatctctcactgcactgttaattggaagtcttctttcttgaccattctctagaacagaatacaactgcggtcactcctctcttctggatgtttttttctggaccatccaattcatttccacccccttgttatggagagaaactttcctctttcatggaaaagtcattctgacatcgaggcaccacgacttttgacctagagtaagcatatcaaactatttttctcaactcaataatttacagaaaaatattaagaaggtgaaaattttccattcatcattacctacatgtaagaaaaaaagaaaagaagaaaaatctaccagaatcctagcatttacagataaccactgttagcatttatttatttatttatttatttatttatttatttatttatttatttactgagacagggtctccttctgtcacccaggctggagtgcagtggtacgatcacagctcactgcaacctccacctcccggattcaagtgattctcctgcctcagcctcttgagtagctgggattacaggtgcacgccaccacagcccagctaatttttgttctttttaggagagatgggattttgacgtattggtcaggctgatctcgaactcctgacctcaggagatccacctgcctgggcctcccaaagtgctgggattataggtgtaag

SEQ ID NO: 268 - DNA, 1178 bp, Homo sapiens
aagcactagttttaagtattaagagctcactaggctgggcgtggtggctcacacctgtaatctcagcactttgggaggccgaggtgggcggatcacgaggtcaagagagagagaccatcctggccaacacggtgaaaccccgtctctactaaaaatagaaaaactagctgggcgtggtgacgtgcgcctgtagtcccagctactcaggaggctgaggcaggagaatcgcttgaaccgaggcggaggttgcagtgagccgagatcgcaccactgtactccagcctggcaacagagtgagactccgtctcaaaaaaaaaaaaaaaaaaaaaaagagctcactatttgacttaagtcttcaattattatatagtatcttcttttgaagcaagagaagtactgttttattgtaagtacaatatttccaaagattgagaaaaccttcattaaaatgttctcaccatctggcacttccccccctctttgttatgtataggtttcccaggcagctgcagacttgaaacagttctgtctgcagaatgctcaacatgaccctctgctgactggagtatcttcaagtacaaatcccttcagaccccagaaagtctgttcctttttgtagtaaaatgaatctttcaaaggtaagtttccttaaatttaaaacaaaaacccacactgtaggaataactagtcttctctttctttgcagcacttaaaagatcatcccatgccctttcctttggccctccatttccagtatttttctgttttgcaaggaaagtgaggattcatgaaacttgctgacttagtagccatgaaggctaatcgtttctattttaccataaagaaggttaagtagaggatttaataaccataaagagggtataggagagttactacaaaatcccactgccgtaacaagccatgtgttactttttagagcattggcctaatggagtccccaagtactagttttgtttttgtgtacctggcaaatatttagacagtttttaaaaaatctgcaatgtttatggggataacttaaagtactaccaactgatttggattaactcttgatgttattgctctaactgaacccagctgtagagcagtatagcaaagattgggaattggaaatgcaagagaaagtcagatgtaattgagtaagccagtgtggtaga

SEQ ID NO: 269 - DNA, 1289 bp, Homo sapiens
aaggacatttgcactgagacctgacacttcaggtcttcaactcccttgatgggagttagccagaacgggcttagaaacagcaattgatggcttagtgactgattttacaaatgatatttgtttcttctttaaatttctttctaggatgttcacttctccacaatgaatgagtgtcactatgacaagcacatggactttttttataataggagcaacactgatactgtcgatgactggacaggaacaaagcttgtgattgttttgtgtgttgggacgtttttctgcctgtttatttttttttctaattctctggtcatcgcggcagtgatcaaaaacagaaaatttcatttccccttctactacctgttggctaatttagctgctgccgatttcttcgctggaattgcctatgtattcctgatgtttaacacaggcccagtttcaaaaactttgactgtcaaccgctggtttctccgtcaggggcttctggacagtagcttgactgcttccctcaccaacttgctggttatcgccgtggagaggcacatgtcaatcatgaggatgcgggtccatagcaacctgaccaaaaagagggtgacactgctcattttgcttgtctgggccatcgccatttttatgggggcggtccccacactgggctggaattgcctctgcaacatctctgcctgctcttccctggcccccatttacagcaggagttaccttgttttctggacagtgtccaacctcatggccttcctcatcatggttgtggtgtacctgcggatctacgtgtacgtcaagaggaaaaccaacgtcttgtctccgcatacaagtgggtccatcagccgccggaggacacccatgaagctaatgaagacggtgatgactgtcttaggtaggtaagaggacccaagcaagccatcattcccattcattcagcaaatctttacggagcatctgtggtgtaccaggcacttactaggcagtaagaatgcagcagtgaacaagaacggacataaatcgccacccacctggagcttacactctaataaggaaagataaaataagtattctaatgggggtaaacaaattaagtgaaataagatgagtctcctgtggaaaaatcaatcagggaaggaaggaaaaataaagcagggaagggagctggagagtgctaagctaagcaggtatcgtttgcactttaaaaaagtgttgtgagggatgcctggaagatgacttttgagcagaggtgtgaaggcagtcagggagtgaaccatactggtgtc

SEQ ID NO: 270 - DNA, 1223 bp, Homo sapiens
atgggtattaaatttattaaacatacctacaaaatctaagtaagacatgaatttaaaaaaagaacagtgcctcacactgtaataggaaatgacagctattgctattaggagtacggcatctattaacagtttccagcagtaaacacaaccattatcaaataataaagacctattataaaaatattcaagcaacagagatctattaaaatttttatctttgcttcaaaataatatggagtgaggagtgtaggttaaagattagtcatgtactgatctttataaacgctggggctggtaaaagtcccctctttgccttgcacacttgtcccttctcccattccatccctcagaagtaaacataatgaacacattgatggctacacttccagacttttctatacatacagagaaatgtgaatgttagtacaaatacacatacacagttttacacaagtggggtcatattggatacattgttttgcaacttgatttttcccttgataatttgtaaacttcctttcttgttggaatgaagaatgttcctcatcacagctgaagggtccttgtctgatgaacatattttgccattttcctaccgatggacatgtagatcccttccgcacattacaattttgttctggccaatattttctctctcttttttctatttctttttttatcatctgcttcatttttcatttatctattttctctctttagtaccagaagtcaacacttttgtcagcttctcggttagcactccccacccactgattccttgaatgctctgaagaccaatgaattccttattctatgagcctgacctttataggccaaaaaatagagagagaaataacaatgaaagtgaatttctactactgttatgtttaagtcacagtgcaggctgcttttgctttcctgagaaagtatgtcaagtgttttttaaattctttttttttaaattcttttctttaaaaccttatttttttcttgttctttcttttctcttttttttttttccttgccagcagaaagtgaaggaggcacactttcaagtttgctttttaatccacaaactcaacattttttcttttctgtttactaagtcacacaattcccttggaggcagacctttatgtgtcccgttattaatgttttgtcctttattttccacataaagtaataaactagtaagtaaaatctttattagaatttctctccaa

SEQ ID NO: 271 - DNA, 1212 bp, Homo sapiens
gacctcatggtaatcggaggtcaaaaaacatgtaatagatacacatagaataagaagcaagaaattaaatcataccatcagacaaaattatcttcactaaaaggaaagaaggaatagaagatgacaaaacaaccaaaaaacaaattacaaaatagcaagagtaagggcttacttatcaataataacagtgaatataaatggactaaattattcaataaaaagacataaagtgactaaatgaataaaaaaaaccaagacccaaggagctgttgcctacaagaaacacacttcacctataaagacacaagtagactgaaaataaaggaatggaaaaagttatttgatgccaatggaaaccaaaaaagaatacctatacttatatcagacaaaatagatttcaagacaaaaactataagaagagacaaagaaggtcattcaataataataaaggggtcaattcagcaagagaatatattataacaattgtcaacatatatgcacccaacactggaccacccagatatataaagccaatattattagggctaaagaatgaaaatacatgatgatctcactccaactggaactctctcactgattacttgataacaataaaatatctgatattctgcaaaaaacaaacaaacaaaaaacaaaaacaaaacaaacaaaaaaagaatgaaatagatcttaatacaataaatgttagagacttcaacactccactttcagcattgaacagatctcccagagacaaaatcaacaaagaaacattggactttctccactacagaccaaatggacctaataaatatttataccccaaagaaaggaaatcatatattcatttccatgtttattacagcactgttcataatagccaagatttggaagcaacctaagtgtccatcaacagatgaatgtatcaaggaaaaaagtggtacatatacacaatgaagttctattcagtcataagaaagaatgagattctgtcatttgcaacaacatggatggaacggaaggttattatgttaagcaaaataagccaggcacaggaagtcaaactttgcatgttcttgcttatttctggaagctaaaatttaaagcaattgaactcatggagatagagagtagaaggatggttaccagagtttggaaagggtattggagggttgaggaggaagtggggatggttaacaggtacaaaaaaat

SEQ ID NO: 272 - DNA, 1178 bp, Homo sapiens
aatatacccactagaggttggcaaaacacactctgagagcttgtggccaccttaatcaagttgctagatctatctgcaccccattttttgatctggaaaatgaagatgtcagactaggtgacttatgaggtccttctagctctaactggctgtgactgtactgtcattcatctatcttgaatagaatacaaaagatctttttcagtgttctagaccatcagtgttctaacctacattaggaaacaatgagggaaaaagtctgcatcctccctcaacaggacattctagtttctcttggttccttgatgggccttcagaaataagcatagaaactatcccagctcacccatgcttttcctgggcatgccttccctccttgccccagcctggagacttcacaattgggccaactgttcctcacctgcgagggcatatgtagtcctgattgaatgggcttctgtctttgcttctgctttttctccaccttcactgtgactcaagccactctttaaaaactaatagagagtgaaaaggcaaggtggagggacccaagcaattttgtttttaaactgtctttcttttttttttttttttttttttttgagactgtgttttgctcttgttgcccaagctggagtgcagtggtgcgatctcagctcactgcaacctctgccttctgggttcaagtgattctcctgcctcagtctcccgagcagctgggattacaggcatgtgccaccacgcccagctaattttgtatttttagtagagacagggtttctccatgttggtcaggctggtctcacactcccaacctcaggtgatccacccaccttggcttcccaaagtgctgggattacaggcctgagccaccgcacacagcctaaactttctttttaaactataagccacgtaactttgtcatcattctttgtatacctcaatggaagttgtttggttattttcctggcaaaatggtcaaggtgtgtgtttagatgggaaatatatatgtaaatcaactctctctttctctctccatatgtatatgtgtatgctaaagtcttaaatttgaaaaaatatatctgccataaatggccatggtaccagtcacctcattagtgcaatagacattgcctctcacatttaagacattagtatcttggcaaatgatattaatt

SEQ ID NO: 273 - DNA, 1230 bp, Homo sapiens
tttctttaaaagctaaacatattcttaccatatgatccagcagtcatgttccttggtgtttatccaaatgaactgaaaactttaagtccacataaaaatctgccgatacatgtttgtagcaactttatttgtaattgcccaaacttggaagcaaccaagatgtccttcagtaggttaatggataaacaaactgtggtacatccagacgatgcaatattatctagccataaaaagaaatgagttatcaggccatgaaaagacatgcacagagtctatttaataaaaaaaaaaaaatctacttggagattgaggttacagtgagctatgaccacaccactgtaccccagcctgggtgaacagagtgagactctgtccattaaaaaaaaaaattccttgaactatacaagcaataaaatgaactacagatgtgatgaatattacaaatacagtggtgagtacaagaaatcaagggaaaacatatactatgatgaaattttactatattgtttaatattgtttgaataagaatatattgttgataaaacaagaaaagctaagaaatgattaccggaaggatagtttttatctctgtggaagggagaatcaagaaggaacacttgagagatttctgagggtggtggaagagttttatttcccatcatcatggtggtgtgttatttaagtactcattttctaagtctttaaattgtacatatttttcttcaaatacattcttttaattgaggtgaaaatcacttcacagtcaaataatcattgtcaaatgtacttttctgtgttatttagtgtattcataatgtgcaaccaaaactaacagctctttctagtttcaaaattttttcatcacactccagaaacaccctatactccattaggtaatcattccctaacctccccctaagcaggtcccctcataacttttaatctgctttttctctatatggatgtgcctgtcctgaatgtatcataaaaaggaatcatacaatttgtgaccttttttgtgtggcttctttcgtttaacataatggtctcaagattcatccaagttatagtatatatatttgagttttttttatgactaatatttcattatatgtatgtaactgttcacccacttatcactgatggacatctggtttattttcatatttcgagtattgtaagtaatgctgccataaatgttctatacatctagtttaatgtattgcaata

SEQ ID NO: 274 - DNA, 1285 bp, Homo sapiens
gtgagaacagtcactttatggacattcagccgtacagtcacctggcttgctggcacatatgtaacaattggggttgggaggatccagtgcacaaggcacaagaaacttctttcttggatttgcttgtttattcaaaacaattgttctgcagtggtctatttttcctgataagatcttcaatctttccaatactgtcaacccagcaatcactgcattagtagtagcaatagcaggaataatattccctgccactgatttgatatcaaatctactcttcatattcatactgaaaatatgcatcctgaggtttgtagcagaggtaacaaaatccattgcatatgggtcatccttatcccatgtgagctcagctccatcccccttttctgctaaatgaactctcagagtctcagtgctgtgagctccttaagaaccttgtgctcaccggcttctcccacgtcgacctgattgatctggttactattgatgtcagcaacctcaacagtttttgtttcaaaagaaacatgttggaagatcaaaggcacaggttgccagggaaagtgcactgcagttttacctgaaagctaatatggttgcctaccatgacagcatcatgaaccctgactataatgtggcatatttttgacagtttatattggttatgaatgctttagataacagagctgcccaaaaccgtgttaatagagtgtgcctggcagctgttgttcctcttattgaaagtggaactgctgggtatcttggacaagtaactactatcaaagagggtgtgaccaagtgttacgaatgtcatcctaagccaacccagagaacctctcctgactgtacaatttgtaacacaccttcagaacctatacattgcatcttttgggcaaagtacttaagaagtatctcctgacagagctgaccctgaagctgcctgggaaccaacagaagccaaagccagagctagaacattctaataaagaaggtgacattaaacgtatttccactaaggaatgggctaaatcaactggatataatccagttaaactttttaccaagctttttaaagatgacatcaggtatctgttgataatggacaaactatggcggaaaaggaaacctccagttctgttggactgggctgaagtacaaagtcaaggagaagaaacgaatgcatcagatcaacagaatgaaccccagttaggcctgaaagaccggcaggttctagatgtaaaaagctgtgcatgtcgattttatttatttttgagatggagtgtagctctgt

SEQ ID NO: 275 - DNA, 1232 bp, Homo sapiens
gtgattatatttcctttttaataccttttcctcccttagggccactaaatacctctttgttttgttttgcttagttttctgcatacctattatttatccccaaaagctccagaaggactctgaaacaactctatgtaagcaggtatgcttggttatgtattagtccgcatttcttccccattagaagcatcctttctggggccttacatctttctgctccaatttatatagctgctacacagctttcatcttgagactttgttttactatcatcttgagaactctcttctacattggatcacttgagtcttggatcactccatcttcttgctttacctcctcatgctggtgaatcatatccttcattttcatgctgagaaaagggtgaatgaaataaagttttagagatgatatatgtctgaaaatatgtatattctactatcatacttggagtatagaattcttttaggttggtgcaaaagtaatagcggttttgccattacttttgattgcaaaaactgtgataacttttgtaccaacctaataggttggaaattactttcattaattttgagttgtgtaattattatttagcctcagtattacagtcgagaattctgtgtctcccttgatttttaatatttaatcatgatctgttagatctgctagatctctaaaaacttttaagattttatctttttttccccgggattctgaaatttcacagtagtgtatcttacttgggtatctttcattctttttggtggatattgtgtggcactttcagtttgaaagcttatttgtttcagatccaataaatttccttgagttatttatttgataattttctcatgtccatttttagtgttttctcttggtagttaaacctcttagattgatcctgtgattttcttttgtctatggtttctgtctttttgttctactttctaggaaatttttacaactgaaaaatttacatttgatgtcatatttttaatttttagaagttcatttttgttgtttagtttttgaaaaacaacaccctgtttttctctcatggagataataccatctcttaaaactgagaatatcagttttaaattttcttcttgaattgtctctactacttctgaggtctcttttaagatgtctgcttatcatattgtatatttgggcaaatgtgtggccatccatggctttcttaagaatgagacactaaagtaaccaattta

SEQ ID NO: 276 - DNA, 1136 bp, Homo sapiens
atacagagggtggactgtatatgtaaacaacccatataatataccactatttaaacttctttgaactcctgaactctggtatacctttactcctttgtcattttaaatgaactgtgctacacaaattgaaatcttaaattcgatatacctgttgggcacggtggctcacgcctgtaatcccagcactttgggaggctgaggcaggcagatcacctgaggttgggagttcaagaccagcctgacgaacatggagaaaccccatgtctactaaaaatacagaattagccaggcatggtggcacatgcctgtagtcccagctacttgggaggcttaggcaggagaatcacttgaacccgagaggcggaggttgcggtgagccgagatcatgccattgcactccagcctgggcaacaagagcgaaattctgtctcaaaaaaaaaaaaaaaaaatcaatatgccagcctttcaccagttctcttgttgtcctgaatgataaactacagaaagcacctagaataattagccaagtttggggcacaagcctgtagtcctagctactggggagactgaggcaagattacttgagcccaggagttgaatacagcagtgagctgagaccatgccactgcattccaggctgggcaacagagtgaaaccctttcattaattagctaactaattaatgcacctaggataataccttgtacataatggtattcagtaaacgatagctcttgttattgtttttcttctagctgttttttttattatcacaaagctagatatttgatcaaatatttccatttccttgattcttcaggatattttcatgctatcagccccttccaaacttaattttcttctctatttaccctaaaaccaatgttactctgaagcatttctttactgatactgccacagcatcctttgaccttatctttatacctacctgctgtggaaactcccaatagcaaataatttctattctgcttctctactctatatcctgaatgttgcttctctgctctatatcctgaatgatcacatttactactgcaaattttagttttcaatcttagctaggcttgtaaaagttatcccacattttacatttttatttcattaccagcaacttt

SEQ ID NO: 277 - DNA, 1244 bp, Homo sapiens
ttatttttaaaactacgtatgctattttgcattagcctttactagcaaatagtaaaaaactagtttttttaagtgacaaattttgtttgttcttcgtagattataaactaatggataagaatttttaaattatgacttttggttatacataaagaaattacttgctgtttttgtttttttcaacatctacaggcaaaacatttctcagagctcctcaaatgaatattaatattgccacttggggaaggctagtaagaagagctattcctacagtaaatcattctggcaccttcagccctcaagctcctgtgcctactacagtgccagtggttgatgtacgcatccctcaactagcacctccagctaggtatgtgtctgagattttaagcatctcttatacaaagttattgggacattcttacgtactgattatagcaggtgtactgagtcttgcttttttcccaagtagtattttgaaagtagtgttctgtttacttaaaaagtaaattgtttgctttaattttaaagctgtttaaaatacagactttctattactgttttggtgagttactttatcttctataagtgattctacagtaaccaaattggactttgatcttgagcctgaacctcctccagccccaccacgagcttcttctcttggagaaatagatgaatcttctgaattaagagttttggatataccaggacaggcaagccattttaaaccttgcataattcctcttcactgaatgaattagcaataaaagcatcatagtgaataaggcgtgtctttccatttaaaattgccactgaactgtgaatttatggttttttgtttgttttttgtttttgtttttgttttttgagacagagtttcactcttgttacccaggctggagtgcaatggcatgatctcggctcactgcaacctccgcctcccggattcaagcgattctcctgcaagccattctcctatctcagcctcctgaataactggggttacaggcacatgccaccatgcctggctaatttttgtattttcagtagagatgggatttcattatattggtcaggctggtcttaaactcctgacctcgggtgatcagcccgcctcggccttccaaagtgctgggattacaggcatgagccactgcacccagccgaatttatgtttcttatggtctagtctcagctaaattagactgagttggtaggagacaaccaacttcttaatgttggca

SEQ ID NO: 278 - DNA, 1216 bp, Homo sapiens
tgctaataacaaaattaagcaagataaagagatagggcaatgagagaagggggtgttacatggtcagagaaagcctttcatatacaacagtgtaacttccacctcttttaaggtcttctttatttctatatgttgtcatctgacactgtacccaacacatagaaggtgcttattaaatgtttaaatgaaatttttatttatttaacaaacacttatagaggacttactctatgccaagcagtgttctaagtgccttgcaaatattattttatttgattttcacaagaacgctttgtatactgtttcattttatgaggaaactgaggcaccaggatgttgaggaacttccgcaaggtcacagctaataatgaatgaatcagtttgtaaaggaatttaaaaaataaagattcttaaaggttcttagtgccacctcttgctttcaggaacaccagatagggtgggactccatattttgggatcatgttgggtagggagcatgtcagcccctgaggtccttttgaaaagctcctaatacctctacctcccaggccaggcagataccactcttctccaggcttccatccactcagagctctttcctgctggacccgttggaagcttcgtctgctctgctgacacctggactttcctggggctgaggttaagtgatagctttttctctgtggttgaggaattacagctactagaaaagaatgtatcctcttcatccattctcctacctactatttaaatggcaagtagtgtttttatactgtggtccacggacccccaggattaaaaccaccgtggggctcatttaccatacagattcctgggctccacctcagacccactaaatcaggctttgcagatggggcccaaaaatctctattttaagcttcttaaaaactactgggttagaggatgtgcacttcccgtgtgaggggaaagagatgaagaaaagagttatataagacaggtttgtctccacagagagtgcagagaggttctgtaattctgatggaattctttccctgcctggttagagcagagaggtggcagggtagtgggagatcagatattaagggaaaatccatgtgaaaactccagagtcatttagaataagggttagttaaccgtggtctacaggacagctgcctgtttctgcaataaagtttctttggaacatagccacattcattggtttatgcattgt

SEQ ID NO: 279 - DNA, 1392 bp, Homo sapiens
gtgataatttcctgaaggaaataattttgcaaataattgaatatattataagatgtattctttctcatctgccttgaaaattcatatgcagagggtatatgttggtgatcttttatgttttatctgtttatccttctagatttgttagattttctagtctacaagtaaaaagtgattgaggattgattaattgaccttggctgaagtttggcagattgttaaatttttataaccagagataattccccaaattttgactcctacagacacaatgaagcagtttgtgatatagattattgggagtgcaaaaggatctctctgtgtcacaaataacctacatctaagtagacttcaatttgtgtccctattgaaagccaaaatattgtaaatgttttgtaatttttaatattagggatagattcaaaaaagtttgaatagtttgtgaactttagcaaatgaccttttccaagactagggctgggcttaaataatgacagacaaatcttttcttcttcataaaatagaaaagctgctaagaagcagattttaaagctaagttttactaaactcaattcatatttataatctgactcagatagctttctatctggtctcacgttgaactgcccagccctaatcaaatgtgaacaaaagtagaactgtgcaaaccagtatggtataaatgaattttagttgataaatgtcatctgataatttgtcttttgaattgtctaacattagtaagcttacttttgttttttccctcactgtgcaacttttccaggtttggaccttatgagtcttacgactccaggtcttctctgggtgggcgagatctgtacagatctggctatggttttaatgaacccgaacaaagccgcttcggaggtagttatggtggtcgatttgagagctcctaccggaatagccttgactctttcggaggtagaaaccagggcgggtctagctgggaagcaccttactcccgttcaaaattgaggcctgggtttatggaggacagaggaagagagaattactcttcctacagcagtttttcttcaccccatatgaagcctgcacctgtaggctctcgggggagaggaacgcctgcttatcctgaaagtacgtttggaagcagaaactatgatgcttttggaggaccatcaacaggcagaggccgaggccgaggagtaagtacaacagaatcttttcagattcttttcactagtcactcttttaaaccctttcaagaccatcgttttcaactagaataaacactgttcatcccggtgtattttgaagcaaaagctgagtcataaacataatttttaggttgactgtaaaagtttttctagcacctcagaaaataagtggcagtttgagatgatcata

SEQ ID NO: 280 - DNA, 1180 bp, Homo sapiens
tgccattaaagcaagttaccaaagaaggtgatataattagcagtataattgtcttggggaaaagtattgggctctaggaaggataagtgcaaaggagcatggttggtgttctgaaggaaccggaagaaggccaccgtggctggagagaaacaagtggaaaagtgggagatagagtcagagaagtaatttggagctggtcatgtagggcttctgtgtcattgtaagaaatgtaagatcataggatgtctctaacaaacttagccttcaccctttcttggcctcatactctcatcatgatgctctaaaccttgtctgtcttcatgaaactgcagcctattttttctcagtttcaatattcctactctctgaactaccacttcttatccttctgattttactgtctcttaaaccctgactccagtaattcttcaacctcaccagggcctaacagtccattgatgttaccaccttttcactgactctcagctgccatccaccccctccatgttttcccttagttccttacccaaattatattcgtcggtctgtcatcaagatcactctcttataatcactcttcccttgtctgtctcactttctgtgctctcttggcaaaatcccaaccccagttaaaccattctccacacttactttcctccatcttaaaacaaaaaaccttttttttgacccctgccttctccagctatcagtcatttctgtttttccttttaaagcaaaacttcttgcgataaccagatagcattatgatacagagataaaatttataattataggtaatatttattgagcacttgctatgtgtcagacatcattctaaatattttacatatattaatctttattctcacagcagtccagtgaagtagaaaatagcatttttacaatgagaaaaatgaggcataaagaccaactttctcagtaactgatcaatagtaagcgaaattaaaaatccaggtggtctggcatcagagcctatgccctttactattaggatctcaagcaaaatgtgttttaaatgtcagttctcctgcaggcagctagcagtacactccagctcccaagagcgagtataccctactgcagttctcattccttatgaggagcagggctaataggtcctggctgttgggcattgtgtttgttataaggtggagttttt

SEQ ID NO: 281 - DNA, 1523 bp, Homo sapiens
cttacatttaccagcttattataaagggtacaactccaaatgaaagagatacatatggcaaaatatgagggagggggtgcagagttcccataacttctctgagcatgacactctgtcagcaccttgatgtgttcaccattccagaagctctcagaaccctgttgtttaggcattttaatggaggttctatttcttttttttgtttgtttgttttaaaaatcttttttttttttttttaattttttttttttaattatactctaagttttagggtacatgtgcacattgtgcaggttagttacatatgtatacatgtgccatgctggtgcactgcacccactaacgtgtcatctagcattaggtatatctcccaatgctatccctcccccctcccccgaccccaccacagtccccagagtgtgatattccccttcctgtgtccatgtgatctcattgttcaattcccacctatgagtgagaatatgcggtgtttggttttttgttcttgcgatagtttactgagaatgatggtttccaatttcatccatgtccctacaaaggacatgaactcatcatttccggggacagtgccaggtggggagtttgactggggctgtacacctgtcaaacggtaacgcaggtgtcctaaggcgagctcagggaggacagaaacctcccgtggagcagaagggcaaaagctcgcttgatcttgattttcagtacgaatacagaccgtgaaagcggggcctcacgatccttctgaccttttgggttttaagcaggaggtgtcagaaaagttaccacagggataactggcttgtggcggccaagcgttcatagcgacgtcgctttttgatccttcgatgtcggctcttcctatcattgtgaagcagaattcaccaagcgttggattgttcacccactaatagggaacgtgagctggaggttctatttcatagacaagactgatgaaatcactggccattgctaattaaacttgatcttcagcccctgaatggataagtcatctccattacttattctataagatgtgaatgttttattaggaaccttaacggttacttcatcccttagggatattgtgaacaagttacttcgatagattgtcttttgatcaaatataatacagtacagtcataaagtgtttccttgtttttagaactttgcagagaagtagttcttacattgaaatggttattggatatagtgtttgggatgatttaatctgctaatatacttagtttatatcttttcctttttggggggatacacaatgctgatttgattggctaggaaaactgtcttatctggtagcttctgtggcgtgaaatgcagttgctgacaacttttaattcataacaagtctgttaacttattcctataaattgaatatgttaatataattcagtaacttgaatcacttcagttaaatttaaatactattaggtgttatgaaatttactatttactgtgactatatttagtggctttttctctctctt

SEQ ID NO: 282 - DNA, 1217 bp, Homo sapiens
aggtgcaccttgattttcttctgtagttctgaaaattctctataaaaccaaagatttaaaatgtcaaaaacagggccgggcgtggtggctcacgcctgtaatcccagcactttgggaggctgaggtgggcagatcacgaggtcaggagttcaagaccagcctggccaacatggtgaaaccccatctctactaaaaatacaaaaattagccaggcgtagtggcgcatgtctgtaatcccagctacttgggaggctgaggcaggagaatcgcttgaacccaggaggcggaggttgcagtgagccaagactgcgccactgtgctccagcttggcgacagagagagactctatctcaaaaaaaaaaaaaaaaagccaataacaaatatgtcatttgcaaaagtatttgctataaaaatctttattagatagtcactgccctcagtctagtttgcttgagtgctattttgcatcttttaagataaatttcttacattacgcttttcagaaattctctgtttaattttagtgtctgtttgtttatgaagtttcttcattaagttttcttattgaaatttgttttacaggcagtttgaaaattgcaaggagggactttaagactacttctgatttgcaaagattgtctgtgctctgagcaggctgaagtgactggacgagacgcactgttggagaaataaaaatgacttcccattatgtgattgccatctttgccctgatgagctcctgtttagccactgcaggtaagttgcataatataaattgcatatttgttatatatttttggatatattttgtcccagtctctttagttgagatgaagtttcactctgttacccaggctggagtgcagaggcataatcatggcttactgtaggctctacctcctgggcttaagcgatcctcccacctcagcctcctaactagttgggactacaggcgtgtgccaccatgcccagctaatgttttattttttgtagagatagggtttcctatgttgctcaggctggtttcaaactcctgacctcaagtgatcctctcttcttggcctcctagcatgctggtattacaggtatgtgccactgtgcctgacctgtatttacatttttgtccctgaataaggatttcaagaaagcatttttgtcctttattagcaaataaatagatcttctagattgaggtgacactcttgacataggctgct

SEQ ID NO: 283 - DNA, 1118 bp, Homo sapiens
caaaaggactcctaccagtacctatttttgagcacttaagtgtgctaagagggtaattagtcagatgaaaagcagacacacagtcagaaatatgaacaggaagattaagaagagaatcacattcaaatacaaagacaacaaagtgattcataattgagtaataatccatttcttttcttgctattttgggttactgtcaactgacttattctcttcgtaagccctccttcctcaccctactatttcatgcctcttgtatctccttggttaagtttcaggcaccttctcttactcttgaatttcatataacttttcttgaatattatagtacaaacatgctcccatctttactggtaaaaccaacttagtttttataccaaatattatctatttaatagatatttaatagagtatctttaaataattattagttgtttcgaattacaataatttattctaatacatatccaataatcatgttatcccttaccttctgtcctgtgtactcatatcctttcccatccatctgtttactcatctttttttctaaaaagtttgtaattatagtatgtagaatgaaagctgggacaagggaaacaatgagatggcaaaggccacaggtaaatatcaggaattttaaaattgaattgcttagtctgtgtgagtgtgcttttcatttaggaaaaaactgtatcttgtataataaatacacatacacaaaattctatataatccatattttgggtgctcatttaagttttggttttttttcaatacttttaagttctgggatacatgtgcagaacgtgcaggtttgttacataggtatacacgtgccatggtggtttgctgtacccatcaactcaccatctatattaggtatttctcctaatacccctcccctagcccccgaaccctgacaggccccggtgtgtgatgttccccatcctgtgtccatgtgttcaaattgttcaactcctacttatgagtgagaacatgtggtgtttggttttctgttcctgtgttagtttgctgagaatgatggtttccagcttcatccgtgtccctgcaaaggacatgaactcatccttttttatggctgcacagtattccatgat

SEQ ID NO: 284 - DNA, 1200 bp, Homo sapiens
ggtcttgaactcctggcctcaagtggtcctcctgcctcagcctcccaaagtgtggggattacaggtgcgagctactgctcccagcaagagccaagattttaacctagatctccctaacaccaaagcttttgaaagggttcagctgaagaatttctcaattctctgttttgttttgtttttatttttgttttttgagatgaagtctcactgcactcaggctggagtgcagtggtacgatcttggctcactgcaacctccacctcccgggttcaagcgattctcctgcctcagctcccaagtagctgggactacaggtgcacgccaccacaactggctaatttttgtatttttagtagagatggggtttcgctatgttggccaggctgatctcaaacttctgacctcaggtgatccacccactttgacctcccaaagtgctgggattactagacgtaagccaccacacctggcaattccctgcttttttgacaacataatttaaatgaatttgatttaaatgtttcctgaatatatatacagatagatagatgagtatcaacacttacaagctctacacagtctgtgagtgtagatactacttactcgtaggattgtcttgtgctttggggatttttgttcggagttctatactatcagcccagaaagctatcaatgtccaagtgaagtgagatgatgcatggccacattattgctttgaccctcacatcaagaaatctgaatgatctggaccaggggtcagcaaagtgcagcctacaagctattgcagtcagctgccagtttttacttttttaaatagttgggaaaaaaattccaaagactgatattttgtgtcacatgaaaattatatgaaattcaaattgcagtgtccataagtaaagttttattggggcacacccatgctcacccttttaaatattgtgtatggccgctttgtgctacagtagcagagttgagtcattgcaagggagaccatatggcccaggtagcctaaaatatttatctgatcctttacagaaaaagtttgctaacccttgataacagatactctaaaatgcaggtttttcttcttcaatttagctcagtggtaggtcaaattgtttgcttttgctattaagcttatgatttggaaacgtaaaatttcatggtggatattataatcagaactattcaaaagggaaa

SEQ ID NO: 285 - DNA, 1483 bp, Homo sapiens
accttggagtactttagtcattttgaacatcagctctttctttttttttttttttttttttaagagacaggacaggagagtctctctctctctttttttttttttaagagacccttgctcaggctggagtgcaatggtacagtcatacatagctcactgaagccttgaactcctgaggtcaagttatcttcctgcctcagcaattcttgttatacgtaatatagactaaagcgcctgctctagaaatttatcttcaaaaatgaaacaaaatagaacaaaggttgtgattttagtttatctaaaatgtggagtttccttcctcttgccaccagatcagagaaaaaattttgtaatgatataagttgattgagattttttatggcattttgcgtaggaatatatattgcacaactaggcagttatccacatttattatccctgaactttgaattataattttacatatgatgaggctggctaaactttaatggtattttttattttagaaacctagtaaatacatatttacatttgtaattacttgctgtaatcttacattgaatcagttgtattctgtttcgtgtattgtgtcccccccccctttttttaataaaggaagcactgtgactgtttttattttaaagactttttttttttttttaagagcagatttaggttgtccccttctgccacacatgcattgcctcctccattatcaacatccctccaccataatggtagatagttataattgatgaagctacatcaatacatcattatcatccaaagctgtgacttcttttagtaataaaaagaagtttcaaaaatattacacttttggagataatatcctgtcatactgaaaagccaaaatgtaacattcatgtatcatatttttttcttagttgaatacggtataggattgttatgaagagaagataaaacttttgaatcattttagaagataatggtagtattacattgtttccttatgtagtttttgtacttcttttggcttggtacctaatgattatcatatagattgagtgtagctgtttgaggaactactatgttttggattattttctttgagatagtaaaaatacttaacatttgaaaccatgataaactttcttaaggtttttatgtaaaatgaagtctcatctgttgtatcagattgttttggggagtttaaaatgagatattagtactttttgtaatcgcttattgtcatttgtgtttgattcttaaagttatttgaaatcctagttctgtaataaccactcttctgtggtcttaaattttagaaaccctgaggttgataccagaataatttatggagtgctacttcacttctgagggaggtagggagaaaagcaaagatgaaactcaagaaatactgtggtagaaatgatactagaggaaaatatacaatagaggtggaataatatttataagtggaaattataagaaatctgaacaa

SEQ ID NO: 286 - DNA, 1388 bp, Homo sapiens
agactacaaaagcccaacttttctctatttacatatgcatctctcctataatgtaaatagaataatagctttgaaatacaattaggtttttgagatttttataaccaaatacatttcagtgtaacatattagcagaaagcattagtctttgtactttgcttacattcccaaaagctgacattttcacgattcttaaaaacacaaagttacacttactaaaattaggacatgttttctctttgaaatgaagaatatagtttaaaagcttcctcctccatagggacacattttctctaacccttaactaaagtgtaggattttaaaattaaatgtgaggtaaaataagtttatttttaatagtatctgtcaagttaatatctgtcaacagttaataatcatgttatgttaattttaacatgattgctgacttggataattcattattaccagcagttatgaaggaaatattgctaaaatgatctgggcctaccataaataaatatctccttttctgagctctaagaattatcagaaacaggaaagaatttagaaaaacttgagaaaacctaatccaaaataaaattcacttaagtagaactataaataaatatctagaatctgactggctcatcatgacatcctactcataacataaatcaaaggagatgattaatttccagttagctggaagaaactttggctgtaggtttttattttctacaagaattctggtttgaattatttttgtaagcaggtacattttataaaatgtaagccctactgtaaggtttagcactgggtgtacatatttattaaaaatttttattataacaacttttattaaaatggcctttctgaacactttatttattgatgttgaagtaaggattagaaacatagactcccaagttttaaacacctaaatgtgaataacccatatatacaacaaagtttctgccatctagctttttgaagtctatgggggtcttactcaagtactagtaatttaacttcatcatgaatgaactataatttttaagttatgcccatttataacgttgtttatgactacattgtgagttagaaacaaacttaaaatttggggtatagaacccctcaacaggttagtaatgctggaattcttgatgagcaataatgataaccagagagtgatttcatttacactcatagtagtataaaaagagatacatttccctcttaggcccctgggagaagagcagcttagatttccctactggcaaggtttttaaaaatgaggtaaatgccgtatatgatcaattaccttaattggccaagaaaatgcttcaggtgtctaggggtatcctctgcaacacttgcagaacaaaggtcaataagatccttgccta

SEQ ID NO: 287 - DNA, 1178 bp, Homo sapiens
gggcacagtggacgaccttccaaatcaaagcaagtaactaggggttgacaatggtaagtatcatagttgaagtatccttgaacaaggtttcaggaagaagaagaagggaatttcatgcagggaaacagccaaagctcagtgagtcaaaatatcacagcattcttggtaagcccaattgttttttctgttttgctattttggtggagagaaaggaacacataaaggaataacatgagagaaggctatttggggaagtgtagtagttaaggttctggctcaaacaacaactgcagctcataaagttgactttagtggaaggatactggggtatctcatggaatcttgggaactgttgaataaccagggaaactctgggaaactcactggtaggaatccataaactgtcctcctggtgggctgtaaacaactcaccctctatgcatctcacatcaaaattccagtttcttgggaaaacaagtctgtttgcccaatttgggtcatatttccacgtccatgttactcaggcatgattcatctgcaagttatgtgtatagatattttgctactgttccacccttacgctgtgctggggagggaggtgtcactgtgagctgtgtcggtgccttaagagatatctgttgtgtcttattacttggttgcttttccccacatgtacaatgacaaaaatgccttcaacctatttgatccagccgttccagtacaactcctatacttgccatctttccaagcccaaaggtacatccagctgatggaaggagcatcttggtgttaatattcttttagtcatggtctctgaaagtaaaatgtctattcttctaattctggcacaatcttatctagctatagttcctcatggtcctgcactccatggactaaattgtaagtataattactaccaatgtactctataaataacttttggggccagggtggcaatagttgctagagagaaaaaaaaaaaaaaggaaggagaagaaaacagtgatagttcttattttaaaaggaaaaaaagaggcaggaggctctcttgaggccaggagtttaagaccagcctaggcagcatttcaagaccctgtctctactaaaaagtaaaaaaaaaatttagtcaggcatggtggcatgcacctgtagtcgtagctactcaggagactgaggtg

SEQ ID NO: 288 - DNA, 1214 bp, Homo sapiens
tttttctccagacgacgcagaaacaggcacacggggttctgctttccccacctcccacccccaagcccaggtcccattcttctcactttcaatcctcatttgggctcctaaaggaatagcaaagagagttattttatcaataccagcgctcctctgtccccaaatccagctagggaaggtttcggaggcctcagctacttgagagagggtagagacgatccttcctcgcctatctacccagccacccaccccttcccagatgtagcgtccgggccccagaccaagcgcgtgcttggagctctccggtacagtgaggcgcgcgcttgcctggctagggtccctgtgaaggaatgggatcccgaggtgcttgccaggaccgtagcaggcggaagctgctggcagcgcgaacgggcggctcccgccggcgtgggtgggggaagggcggcagccacacccggaagtcggtccgggagggagggggaaatctgagggaacgaggcttccggtggcgcaaagggtgtcgggagcggcttcctgcaaaccttccctggcatctggagggaccaccgttgccgcgtcttcggcttccacgatctgcgttcgggctacgcggccacggcggcagccactgcgactcccactgtgcctggctctgtccatattagttcccaggcggccgtcgccgttccagcagcggcagcggcagcggcagcggcggacatgttgtgaggcggcggcgcgggtgtctgaaggatggtttggccgaggcggcggcaacggctgctggcggcggcggcagcggcagcggggcctcgggctctatagagccgagcccgctgggtacccgcccggtaccgcggcgaggccagtgcccctggatcttgcctctgctccgacgccgttggggaccagttaggcgacagcgcccgcccctctgaggagacacgaaggtggttccccagccgctcaaatttccggaccaccgcgctttcccctcctcagcctgggctgtgctctctctagaatcctcgggcccccactttcttcccaaactcatcctaaatctctcacacacgcgagtgttcccagccctcaagccagctgctcctccgttcattttctgcaccctcttcgcaaagcaccccccgggatcactctccgagggcgactttttgagaaatctcggtggagtagtggaccagagctggggagtt

SEQ ID NO: 289 - DNA, 1227 bp, Homo sapiens
gtccagccgcggctgggtcgggcgcggcggccgggcgcgagggaagagcccaggcccgagaggggtcgccgcttacgtctcgcagcccgaggggaggccgctcggcctcggccgctcacaggcgcgacgtaaaggcccggcgtcaccggcccggcttaacggtgcaacggctggcctgggcctgcaactctggggtcccggccgggctggagcggccgccggagagacctggtaggcggggcgcttggggcaggaagggagccggggagggaaaagcgcgactgtgattcgtacggctgggcccggaccgtgaaggggaccgggttgcggctgccctcacaccgaccaggtgggaccgtcggactgcggccgcccttggctcaactgggtcgccgaccttgttgaggggcgaccactgcggggagaccgagagcctgcggctggcgtttgaggcggatggcagtgccctgagcgcggcggctgggtctcggtgacactgacgacgggaggcgcggtcggaagagcgcggggccgtcgcctctggcttaacatagcagatgcgctgagactccaacaggtggctccgtggcgcaatggatagcgcattggacttctagaggctgaaggcattcaaaggttccgggttcgagtcccggcggagtcgtaacgcttttttccctcccccctacaatttattttctgcctccatcatgtctcttattttttttttttgctaaacggtttaacttctctctcattccctgctctcgcagttcactgcattcggttcttgcggtcctttcttaagcggctcgcagggtcccgagcccctcagctccccgggcctcggtggcccagggcccagctcagccgactgggcagtcgatgtaggtcctgagaagagcggcggcggcggcggcggcggcggcgaaggaaaagcgacactgaagcgaaggctcgcggtttcggcctaaaggaaagtgcaggggaggcccgggtctcgggtgacacccccacgccttgagcgggactgtggttgcgagggagggacgagaaaacacgcctacgccctgcgtgcgctgtgctgactacctctccagcatggaggcttccagatgagcagacacccgaatcccagcgggagcccgtcaaaaatggagatttctgccgtcactctgggactcttaattcggtccgtctggggtggggcccaggaatctgcatttc

SEQ ID NO: 290 - DNA, 1210 bp, Homo sapiens
tataatgatgaaagtatagtatagtaaatacataaacaagtaacatagtcatttattattattatcaagcattaagtactgtacctaattgttttatatgactggcagtgcagcagtagtttcatcaccacatacatgtgagtaatgtgttgtactgcggtatgatgtcagctacagagtcactaggtgataggaatttttcagctccattataatcttatgggaccactgttgtgtatgcatttttcactgaaatgttatgcagtacatgagtgtaatacaatcatggtgcaatactctaagagttaaggcaccttttattgtagattataccacagacagaaaactgcataaatacataaataatgcaatgacatcttttacaaaacaaaacacccttttaaccactacccagatcaagaaataaatctttgccagccactgcagaagccttccacatggcccttcccagtcacagcccctttcctctcacctaaaagtaattgctatcctgacttctgtataatcgcatctttgtgtttcctataatttcatcacccaaatgtgcattcctgaaaactataatttagttgtgtttgtggttttttttttatctatgtctcttaacctacatatccccctgccacctccctttccctttctttcttacagtttattccctgaagcagccagttattttgacctgtacagattctgtagtctagattatgctgattgcatactttttcttcatcctttgtatttcccataaattggtagttggatctaaaaccttgatcaaatttaggttttgctttgagttttgttttttttccacttcctaggagttagtgtggtatattcaccatcaggagatatataaagccaggcatggtggttctcacctgtaatcccagcactttgggaggcccaggcaggaggataacttgagcccaggagtttgagaccagtctgggcaacgtaatgagaccctgtgtctataaaaagtaaaaaacattagggaggtgtggtggtacatgcctgtaattccagctactgaggtgggaggatcacttcagcctaggagattgagtctgcagtgaactgtgatggcaccatgcattccagcctgggcaacagagcaagattctgtcttgcaaaaaagagagttatagtgtctagttttctctctttttgtgattttagcagc

SEQ ID NO: 291 - DNA, 1372 bp, Homo sapiens
ttttcagtatggtccttctcatggagaagcctcaagccacagctccagtagaaatcacattctggggtaaggaagggaagagtcagtgaagaaatggagggagcagatttagaaaaccgtgtttaaggccaggtggcagtggctcatctctgaaatcccagcatttcgggaagccaaggcaggtggatcacttgagcccaggagtttgagacccacctgggcaacatggtgaaaccccatctctactaaaaatacaaaaattagccaggcatggtgatgtgtgcctgtagtcccgaggattgcttgagccaaagatgtcaaggctgattgagcagtgatcctgccactgcactccagcctgggcgatggagtgagatcctgtctcaaaaaactagaaagaaagaaaccagtggaaggaagctgagaagggggcagtccttaacaagtagatagctgggttgagagaagcaaaagcgaatttatagggtttctaaaggcaggggccaggaaagctgaagaggtgagagttctgggggtggaaggggctggcaggagctgagggagtgaagtgctcattctggacatgaggaaggaagacagaccacctctccctttgaaactcctcctgccactttctctttctcatgatagctgtccttcctctcctcattcccatattcatttattctcactctctctctctttctctgtgtgtgtgtgtgtacgttgtttcttctctctccttgccttattcctgcttgaaacaattgggaatacctcactaattttatctattgtcgttcaggttcaaagacattgctgattctctaaatttggtgttaacaataaaacacagtgttttgacagcagccacaggacttggcagtcccaaaagggaattctggaagagaggagaggcctcagtcagggttgtctttttctggagttcataaccttcacaagacttttatgcaattatttttgtgtgtgtatgtactcacctacatttttagggaataggattctactacatttatttattgtcaaagggaaggaggatcagaaaggttccaggccccactgccttttataatacctctatcaaatacaggtgctcagttttagcttctttatgataatttgtgttcttgatttcgataaggatacagcttaaaagcttttattcgtaagaagtagggttaacatcaagaatctcaactcagcaatcttttgaaatgcagaatgactcacattccagtgtcacattccagtctttgttgcttatcaaaaaccttagataatttaagatggtatcaaaatactaatgcagtttaattcctttgtaaacagtgttcactctgaaacgtcccta

SEQ ID NO: 292 - DNA, 1227 bp, Homo sapiens
ctccacagctaacattgctccattctgaaactacacctactcatcagaaaaggcatttcttaagatatatacccaagtagggggtgacttggagaggggacaacagcaacaacatttttgaagttggaaaacaaatgaacaattggtaaaggagtttgcagacctgaagaagaatggaatcataaactagcaacagagaaagctaaaatccaacatgttttgtgttgcagaatcctccaaaagcctcaatctctgtagaaacaaggaagaggcgaaggagactctgaggaagaggattgattttaaaaagtctagtagtcggagccccttcccaacctcacacagctgggcatctgctcctctgtcagtacaatgaaagaataaagtcatattccctggagttaataaagcagagggtctccgtacagggagtgagtgttaaggtcaggggttctatacactgaacttagaaagcgtacgtgcgtatttacctggcaggggagacacccttatcacaaaggtggttttcccagggtgaggcttaaatgctgcatttcagatatgttgaccctatgatttaaccacatttgggaaattcgtctgcataatttgtggtagtgggagactgcgtttgcttctcccctggttaaaaaaaaaagaaaaaagaaagcctatgtgaatgtctgcatatgatccttgaaatcggggatccaattacttttgtgattcccagaacacaggcaatcaggctttcagcctaagtagaggactggggaatggattgcccccaaagagacaaagaatacaacatttgaggttctttaaataaatggctttgccagatctcctgcagtaaatacttcagtcagctaatctcacaccatgaacttccaaccagcctttaaaaaaaatcgttcttaaatatgagccatcaaggatcagacagtggaaaattataaaatgaagtccaaaacaatcaaaagtgaacactacttggagaacagataacgaaaagagagaagttgaaaagaaaaacacatcactatgattcataatcattagcaatataaggaaactactattactacgaaacaagaacagaggacttgtttttaaggaacacagaggaaacatgagccttgaaaagtaaaattataatagaaaaaatgtttaaattcaacagaagagttgaaagaaaggtgagaaaatctcctgaagatagaaaaa

SEQ ID NO: 293 - DNA, 1321 bp, Homo sapiens
taaataaataaataaataaaacaattggaatgtaaaagaaatctgtaatcccagcactttgacaggctgagacaggatgatcacttgaggccagaagttcaatttctgcctgggcaacatagcaagactccacttctttaaaaaaagaaaaaaaagaaagaaaatatattatttgtggtccttatatgctcgtttcaaaaaagggcatattaggaccacaaaaacatgagaaacctaattaaacagacatgtaggcccagaccaagttaaagtcaaaaacaacttttttgaaaggactagataaattagtaaaactcgacaaggctgaacaatgggaaataaaagaaagcagaaattggaaaaaggggacagaagacaaaatagggacagaaataaaatttttctataggcattaaaaagataaaaaaactattaaaaattgtatctaataaattatgtaatttatgtgaaatgaacaagttagctttttcacaacgggtttgctgccagaacacaggtgtcgtgaaaactacccctaaaagccaaaatgggaaaagaaaagactcatatcaacattgtcgtcattggacacgtagattcgggcaagtccaccacttctggccatctgatctacaaatgcggtggcatcgacaaaagaacaattgaaaaattgcagaaagaggctgctgagatgggaaagggctccttcaagtatgcctgagtcttggataaactgaaagctgagcgtgaacgtggtatcaccattgatatctccttgtggaaatttgagaccagcaagtactatgtgactatcattgatgccccaggacacagagacttcatcaaaaacatgattacagggacatctcaggctggttgtgctgtcctaattgttgctgctggtgttggtgaatttgaagctggtatctccaagaatgggcagacccgagagcatgcccttctggcatatacactgggtgtgaaacaactaattgttgatgttaacaaaatggattccactgagccaccctacagccagaagagatatgaggaaattgttaaggaaatcagcacttacattaagaaaattggctacaaccccaacacagtagcatttgtgccaatttctggttagaatggtgacaacatgctggagccaagtgctaacatgccttggttcaagggatggaaagtcacccataaggatggcaatgccagtggaaccatgctgcttgaggctctggactgcatcctaccaccaactcgtccaactgacaagcccttgcgcctgcctctccaggatgtctacaaaattggtggt

SEQ ID NO: 294 - DNA, 1242 bp, Homo sapiens
aataaccccacagagaaggctgaatcctaagaatatcagggtcagcaaagcagttgactcaagacaggctgacttgacgatgcataaaaagattttgtcctccaaatcgtgactcttaattcccaataaatgtaattttgatttgggattcagaaggtgctgtaccaaggtatgcccaagagttttggaagtaactagtggcaaaatgaaagcttgtctatccaatccctttctgcaaaaattttagatttctgtggaattttcaagccacatggacttcactggggataatgaaacagcagtgctcatatttaagcatagctgtgaaaaatgcttgaggggcatgttgcagtgtcaagttttagaggttgggtcaattgagggtctgtccttgctctgtctcttgctacttgttactgtttttgcacctgtaaaatggtgtgagaatgcgtgtctcatgaaactgttgtgaggatataagggaatacatttcacaatggtctccaggtgcagagggagtaaggataatgtcatttatgccttctgaccatggggcatattttaaaagaatatacacagagtaggaagttcttactcaatttttttctctgtagataaaaaagaagaaaaaaacctctttgtctggaaattatcttaaaagccatatttcttttttttttttttgcactgtcaatggaaatagaaactaggtggcctaatgtgacattctgtcactgaaatcatatagaaagcataaagcttgctctactgaagaaatttagagagattaagatgccacctccctccttgtgatacttgcttatgagagtgttgttctagagcatttgatttccaaatatggtctcttgaaacctgcctcaggatcatctgaggtgtttgttaaaaatgtagactcagggtctaatcccaaatggactaaattgaaacatccaatacggggccccagaacctgcattttaaacacacccccagatgatacatatgtaatctgaagctgaagaatctcaacctagtgcagcaatctccaaatatttgaccagccaccaatttgtaaaggttttgatatcctccacgtatgtggtgtatattcaattaccaattgtaaacattgtcatgaataaaattttagaaatctagtaaaggttagaaatataaatatgattacaaattaaacattttatttcttcctttataatggtcttataaacagtctgggatgta

SEQ ID NO: 295 - DNA, 1217 bp, Homo sapiens
cttttatttccttatcccgacctttcagcattcattcttgctcatacctgccaatctcatctatatgttagtagaaataaagattaaatggttactggcccccaccatgataagctgaaaagtagattgcaataaactctgagggtcctccctccactccacttcaatttatttaacaacagctactctttatggagcactattctgagaatgacaattctctgagggaagtctaattagcctcattttgtacataaggacactaaatcatagaaagctataaatctggcaacagtcatgccaggagtcacacataggtctttctgactccagacccttcccaccagacctcacactgcttattcttgattcattccatgaacattattgagaacttgccatatgtaagtctttgagtcttacagagaagattccatataaactcccacccaaaaaaaaaaaaaatttgtttttctctctttaaatcccttaacttttcaaaatgcatttacatttattatctcacttcaaatggtattcagtgccttgaaatacaaatatgacaccattagcagagttgtcataaatctttggctgtgctgacatgagtaaagacaaaacaaaggagcaactgaacaatccagaaagtgggaggtgaattagtttcagtgacccgttctccaagccttggtcataaaggatgaatgttcaagagcagcgactcattgtaatagagaaaggatctgtgctgcctgccaccaggcctagacttctgcattctgcaggagagtttcccgtgactaattttaccagctcaaaaaacttccacacccacccccttgcgatgcatcttttgtctgccataaggcaaatgtcacttcgtccatttagaccacccaaggttatctgattcttgttggttattctatgttttattaggattggaatttatatttgttgatcttcaaacaatagagtcctgttccttggtatcaaatatgaacagttaacatcaagaaacaaagcaaaaatgaagtagataaaaaatagaaaatatagtgactgctgtataatatagtcagggataaatgttaagggttaccaaggcacaaagccaggaattatttctgaaaggaaagagtcactatctacatcattgaatactttttgccatttcattatataattacaagtagtttattcatagaaatgttttt

SEQ ID NO: 296 - DNA, 1184 bp, Homo sapiens
tgtgttcacattttgtgctgaaagtaatgatgtaatattttcgcataggctgttttgccagttgttattcccagaattttatagagaatgtgatagtatctcttttctcctaaaaagggaatgccttttataattatggctttaataaagagaagagcaattagcttgtaattcataagttaatactaaaaggtatgtagtttctccttatgagtaaaagtatttgtgtaaaaatcctaattactttattcttcctcagaattccatcatccctggccctcccttcctatttggagcctgttcagtactgctggctctgcttgttgccttgtttattccggaacataccaatttaagcttaaggtccagcagttggagaaagcactgtggcagtcacagccatcctcataatacacaagcgccaggagaggccaaagaacctttactccaggacacaaatgtgtgacgactgaaatcaggaagatttttctatcagcacccaggtcttagttttcacctctagttctggatgtacattccatttccatccacagtgtactttaagattgtcttaagaaatgtatctgcatgaactccgtgggaactaaaggaagtgggaacttagaaccagacagttttccaaagatgttacaatttcttttgaaaaaccttttgtttattagcaccaatttcttgccactaagctatttgttttattatacatcctttaattaaaaactatatatgtaacttcttagatattagcaaatgtctctgctaccatttccttaaggtgttgagctttaactctatgctgactcagtgagacacagtaggtagtatggttgtggacctatttgttttaacattgtaaaattttgagtcagattttaatattgtaaaatcttgggtcaaataattcaaagccttaatgcagatgcactaaaacaaagaaatggtaaatgaattgtttgcatttaaaaaaaaaaactcttaagaaaactgtactaaatctgaatcatgttttgagcttgtttgcagtacttttaaacattattcactactgtttttgaagtgagaaagtatcagccatttagcatttaagttggggtatttagagcctgtaatctaaatgctggctcaaatttattccccagctacttcttataccactattcttttaa

SEQ ID NO: 297 - DNA, 1195 bp, Homo sapiens
tgcaactctgcctttttagcagaaactaaggaatatagttttaaattagtatcttctgcatttatgtaggaatgttcactggttctgtaaacagctaattttctattgtttctcattggtgctgccttttttttctagctgagttgccatatgtttaaccattgaaaatttaataaaagctaaaccaccatgtttgtttaaacttattgtttaatatatttattctgtattacatcatgtttctgaagtagggctcatgtgtacatattccgcattcatcctacagtgttctatttggcctttagaaccaaatttagaaataaatttaaaatgcaaaaagcctcagatgttaagagttccgcctcctttgggatattaagacagccccaaatacagagtttaattgcaacatgacataaagtactggcttactgatgagttgtattgaatgatctgcatttgggtggttgccaacatatgcaccagtcccaaacaaagagtgtgtgtgtgtgtgtgtgtgtgtgtgtgtgtgtgtgtgtgttagaatggtcacctgctgtctctttatcttgatattggacttatatctgtaggaagagttttatggaagaaaattggttgttgctgatagagaagaagtggaacaagaagcagataatattttaaaggatgctgatatcagtgatgttgcattccttgtggttggtgatccatttgggtaagtcaaggcagatattttgagtttttaactcatttacttttttttaatcagtaagaattattctattgcatttaacacttttacctgccaggtcctgataaggaactctggttacttaagcgctatctaaaatgtcatagtttaaactttcatgatctttgagattagtgaagaaaagctagttggtaaatatatcatcatatgtatcactacattatcaagtgtcaactctaaagtttgtatcattgcttctgctgttttagaaggtcatgtagggcaacaaatgccttaactgctatatcattattaaatagttcattacattatcaaaagtcatgcctgccattttctgctgataatttcaggcatcttcgacttcttttgtcctaggttttttttccttttgtaatcatctactatttggcaatactgccgtcactttgcttgccttgaatttatcatttatcaagtctc

SEQ ID NO: 298 - DNA, 1414 bp, Homo sapiens
tggttatggccttcaaatatagtgaaccattaagaaccatttagaagcataaatggacagatgaaagggacatgataatcaatttatgagaaccgtgatttaggcctgaataatatgcaaaacaagcctttaaaagttactggcgcttttccttgctacctgcagaggggtccatacggcgttgttctggattcccgtcgtaacttaaagggaaactttcacaatgtccggagcccttgatgtcctgcaaatgaaggaggatgtccttaagttccttgcagcaggaacccacttaggtggcaccaatcttgacttccagatggaacagtacatctataaaaggaaaagtgatggcatctatatcataaatctgaagaggacctgggagaagcttctgctggcaggtcgtgctattgttgccattgaaaaccctgctgatgtcagtgttatatcctccaggaatactggccagagggctgtgctgaaatttgctgctgccactggagccactccaattgctggccgcttcactcctggaaccttcactaaccggatccaggcagccttccgggagccacggcttgttgtggttactgaccccagggctgaccaccagcctctcacagaggcatcttatgttaacctacctaccattgcgctgtgtaacacagattctcctctgtgctatgtggacattgccatcccatgcaacaacaagggaactcactcagtgggtttgatgtggtggatgctggctcgggaagttctgcgcatgtgtggcaccatttcccgtgaacacccatgggaggtcatgcctgatctgtacttcgacagagatcctgaagagattgaaaaagaagagcaggctgctgctgagaaggcagtgaccaaggaggaatttcagggtgaatggactgctccagctcctgagttcactgctactcagcctgaggttgcagactggtctgaaggtgtacaggtgccctctgtgcctattcagcaattccctactgaagactggagcgctcagcctgccacggaagactggtctgcagctcccactgctcaggccactgaatgggtaggagcaaccactgactggtcttaagctgttcttgcataggctcttaagcagcatggaaaaatggttgatggaaaataaacatcagtttctaaaaaaaaaaaaagttactggcaattttttttctgtatttcaaaaaaaaaaaaaaaaagaacacgggatacatgtgcagaaatacatgtgcagaaagtgcaggtttgttccataggtatacatgtgccatggtggtttgctgcaactattgacccgtcctctaagttcccccacctcaccctccacctcccaacaggccttgatgtatattgttcccctccctttgtccatgtgttctca

SEQ ID NO: 299 - DNA, 1180 bp, Homo sapiens
gtgacacacatactggttattcaaatccttaaacttactgtttggtcatccagatatacatataaaatatatatttcatatatatgatgtatttcatatatacattatatatatatttcatatatatgatgtatttcatatatacattatatatatttcatatatatgatgtatttcaggtattcattatatatatttcatatatatgatgtatttcaggtattcattatatatatttcatatatatgatgtatttcatgtattcattatatatgtttcatatatatgatgtatttaatatatatcatatatatttcatatatatgatgtatttaatatatatcatatatatttcacatatatgatctatttcatatatatgatgtatttcatatatatatatatttatatacatgataccaatttctatattaggtcttcaagtagatggtgtttccccaacttctcatattcttttgggttcactctgagttcccacagaaaacagaactctcttcaggtagtttcagaagtttgagcagggaggctgggaaatctagtaattagcattaccttcctgaggactaaaggggcaaggggcataaatactgatacagtgctcagtgaggagctgtagttctgtagaagtactttctagcagtgtcaatagtgataagggtcccagactactgtgacaagctaggaaagtatgggggtaaacaatgccaacctttttcccttcccaacttccaaactcctggtggtagcttccatgtctgtcccggaaaccaacctgcgggagagtctggtgatgcagactttaggggtcagattcttgcaggcacagagtaagagacagaaatgttagtaataggaattggggtgccaacagtgaataacaagtattcctttatttaaaagaaaaactgaccactttcacataaattatgccaggaaattctagataaatcctctaattttctcaggtgaaagttatttcaaatttcttatatcttcataattggaatatagcaggtagtaaagaaatatgtgtctcatatcttatttatttgtgtataataatctgaataaccagtctataagtatttgagaggaggtttattttcctcctattcatagtgtcggcatgatactttgcctccataaatatttattgaat

SEQ ID NO: 300 - DNA, 1175 bp, Homo sapiens
catttcatgggcctgggggtttcctagcagaggatattggagcccctttttgtgacattaccaattacatctttgtccacgtttaatactttgttttggaaaatttaaatgctgcagatttgtgtagagttctaataccaaagacagaagtaaatgttttccatatactttgtcttgcctgtatgcagccctcgtgtaatacggtgaattagagtggtatttcactttgtattattttgtaaatatgtcaatataataaatagtgactaaattgatttctaagagttggagtctttttattgaatgatccctgtattagtcagggttcccctgaaaatggatggcactggattgttgggcctgtaccaggccatcgccagcagtccagagtgaacagaagcagtgtatgtgtggaggtcaccacccccccgcccgccagccccgtggacgctatgcgtctagtaggagggccgctgcggtgagtcttgaagcccagggctgggcccgggcagagccgccgcaggtgcagatgttggtggtagtagcacatattctaaagagaacttcaaaggccgaagtggagaagggttccatgtgaacagcagttggacatgggtcattcggtcctgagaaataggtgagcgccattctgaatggacaggcgatggcctctgttgccctcagccaatcgaaagggagtccggttcagatcccgaatccggagtggcggagatggacactgccaagcgtccagcacagtaatgcgaaggatcccagagaagccaatggaagccccggggagagttcttttctccttgtgaagggcagggcgccctggaattgggttcgcctggagagaggggtccgcgccttggaaagcgtcgcgcttccagcggcatctggtgagctctggagggcccttgaaagtgcgggggagagggtgtaaatctcgcgcccggctgtacccatatccacagcattcctccctctggaactaagacctctaggccagcacaacagaatgtcgcgggaacaggaagcaaaaattttgctagtggatcacttagggtgatggtgagtggtgccacttccacttccaccccctgattcctggacccttgaatcctggccatgggagaaacagtaccatacattggacactgattcagagcata

SEQ ID NO: 301 - DNA, 1710 bp, Homo sapiens
cgcagcagaagtagggaaaggcatagaagtcgcagtcgaagtcgtgataggaaaggggatagaagggacagggatcgagaaagagagaaagaaaatgagagaggtagaagacgagatcgtgactatgataaggaaagaggaaatgaacgagaaaaagagagagagcgatcaagagaaaggtccaaggaacagagaagtaggggagaggtagaagagaagaaacataaagaagacaaagatgataggcggcacagagatgacaaaagagattccaagaaagagaaaaaacacagtagaagcagaagcagagaaaggaaacacagaagtaggagtcgaagtagaaatgcagggaaacgaagtagaagtagaagcaaagagaaatcaagtaaacataaaaatgaaagtaaagaaaaatcaaataaacgaagtcgaagtggcagtcaaggaagaactgacagtgttgaaaaatcaaaaaaacgggaacatagtcccagcaaagaaaaatctagaaagcgtagtagaagcaaagaacgttcccacaaacgagatcacagtgatagtaaggaccagtcagacaaacatgatcgtcgaaggagccaaagtatagaacaagagagccaagaaaaacagcataaaaacaaagatgagactgtgtgaaaatattttgtaaaagtggatcacattgaatcctataaatgattaaatctgcttttttcccccacgttgagattgtgcagtagttcgcactcctcaagctctccctgtaggctgcattttcatttcctctttcgtgtagggaagtgcctttgtaattccatttattgcattggtgttttcacccaattgttaagtttgatacatgatgcacagattgttcttgcatttttattgtttgtttttgaaatgtacagtctgtacatatgtcctgaaaatgttttaattcctttggcatggttgccatgttggttaaatttgtataaggcaataaactgccactaatctatttttgttttgtaggtgtgggattatggtttgtgtactgaagttagcatggctgtgcttttcgtaatagaatgctaaagactttgagaatggatcttggatgtctattataggagaagtatgtgctgccaatgtacaagaaggcagcattgtaggattaacattcttgtctactgtatattatcttggaaggctcttgttaatatgttacacttaatattctccacagttacctttagagagaatttatgagaagttagtttctgatgcagaggtttttaggctgtgatttcatcaaaagtccttttagcattctacctcaaagggacacttagtatgcctaaaatttattcacttagttttccttttttatttgaaaaaatacatgacatgtaatctttttttcttgaattctttctcagattttaaagtactatattaaagaaaaaaattaatgtctaaagcctagcattcttgcagaaccctatactaacatgtaatggggagagggtggggcagatgagtagagaaacagattcaagcctcaagcttccaaagcatttttataaatggaaaatccttaaattatgaaacagcttgatatagtgtcctttttttaaaattcagaactttttttattgataatggagattgctgtttgagtttttaaacttaatctagaacagaggagtattaaaagtaatgctg

SEQ ID NO: 302 - DNA, 1214 bp, Homo sapiens
ttattattattttttaagaaagcaagtttcacgggccgggcgcggtggctcacgcctgtaatcccagcactttgggaggccaaggcgggcggatcacgaggtcaggagatcgaaaccatcctggctaacacggtgaaaccccgtctctactaaaaatacaaaaaattagccgggcgcggtggcaggcgcctgtagtcccagctacttgggaggctgaggcaggagaatggcgtaaacctgggaggcggagcttgcagtgagccgagatcgcaccactgcactccagcctgggcgacagagcgagactccgtctcaaaaaaaaaaaaaagaaagcaagtttcacatgaataatgctgtgttggaaggctttttgatttaaaatcttttcggatttataacatcctgttaagttttaggagaacccgttttcccagagcagattcaagcttctaaaaataaatgctttcagtagcaggaatggcattgtttaaaaagctgatggcagggtaagcatttgggttagtgttttattaacatatttgtaagtacttgttcattgtggaaatgtgtccttgactaaaaccatacgtggctatggaaaccatgtttgtagttctgaatacacaggttttgtgtgtatttactctatgtattaaattattattgcccttagtttaaagtaaggattacaattggatttaagtagatcactgaatgttattgtttatgaaacttaactttttgtatgctgcttataaacatgatctataaatcagtgcttgggaaaattttactttcttaatctactgatacaggaataaaatatgaacaattaaacaggttgatccttgaatctgactgatttgtgactttttttcctcccagaatattatgcccattactggtaatatgataattcttgctgcttagtctagctgaaaattttttttatttcagtgagtatctgggtgaatcttttcatttaaaaaagcaggactgggccgggcgcggtggctcaagcctgtaatcccagcactttgggaggccgaggcaggtggatcatgaggtcaggagatcgagaccatcctggctaacacggtgaaaccccatctctactaaaaaatacaaaaaaacttagccgggtgtggtggcgggcgcctgtagtcccagctactcgggaggctgaggcaggagaatggcgtgaacccgggagg

SEQ ID NO: 303 - DNA, 1557 bp, Homo sapiens
taatcccagctactccggaggctgaggcaggagaattacttgaacccgggaggcagaggttgcagtgagccgagaccgtgccattgcactgcagcctgggcgacagagcgagtctccatttcaaaaagaaagaaagaaattgaagacaaattaaagtcacgatcacagaaaaactaaagatatgtatataactatgtagttatacaaaggtcaaaaggctaagtgccgtggccatcgcctgtggtcccagctactcaggaggctgaggtgggaggatcacttgatctaggagcaatgagccgtgttcgcgctactgcactccagcctgggcgacacagcaagaacgggtctccaaaaaaaaaaaaccacgattctgtaaggtggaaattagtactgccttttcctgggacctatgttcccctccgagccacgcgagggcagcaacgcgcgcactctgaggaacacccccttcctcaggactcgtccgcctgtgctcggtggtttctcccagaatcctccaaggcgcgggagggggcggagagcttaaaagtcgcggggggagcggacttccgctgttttagggagggagagcggcctgggtcctgggtgttgtgtgcggagctgtggcgtcgcgtgtgaggcgcgtgcagggtgagtgtgagtggacgcgtgagtgtgtgagtgtgcgcgcttggagcgtgttaggcgagtgcgtgcgcccacccctgcgcccctcctcccgcttacactttgatcttatttgatcggatcgtgaccccagccccgccgggccgacccgaaatgaaaagctctcctcctgcgaagccccctcggggcgctgtgcagcgaggccccttaggcggcggccacgctgtggtccccgaggtcccggagctggccctgcggggcccggcgctcagaagtgatgaattgatcagatagacgaggccgggcttgtccccggccactgattatcgaggcgattctgatctgggcacggccaccgggctgcgggctgccggtggcgtaggggcgagcacgtgaacggcggcggcgggcggggatgctgagcgcggtggccaagggtaaatgagccgctgcccctccccctggagctggaaggtcgcggaggcctttttggccgctgatatactttcctcccactttcccatttctccttgtttttcttttttcttttgttcctttttttttttttttgagacagggtcttgctctgtcgcccagactggagtgcagaaccgcaatatcggctcactgcaacttcgacctccttggctcaagcgatcctcacatctctgtctcccgaataggtggaactacaggcgcgcgtcaccacgctcggctaatttttgtatcttttggtagagacggggtttcaccatgttttgccaggctggtctcgaactccagcctcaagtgatccgcccgcctcggcttcccaaagtgctgggattacaggcatgagccaccgcgcccggccccttttttagtttttctttctttcttttttttttttgaaacggtctcactctgttt

SEQ ID NO: 304 - DNA, 1352 bp, Homo sapiens
aaacaaaagtaatgggaattttaaatacgtttgcagaaactgcccctcccctcattgagggtcactgctcaagagtgcaggagtggactctccactgatgggtctccctccccatcctggtttccaccccgggctggctagctctgttggtttgaagactgacagccagcctggctcattctcattattggctagttagctttctttatcaacctgctcactcacaaatgtgtgccctcagccagagagtaagaaagcccaaatctgttacagcttctaaaaaaatagatttctaatttgtcctactcatgttaggagcattatctttgaaggtaaaacatagtgtatcattgtgtaaactcccaggcttgatgtagcagaagagatcatttctggaggcttcagcaatggaatttagcattataagagagattggacaaaccagtccaaagtggtccgagttcttaaatccaggtagggaactcactcttctttcttctctggacctaattgggcattgggctttagtgagaccacagaccaggcccgtctctcctgtaggcttttaattcaatggcaactctatttcaaagaataaaagcctttggagagttgcggcagttctgggggcgggctcaggagagtccatagatcagccgtaactggaacgtagaatctacgtctgcctctgaatggacttcccacctcctctctcttgctctgatgcttgcctctgggcctctccatgcccaaggtggtctttcatccttgacaggctggtaatgtgctggccacctccagctcctgcatcgagtctgtaaaccagagctggttctcatggccttcgtcacgataccaggatacggaggggagcccagggccatccatacccaccccagggtaacggggctggcctggcattagtcattatttagtttccaggccaaccatccagatagagattccctctttcctttgagcagtgctctcaagagctccgtgcctgtccacaatgacctagagtgcatcctgctcattgtcagtgtagcccctcgcccctatattcatccaggatacttggaagtgctaaaataggaagggattcggctttcaactttgctaccatcttccctgaagcaggaaaatgaacatggacttaaatgttctttgaaaaaaccaaagttttaagatttgctgtgtgatgaagtgacagggagggccggagtcagcaggtgccagactttctgttctgtctgccatgggtttgtccagctcaggtagctctaggagcaccatcctgccctagcagagcccaggccttgccctcatgaagcatcattgaaatagcagga

SEQ ID NO: 305 - DNA, 1236 bp, Homo sapiens
ttggtctgcgatgggaccaaatttacaaaacattattttgtaaaacctccccagattattgtaatgtttagtcagggttgaaaaaacactgactcattcctgggaacaggcggtaacaccagaaatggcattgtcagagaccctgtggaagaataagggagactggtgccctggggaatgactgcagggatcccacccaggctggggaggggccctggagaaggtgctctgtttccgattgttttttggaattctcatatggaagacataagtgttaaccaatcactctctctctttacagatactaatggaccatactaccaaggaccagtccacctgaaccacacactctaaagaaatattttttaagataacttttattttcttcttactcctttcctcttgatttttttcctataatttcattcttgttttttcatctcattatccaagttctgcagaccacacaggaacttgcttcatggctctttagatgaaatagaagttcagggttcctcactctagtcactaaagaaggattttactctcccagcccagaaaggtgattctttctttaccatttctggggactttagtcttaattaggtaccttattaacaggaaatgctaaggtaccttctctgtggaacaatctgcaatgtctaaatcgccttaaaagagcccatttcttagctgctgaaatcagtgctctttcacttcttcagagaagcagggatggtacctacccggcaggtaggttagatgtgggtggtgcatgttaatttcccttagaagttccaagccctgtttcctgcgtaaaggtggtatgtccagttcagagatgtgtataatgagcatggcttgttaagatcaggaggcccacttggatttatagtatagcccttcctccactcccaccagacttgctcatttttcgagtttttaactagactacactctattgagtttaattttgtcctctaggatttatttctgttgtccaaaaaaaaaaaaaaagaaaagaaaaattaaggagaatttttggtgttaatgctgaggaattgcttgagtggttagttgttaccaatttctcttttgaacctttggagctaaggatgctgagtctagagaaatgctagtctcaagccctgttaagtccctctgtttctagcccgtagttcatagcatcagtgaactggagccacaacagcaaattctatcagctgtgtaccatac

SEQ ID NO: 306 - DNA, 1102 bp, Homo sapiens
gggaacccaataacagtggttgggcgggcgccttcctggagcgcggggagatgtaaagatagacaaataattttcccaatgagactgtagaagagagagcaattggccaatgaggactgcggggcgggaccctgtgccgcggcggagtccaagatggcggcgtgcggttccgctgtgtgaaacgagcgcggggcggcgggttactcagctccgcggagacgacctccgacgacccgcaacaatgaagggaaaagagcgctcgccagtgaaggccaaacgctcccgtggtggtgaggactcgacttcccgcggtgagcggagcaagaagttagggggctctggtggcagcaatgggagcagcagcggaaagaccgatagcggcggtgggtcgcggcggagtctccacctggacaagtccagcagtcgaggtggcagccgcgagtatgataccggtgggggcagctccagtagccgcttgcatagttatagctccccgagcaccaaaaattcttcgggcgggggcgaatcgcgcagcagctcccggggtggaggcggggagtcacgttcctctggggccgcctcctcagctcccggcggcggggacggcgcggaatacaagactctgaagataagcgagttggggtcccagcttagtgacgaagcggtggaggacggcctgtttcatgagttcaaacgcttcggtgatgtaagtgtgaaaatcagtcatctgtcgggttctggcagcggggatgagcgggtagcctttgtgaacttccggcggccagaggacgcgcgggcggccaagcatgccagaggccgcctggtgctctatgaccggcctctgaagatagaagctgtgtatgtgagccggcgccgcagccgctcccctttagacaaagatacttatcctccatcagccagtgtggtcggggcctctgtaggtggtcaccggcacccccctggaggtggtggaggccagagatcactttcccctggtggcgctgctttgggatacagagactaccggctgcagcagttggctcttggccgcctgccccctccacctccgccaccattgcctcgagacctggagagagaaaga

SEQ ID NO: 307 - DNA, 1152 bp, Homo sapiens
taaatgttaatgatgatgttaataaagcctttcctgacacatttgaggagctcctccgtctccaggggcttcttaccagagttatgcagtgatgggtttagttctgaatggatgaagagttcctgagagctagcgtttgtaattagaaccgttacttggtatctgtgccttatttgacctttggttccacatgccttggatgtgcatgcaccgtgacggtttcataggtacgaacgcacactcaggcccagtcacttcggttggtagtacagattgtgaggaaaaagatggaggcatccttaaggaggaaaaatgtttgcctttagttcctgcattatcctgtacagaggggctcctgagttttggaagcctgttcccagtacaggagaacaactcccctgtttgcagcaggagacttcagtgcacggtgacaacgctggagttcaagaggaagccagcaatgctgcaccattggcttcagacaccattgttgttgtttgccagttttaaacttaactagttgcagacgaagaccaccttgaaatgcaggcttgttgggcttgttttgaattttaacctcggatggaagagccctagtgctgtctgtctccatgcgggatgatgattgctaggcaacaggtgattatcaacaaaggatgccacggttatactctgcaaggtggtgttccagtggcaaacagctgtataaactcttgtaaacaggtaagagggtttttagaggtcaaaatgcattataattaatagggtgagggcttttaatgttttgggtctgtttctctagatggaagccttaaggcactctgctgccattactagcttccttcaccgaagtgtcatatttcaggtcagaacttttgttctacttgatatttttaaatttatttttaacattaaaaaaatacttttaatgtgggagccaaagttttaaaatcttggttatggatttgggacctatagcctttatgtcctttaaaattttgacatttgctgttaaccttggcctttacccttagtcatgatttaatgatgcaggaggacttactgctgtaaaaacgttgcttgtttacgaatactgatttctaaacttcagagttaagacattacagtgtataacagcaacaaaagtatgcc

SEQ ID NO: 308 - DNA, 1152 bp, Homo sapiens
ctgcccctcatcactgtcttgttctatccagcatttcttcatctatgaaaatagaagactggattggatgactgatgacatccactgtggatagctacactgctatcctggcgatgaggccatacagttggtgaaatgtgtgtaacacacccaaaaaatgtgccccagatgtgttgggttctctttttttctccaggtctgcttttcttgtctctactctgccccgactttttttctttcttctaggtttagaagccaagcccacagagactttgtgagagatgcgacttggtccccgctcaatcactccctgcttaccacagtgggctgggaccatcaggtcgtccaccacgttgtgcccacagaacctctcccagcccctggacctgcaagtgttactgagtagattggatttaagacaaaaagcaagtcccccatgagtgtccacttctttgccctgccctctcagcttgtgagacaacacaggagccttctatagtatgttgatatgctagatctgtgccgttaataggcatcgtctctcagcctgagggaggctggattctgggttcctgtagtcacagggaggaaaagctttcttaaaaatggacatgtatgtgcgtgtgagtgtgtgtgtagatttatagtttttggtagtggcaggaataaaaaaaatccatcctacatcttccctaagcactgcctctctctcaccccccaaaacaagttgacgaaagggttttatgtagctgtctatgaggaattggccgtgtctgggtgggttatgggatgtgggcatccctgggttcttggaagcagctcttatgctactcatagagatgggattgactttatttttttatagtgcttaattcaccattatgagaaatgcttccagtcacaaaaatgcagcccagctcactctgaggaagaagcaggacttggtacggttttacacaactccttaccattaaactgaatcagaaatccattttctggctgaataaaaagtttggcttgcctgtgtaatgcccactcccttccccctggctccctagtgatgggacatatatgagagagaagtgtttttctatcatagacaccataggggaaagtttggggatgaaggagagcttaaaggtgtttcaatta

SEQ ID NO: 309 - DNA, 1148 bp, Homo sapiens
caccattatttgtagtaccaaaaaatgaattatagaataccagtatagtggaatccagtgtaacttaaaattgaggtaggtttgtgtgtcataattaataaaagtgatgtgtatatgcctatattttgatgggtatacctatatttttattaaatatttctgggagggaatacaagaaatacaggaagttaatggcctatgggggaggctgaaggagacttatttcatacagcatcacttttaaatatgtttttgccatatgctgttataatttctaggtacatattacctattaaataaaagaatttcacgtaaaatacaaaagaagtgggcattctcactggcagaatcttcagagtagaagtattccttcaagtatacaaacaatatttatcatttcttaattttgccccagaataacattgctatggctttggaagttacttaccgggaacgactgtatagagtatataaggaagtaaagaatcgcctggactatcatatatctgtgcagaacatgatgcgtcgaaaggaacaagaacacatgataaattgggtggagaagcacgtggtgcaaagcatctccacacagcaggtacacaacatttttgtaggttctgatgttgtactggtatctcttaacaagtatctgctgatgttttgttaaggtaggaatagctggcaaggagtctttagcctagaagtagcagtgtaaccccggtttgtttttctggatagtgataagcaggaagatgctgcatacctgtcaggatggcttttctctttccttaaatttgggtaacattaactgatatatttaatttctctataaaatagactgggctgggcacggtggctcacacctgtaatcccaacactttggaagggcgaggcaggaggatcacttgaggccaggagttcaagaccaacctgggcaacatagcgagatcctgtctctacaaaaaatttaaaaagtagctgggtgcggtgacaaacgcctgtagttcagctactcaggaggctgaggtgacaggatctcttgagcccaggaagcataggctgtagtgagctgtgattgcagtattgcactccagcctgggtgagagagcgagaccctgcctcaaaaaataaataaaagactgaacaag

SEQ ID NO: 310 - DNA, 1221 bp, Homo sapiens
ttattgacgataatctccttaaagtcagctgattgtggatgttaaccacatttagataataccttcatggcaacacttccatctgtttgaataactgggtactatagtctagccaagttgacatgtccaactaaccgttacatggttcaatatatatttgtccaataaaaggaagaacaaatggctaaaatggttaatttaagcagaaaaatgtttatttggaggatgttgaataacagaatttaagtaaaaagtgagcacttaggcctcaagaagtcccaagaagaaccagagcagtttgcaggggtagggacctaggtaatagtaaggaacaatgccttcagtgtaccacagtcataaaaaatcagctctagccattttgcttcctcacatcactctaagattcagcttcccgggaaactcagcctgattggtgtaggctgagtttaggtcacatgtctcccttgcccagtgaaaggtgggtacaccttgattgacattctcaccacaactgcattcaggaagacaaggattgtttcccaataaagtgtcacaaggctgttaccaaaagaaggaggaatactagacatgcacaaataaaagatatccacttcgccaactcttgatatctcacatagatggtcagctggtaaaactaacatggatcagagccagattatgtagaatgttacaaggcctgataatgagcttgggccttattctctagaataatgaaactttttttggggaagggggagggtcatagatctctttgaaattttgaaattttggggccacatattgggccctcttctctcctagaagattatgcttatgctttaaaaaagatttgtttttgttttgttttgtataacatttcaagagtttgttttacctcttgaagtatatccatagttggtgggaaaaggagctagtctcaacctgaaaaacaatcagaatattatatctctctcagcttctgatatttgcactgctgattctccttaatctctttgatttctcttggaggaatttggttaagagatgatgagggtcttattaacacagtgtggaaatagggataaaaataatttgcaatttaaagaattatttaggaaacaatatgcagaactagctcgactgttgattatatatggggagtacagtcaagtatgacttataggtttttagcttgtaggaattgcaggggaaatatatagg

SEQ ID NO: 311 - DNA, 1203 bp, Homo sapiens
ttattgcaatatctgttaaaatagttatgaaaaacttcagtgaccttggagggagatgaagtaatatcggcgggggtgggggttggtagtaataaaaaacaagactcagaattgcaacaccttaacctctaatgtcaagcagtaaacctagtcttgagaacagttcattctggacaaatacttactgagttgctcttaaatgtttgattaataagtatctactataaaaataaataaggcaaaaccctttttgaaaccacattcccctttcccttgtagtagtgaccacctgatttttctattcctccttaaagcaaactcctcaaaaaaattgtccataatgccatctcccaatttcttgcctcccaatctttcctgaacccagttgtgcttttgtcctgggttattacactgaaattggtttatccagtctccagtgacctccagtggtcaagttctcagtcgcatcttaatttacatgtcagcatttgataattgatcaattcttcctctttgaaatattttcttctctttatcccaagaaactatatacatggttcccccccgccactgcctcactcactagttgctctttcctgacctgctttgatggcttctctgctctgattgttttttttttgttttagttaatatggagaattgtgttgtatttttttatattgtggtaaaatacacataacataccattgtaattatttttaagtatacaattcagtaaaattaagtacattcacattgttgtgcagacttcaccaccatctgtttacagaactcttttcattttgtgtaactgaaacttgattccattaaacagtaattccccatcccccttctccgcccccaacaaccaccattctattttctgtctctgaattttttactacaataggtacttcatataagtggattagggatacctatatgtcaaaattgcaaacttctgtgcatcaaagaacacatcaaggttgagcgtccaaaatccatatccataatccaaaatccaaaatccataacttttgagtgctgacatgacaccagaagtggaacattttatatctttccccatgtgggttgcagtcaaaatagtagtcaaaactttgtttcatgcacaaagttgttaaacatattgtataaaattactttcaggctgtgtatgaagtgtttatgaaacagtttagactt

SEQ ID NO: 312 - DNA, 1531 bp, Homo sapiens
gtggtcatatgataaataagtgatttataaacaagagtgatattttgctagggctttcaaagttaaccggttttctagcctcatggaatactgttgaacctatagcgttgtcttgattcttttgtgttctctgccttgtaattttctgttactgctatatctacgtgtaaatctttttttctttttttttttttttttttggttaattctgccacatttaatgttggtgagagagtgatctatcctaatgacattttactgtttaaaaaagtttcctagccatgaagccctgctactgatttagacaaggtattatggtcattactttgtacccctatccttccaagcacttctggtacttcagtcgtttttactgatccaccaacacctaaagaggctatgctacagtctctagctaaatggaagacacattcatccttctccctctgactgctttgatcatcatttattgcatctcataactaattttctaaagtttggattgggacttttcaggtcctttttggagggcaaaggaagtgccagcttctctggggaacttgtttttaaatccaaagacttgaaccacattccctgcacatgaacatgtttgcttttatcccttctctcattgtctccttcccatcttagtaccattgtagttataaacatctgcattttttagaagcattttacccatttatttttttaaacattcaagaactgctgacgtactgtggatgtagagtataaaacttgaaaaatgcagatgttgaaggaataataggtatcttgtgctttaatactttatggcaggattgtactataagcaaatgaattaaacagctatgtaaatcataaagaaaaactaaaaatgaaccaaagtgaaaggataacttccaggcagtatctttctattgtaacctgttatttaaggaaatactagtgatttcttctaaataggatgtaaaacttctttcaaattactcttcctcagtcctgcctgccaagaactcaagtgtaactgtgataaaataacctttcccaggtatattggcaggtatgtgtgtaatctcagaatacacaggtgacatagatatgatatgacaactggtaatggtggattcatttacattgtttacacttctatgaccaggccttaagggaaggtcagttttttaaaaaaccaagtagtgtcttcctacctatctccagatacatgtcaaaaaaagaaaggtgtttgtgcttccgttttgtttctgctcagtaatatagtcaagcaagtttgttccaggtgacccattgagctgtgtatgcatttttgtttatttcaataaaatatatttgtattatttgtccttcatactatccatccataccacactatcttctgtatcaggtagtctaatagaaatatacctgttttgttctaaaattgtctgagtctctcctttttgattcatcgcttcagccttggttctcaaggtaagatattcagctgtatttgatcttatgttgagaatgtttaggg

SEQ ID NO: 313 - DNA, 2859 bp, Homo sapiens
catcattttgggactctttaaagattggattgacatctttctgaatggatccttaagctttgcttgggggaaaaaaaaactgtttactcttagaaacaactgtttgtgttgttttacatatttaggtcggctcaatgacatgtatggagactacaaatacacatactgggcatgtggcgtcgtcctaattatttcaggtatctatctcttcattggcatgggcatcaattatcgacttttggcaaaagaacagaaagcaaacgagcagaaaaaggaaagtaaagaggaagagaccagtatagatgttgctgggaagccaaatgaagttaccaaagcagcagaatctccggaccagaaagacacagatggagggcccaaggaggaggaaagtccagtctgaatccatggggctgaagggtaaattgagcagttcatgacccaggatatctgaaaatattctactggcctgtaatctaccagtggtgctcaatgcaaatagtagacatttgtgtggaaatcataccagttgttcattgatgggatttttgtttgactccttaccaatagcctgaatttgaggagggaatgattggtagcaaaggatgggggaaagaagtaggttctgttttgttttgttttaatcttagcttttaatagtgtcataaagattataatatgtgccttaagttttagtctttagaactctagagagccttaacttcttaaaccatttttgctgaattcatctatttcgagtgttgtgttaaaaggaaaaataacaactaacttgtttgaggcaaatctaaaatttaaaattaatcttgcttcattgttacatgtaatatatttcagacattttcactggaagatttatgaacagaaatattggttgaaagttagagattttacaaaatgctgacaaaaatattttcctagcatcagtagatttctggcatatgtttctgctagctatatatttaggaaattcaaagcataaaactttggcaacatcttggctgttctagacacagtgtacttgtcaacccctctcaggtaccttttcttgggatgcttattagaagccaagtaaagtgcttaaggtttgttttcattaaattagctatttctgctcccctgttcaaagatgcattttgagtgtttatagatcactgccctttttgaaatcacctggtattatttttcttactggaaaagttagtattaaaatctacagaactacatatttgtgcctccttggtaaatacaacacatctaattaaatgtagacagatatttcaaacatcagctgaattcacttaagtttttccaaaacctcagttaaactgtgaagctattggaatttttttttcctggaatttttcccctttgattcacagtggtcccatttatatctgcttctagcttagtgctatgtgtgagatatgtgtgtgtttggtgtttttgtttttttgtttttttttttttaaggtttgcaaattaaaaagggccagaaaaatttggcaccaggcaaacgaataaagataggattgggaaagaagttgctaagtgtgcttagttttaataagtaattccttctcttttttcagagaaggccttacagaaaattgttgtgcttagaattgctggatgcatttttaccctccacacaaacctaaaaattttgtgacccctttcacttacctgaaaagtagagaaatggattcagtataaggataaggagggaaggtggaccagaatgaaaactgtaaatatttttttaacctaatatcacttaaatcgaggcagaaagatacagacattcaatgaattatattcaatgcatttaaaataccactgtaattgacagagtaaaagtatagatacaaaaccttgtgtaagaggctgacttttccaaataaacattttttaagaaaacatttcttctcccaaatgtctattttcttgaggaaaatattgctgtgtcttcattttcattaccaggtttcattttgggccttgctaaattgattgaattaaatcctccagcttttgaaccttgatatttgtgtatatgatttattttcatttgaatttctcctttcctcttctttgctgtaaggcaaggaggaggggaattttaaaaccatcttatttgaactgagagcatccagagcagttaaccttaaggaaacaatgaaaaactccctttgtatgcctgggcatcatggcagatagaggaagagtgttagaggagaaaactgctgctgagagtattggcaggcttggcctcagtttggactctgtaattttctttggacccaagtctgtaacctctgcgtacttcttctctcttaccttctataaaaatgaggattactgttggtgagggaataaggaatgtaagtaaaggaaatctgaaaaaataaaagtaaagcaagtataaataactttttcctcatctttattgttgaagtcatatccacatagcactttccgtttaatctctgttcaatagttgaatcttgttagtggagtgagggttttgtgatgcagattaaccaccacttatcacaagggttctgaagttgctgtattcagaagcaaaagttagtaccacatgctgggcacagtggctcaggcctgtaatcccaacactttgggaggctgaggtgggcagatcacttgagatcaggagttcaagaccagcccgaccaacatggtgaaacctcagctctactaaaaatataaaaattagccgggtgtggtagtggacgcctgtagtcccagctactcgggaggctgaggcaggagaatcgcttgaacccaggaggtggaggtttcagtgagctgagatcgcgc

SEQ ID NO: 314 - DNA, 1280 bp, Homo sapiens
catgtcctctaataatgaggatttatatcctattccttccattatttatacctcttattatttatttatttatttatttatttatttatttatttatttatttattgtcttcacaggtcttgggcttgccttcaacttgaatccagctctgaccatgattggcaagtatttctacaagaggcgaccattggccaacggactggccatggcaggcagccctgtgttcctctgtactctggcccccctcaatcaggttttcttcggtatctttggatggagaggaagctttctaattcttgggggcttgctactaaactgctgtgttgctggagccctcatgcgaccaatcgggcccaagccaaccaaggcagggaaagataagtctaaagcatcccttgagaaagctggaaaatctggtgtgaaaaaagatctgcatgatgcaaatacagatcttattggaagacaccctaaacaagagaaacgatcagtcttccaaacaattaatcagttcctggacttaaccctattcacccacagaggctttttgctatacctctctggaaatgtgatcatgttttttggactctttgcacctttggtgtttcttagtagttatgggaagagtcagcattattctagtgagaagtctgccttccttctttccattctggcttttgttgacatggtagcccgaccatctatgggacttgtagccaacacaaagccaataagacctcgaattcagtatttctttgcggcttccgttgttgcaaatggagtgtgtcatatgctagcacctttatccactacctatgttggattctgtgtctatgcgggattctttggatttgccttcgggtggctcagctccgtattgtttgaaacattgatggaccttgttggaccccagaggttctccagcgctgtgggattggtgaccattgtggaatgctgtcctgtcctcctggggccaccacttttaggtatagtatatctccctactaatgtgggtctattacaaaacaagcatgtaagatgggaatgctgacagaaagcaaacattagtgagctatttgggtaagaataaatctttctcatttatgtacccttgatgctgggacaatgcttggcacagcataattgctcaaatatagaatctaattaaatggaaccatcaaggcaaaagggggatcaaatattgttacaaatgtcagtgttttttctttttttttgagatggagtcttgctctgttgcccaggctggagtgcagtggcaccat

SEQ ID NO: 315 - DNA, 1180 bp, Homo sapiens
tctgcctcagcttcccgagtagctgggactacaggcacctgccacctagtagaggtagggtttcaccatgtttgccaggctggtctcaaactcccaacctcaggtgatccacccatctcggcctctgaaagtgttgggattacaggtgtgagccactgtgcctggcaagaaggaacatttatgggtgcttgggtgtagtagttaagagtggttccacagaggccgggcgcagtggctcacacctgtaatcccagcactttgggaggccaaggtaggcggatcgcctgaggttgggagttcgagaccagcctggacaacatggtgaaacatggcgaaaccccctctccactacaaatacaaaaacttagctgggcgtggtggcaggcgcctgtaatcccaactactcgggaggctgaggcaggagaatcacttgaacccaggaggtggaggttgcagtgagccgagattgtgctatatagcacttcagccggggcgaaaagagtgaaactccgtctcaaaataaataaataaacaaatatggaaagggggatggctagaatgaactctgcagtgctggatcagaattggaaatatcaatgggagcacatagttttataaatttgtgtgtgtgtgtgtgtgtgtgtgcgcgcgcgcatatgtgtgcatttgtgtattagtgtgatagtctgtcctctgaaagggcctacaagccatgatactccagtacaaattagtacacctagaacccagattgttctaaatacaattctccctaaaggaaccagggctttttttttttttttttttttttttttgagacaagagttttgctcttgtaacccaggctggagtgcaatgccacaatcttggctccttgcaacctccgcttccagagttcaagcaattctcctgcctcagcctcccaagtagctgggattacaggcgcctgcaaccacgccaggctaatttttgtatttttagtagagactggtttcaccatgttggccaggctggtctcaaactcctgatctcaggtgatccacccgcctcagcctcccaaagtgctgggattacaggcatcagccaccgtgcctggccttttttttttttttaagacggagtctcgctctgttgccaagctggagtgcagcagcgcgatcttggccactgcaacctccgc

SEQ ID NO: 316 - DNA, 1246 bp, Homo sapiens
ttaagccgtcaaattttgggtgatttgttacacatccttaagaacccagccaggcgcagtggctcacgcctgtaatcccagcgctctgggaggcagaggcgggcggatcacgaggtcaggagatagagaccatcctggctaacacagtgaaaccccatctctactaaaaatacaaaaaattagccgggtgtggtggtgggcgcctgtagtcccagctactcgggaggctgaggcaggagaatggcatagacccgggaggcaggcctgcagtgagccaagattgtgccactgcactccagcctgggtgacagagcgagactccatctcaaaaaaaaaaaaaaaaagaacccagaacacatagtataaggtcatgtatgaagtaatgggataaaagcatgacaatgagaaactgcttaaaggggatcctcttcatgtgggacagaagatcagagaactcctaagacaaggggcgggctcacatcattccttggggacatctaagagtcaggactgaatgaaagatcattggtgaggtcatttaaaaataaatgtggccctttcccccggctggcagcgcagaggccgcaggatgcctggagttactgtaaaagatgtggaccagcaggagttcgtcagagctctggcagcctttctcaaaaagtctgggcagctgaaaatccccaaatgggtggccaagcataaagagcttgctccctgttatgagaactggttctacacacgagctgcttccacagcgcggcacctgtacctctggggttggctccatgaccaagatcgatgggggacatcaaagatggcatcatgcccagccacttcagtcgaggctccaagagtgtggcccgccaggttctccaagccctggaggggctgaaaatggtggaaaagggccaagatgggggccacaaactaatacctcagggacagagagatgtggacagaatcaccggagaggtggcagctgacaacaagaagcattagaacaaaccatgctaggttaataaattgcctcgttcgtaaaaataaataaaataaaataaaaataaataaataaatgtggagggcagaatttatccattattatctcttgtgaagcagacaaaagccacagtattcaaaatatatttataagaatctagaacctgtgtaacttccctaggtttgttgtttttgttgccctggtctaattatccagggtgaaaagctcttgaatgtttgtctggggtaa

SEQ ID NO: 317 - DNA, 1216 bp, Homo sapiens
aagagtcttgagaaagcgaggatcaaatagaatctttaactttttccaggaggcaataggcccaggattttttttccccactcttagctaccgggagaggtaactagaggctgaaaagcgtggctctcaacatttcttattgtttgaaggcctagaattcacatcagtagtattccatcatagatgttctcaactctgaaacactgtgacttcgtatagggaactgcagaccaaattgtttatagatctgcataagatagtttttccttcttctctggatgttaattaaagaggaatcttatatagaagacatttgctgctgggcgcggtggctcacgcctgtaatcccagcactttgggaggccgaggtgggcagatcgcctgaggtcgggagttcgagaccagcctgaccaacatggagaaaccccgtctgtactaaaaatacaaaaattagccgggcctggtggtgcatgcctgtaatcccagctacttgggaggctgaggcaggagaatcacttgaacctgggaggcagaggtcggagtgtgccgagatcacaccattgcactctagtctgggcaacaagagcaaaactccatttaaaaaaaaaaaaaaaaagacatttgctgtcttcaatttaaaaaaaaaaaaaacttaactcactggcattcagttaggtgatacattaaaaacttttaatttctagacaccgttccccctactactcaaaagaattttggatttcctttccctgccaccagtaggcatcagagaaaaggaactttttttttttaattttaaactaagtaattcaattagaaaggcaaatgatcctggtaattattagatggtatattctagtaattattagaaaaggtgcttctgggtgattgcagttttgaatttttcatttcactcccattagtcatttcataaacacatattgagtgtttgcattacccaaagctttatgcatgctactgaatgagttgggagagtgactcaaaacaaataagatattatcctccctcaaaatgaccagacacatgcacaagttcaaagggatgaatagagaagatttcacagaataggtggcattgacaggtgcataggatttcaatagggagaaattaaggagagaaaacattccaggctgaataaatgagcaatggcgtaaaactaaggaagtataagtcatgtacagggaacttcaaatgg

SEQ ID NO: 318 - DNA, 1304 bp, Homo sapiens
actccagctagtaattttgctaggtagctgcagttagccctgcaaggaaagaagaggtcagttagcacaaaccctttaccatgactggaaaactcagtatcacgtatttaaacatttttttttcttttagccatgtagaaactctaaattaagccaatattctcatttgagaatgaggatgtctcagctgagaaacgttttaaattctctttattcataatgttctttgaagggtttaaaacaagatgttgataaatctaagctgatgagtttgctcaaaacaggaagttgaaattgttgagacaggaatggaaaatataattaattgatacctatgaggatttggaggcttggcattttaatttgcagataataccctggtaattctcatgaaaaatagacttggataacttttgataaaagactaattccaaaatggccactttgttcctgtctttaatatctaaatacttactgaggtcctccatcttctatattatgaattttcatttattaagcaaatgtcatattaccttgaaattcagaagagaagaaacatatactgtgtccagagtataatgaacctgcagagttgtgcttcttactgctaattctgggagctttcacagtactgtcatcatttgtaaatggaaattctgcttttctgtttctgctccttctggagcagtgctactctgtaattttcctgaggcttatcacctcagtcatttcttttttaaatgtctgtgactggcagtgattctttttcttaaaaatctattaaatttgatgtcaaattagggagaaagatagttactcatcttgggctcttgtgccaatagcccttgtatgtatgtacttagagttttccaagtatgttctaagcacagaagtttctaaatggggccaaaattcagacttgagtatgttctttgaataccttaagaagttacaattagccgggcatggtggcccgtgcctgtagtcccagctacttgagaggctgaggcaggagaatcacttcaacccaggaggtggaggttacagtgagcagagatcgtgccactgcactccagcctgggtgacaagagagacttgtctccaaaaaaaaagttacacctaggtgtgaattttggcacaaaggagtgacaaacttatagttaaaagctgaataacttcagtgtggtataaaacgtggtttttaggctatgtttgtgattgctgaaaagaattctagtttacctcaaaatccttctctttccccaaattaagtgcctggccagctgtcataaattacatattcc

SEQ ID NO: 319 - DNA, 1727 bp, Homo sapiens
tgggtcaggagtgcttactgtggattttctcctctaggaaagaattagtactgcataagatgattaaaaataatgcttttgtagtttcatttcggaatagtgaatgtactatgattgttgtgcgctcaaatcattaactgcagggttttttttttctcccccccacaggggtttggtgcagaaagaaagatccgtcaagctggtgtcattgactaaccacatccacaaagcacaccattaatccactatgatcaagttggggggaatctggtgaagggttctgaatatctccctcttcatccctcccgaaatctggaatacttattctattgagctattacaccagttttaacaccttcctcgtgttatgtttaaaaaaataaataaatttaagaaaaccattttaaataatgcacagttgcagcctggaaaaacttaaggtggcgccttatagtatcaattttaggagctttatttggtgcatttaacgcaactggtaattgcagaatccactttgcctgtgtaagtgaaaaatatagactgttatcttgttggccctatgaaattctgcacttttcattatatactctaccttcattaattacttctggcaagatgttctgccttagcactcagttgcattcttttcctttttcttcctgttcattatgctttaattctgaggaccatatgagggtagaatatattatcttttaaaaattacaaaaatttgtataggcaaaccatttcttaaagttgatggccaaattttaaaatgttatttttcatatcatttataatcttgtcacaatccacttaaagaagtttggttatatttcagtgaaaattttcttccagagtaggttttttttcgtgggttggggggtaactttactacaattagtaagtatggtgcagaatttcatgcaaatgaggagtgccagcagtgtgataatttaaacatatttaaacaaaaacaaaaaaaatgaatgcacaaacttgctgctgcttagatcactgcagcttctaggacccggtttcttttactgatttaaaaacaaaacaaaaaaaaataaaaaagttgtgcctgaaatgaatcttgtttttttttataagtagccgcctggttactgtgtcctgtaaaatacagacacttgacccttggtgtagcttctgttcaactttatatcacgggaatggatgggtctgatttcttggccctcttcttgaattggccatatacagggtccctggccagtggactgaaggctttgtctaagatgacaagggtcagctcaggggatgtgggggagggcggttttatcttcccccttgtcgtttgaggttttgatctctgggtaaagaggccgtttatctttgtaaacacgaaacatttttgctttctccagttttctgttaatggcgaaagaatggaagcgaataaagttttactgatttttgagacactagcacctagcgctttcattattgaaacgtcccgtgtgggaggggcgggtctgggtgcggcctgccgcatgactcgtggttcggaggcccacgtggccggggcggggactcaggcgcctggggcgccgactgattacgtagcgggcggggccggaagtgccgctccttggtgggggctgttcatggcggttccggggtctccaacatttttcccggctgtggtcctaaatctgtccaaagcagaggcagtggagcttgag

SEQ ID NO: 320 - DNA, 1727 bp, Homo sapiens; identical to SEQ ID NO: 319

SEQ ID NO: 321 - DNA, 1178 bp, Homo sapiens
gaatatcttgtatttgaaagcagcttattaaaagtgtctgtcaagctctttgttaatcaaagccttgttaatctagctgtttaaacgttagataaaacatgcttaataaaatcgttattggtaagaaagttaaaacagttactactgaaacattatcaaagtaaaagcacaccaaagattttacgttgttgttcattttttctcatacttaatatgtttggtttttggatagccctctagagaaattcagaatctataaggaatacagactgaaagataaaagtttgatcctttgtgaaaagtgggatgagacataaatgttttggtgaaaatcaatttcattgaagtaataacaaaggatatttggaatgaaaagcatgcgctgggggagttataggtcttgttttctgagttaaggagattggtgtggaagtgatatggtgttaatgagcatccttaattttcacaggttgaatttagtattagtgacaaacagaggcctggacagcaggttgcaacttgtgtgcgacttttaggtcgtaattctaactccaagaggctcttgggttatgtggcaactctgaaggataattttggatttattgaaacagccaatcatgataaggaaatctttttccattacaggtaaggcgtgactttcaggaactttacagctaacttaccatccattctttggtgttggaataaaaaacatttagtattgattgattatacttgttgaggttcagatttcatattggtagaattatggcaagatataaactgaagttaatcactgatcttactatatacagagcctgtggccaaaagaaatagaaaggcctgtgccaccttattttttgtgttggtaccatagagttggccatttggtgtataatgtagtgtaagagtaaggggtctgactgggtgtggtggctcatgcctataatcccagcactttgggggctgaggcaggtggatcccttgagcccaggagttcgaggccagcctgagcaacacggtgaaactccatctccacaaaaattaccaaaattagcctgacatggtggtgcatacctgtagtctcaccaactcaggaggctgatgtgggaggaccacttgatcctgggaggcagaggttgcagtaagctgagatcgcaccactgtactccagccta

SEQ ID NO: 322 - DNA, 1229 bp, Homo sapiens
acagctgtaaaaatgtcttattccagcattttctaaaagattattcatatgaataaaaggtagtcttgccttaagcctagctcagtctgctgtaatttttaattggtctttcaatcttaagaatctaatttttgctattgaggagaaaaaagcttactgaaaatgtttaatacacctgcgctcctcatagccaatcagaaattaaactgggcatgttacttccaaggaagtggaaattctataagggcaagaagctttagtatttcctaaagaagctgctgaagtatcctcttttagtagcacacagcaccttgcacagtatttaatatataatgtcaatcaatatacttaacaatgcaggataatttggtgtatgatctagcacagttcaagtacttgacataaagtagatgattaaaaattatgacatactagtatttcaacaattttttttaataccagacttcaaggagaaacaacatttcagtcatcgtacgtgtaagaatgattaactcttaaaaaatctaagggctggtctgaaggtagtgggttatctcgattgttcagtcagttacagatcgaacttccttgttctcctctttccccccttctcactactgcacttgactaaaaaaataaaagtctaagaaagttcaggtgtgtcgtattgaatcacaccgttaagtaatgacagtgtacagcaactacataaattatactgattttatggtttcaacatttctatgaagataatgcccatgtccctactctagccctgacttccttcctaaactccagtcctcattacaaactacgatatattcaaaaccaattcattttcctcttctaccaatcacattccttccataactgctatataataatttattgaacacttacaacattaccaggtattatgtattatcaaattaatcttgtacaaaatcatctccatagtttctcttttccctcattttacaaattggggaaatctgaggaattaagtaaaccttaccaaggttacaaaacccagcgcaaaataatccagaggatttgagtttggttaagaacaatgtcagtgaactcaggtctgactccaatgtcatcaacttttccacaaccaaactcaaaagcttactgttcaccttttgctcttaactcaccaacttcaacatcaacagctgacaatatactatacatcaaatatattaaatagagataggagaatc

SEQ ID NO: 323 - DNA, 1258 bp, Homo sapiens
aaaaaagagaaaagattgcatatattttattcttcagatgtaaattttaactctttcctgggcctaaactcatgcaatttttgaggtagagactggagaagtgcctttgtctactttggaattatggtctgtaaattagtgaagtttctggagattatattgtcattagacttgggcttttatgaaatacattgtgttcacgtgtttacgttcacatgtggtaattttttctagtgcatatttgccaggaagtagcaattggagagtcttagaaaattgctcaggttaagttactttgttgaaagcaatgagtttgtacttaagtgagaacagttcaaatgtggatacagtatttgtgtcacatcagagaaaattcctgatgaatttaacttgatggtggttgtaaagttgaatgttgccttcttgacaagtttcacagccagtgaaaatattatttgggtttcagggtgtgattgctgccatgagagatggttttggtttcatcaagtgtgtggatcgtgatgttcgtatgttcttccacttcagtgaaattctggatgggaaccagctccatattgcagatgaagtagagtttactgtggttcctgtgagttgtttctgagaaaagttgggaggtgtttcttgatgctttctttttcaattgaaagttaattttgttttatcatttttaggatatgctctctgctcaaagaaatcatgctattaggattaaaaaacttcccaagggcacggtttcatttcattcccattcagatcaccgttttctgggcacggtagaaaaagaagccactttttccaatcctaaaaccactagcccaaataaaggcaaagagaaggtaggttttgcataatccaaatgatttttgtagctgtttatttctcttctgctttaacagcacatagtaatagagtacatataatcagcggaagtttgtctctttcagaatttctgtcatattaacagtgaactaaacaaagtaaggtttcttaaccttgggattattgacattttgggatgaatgattctttactgtgggggatgggatgtttagcagcatttctggcctctacccactggaagttagtattctgaccccttttccctgcctcccattgtgacagccaaaaatgtgtccagacattgccaaatgtcccctgggaggcaaactcattccaagtagagaactagttatataaaatgatagtactgtcttccaggcaatttaaaactttcaaa

SEQ ID NO: 324 - DNA, 1160 bp, Homo sapiens
tcttggcaatttttgagtgtgagatgtttgtgatatatctgggtagagatatcaaatctacagttgcgtgtataggtctgagacttagacctattaagtctaaggtctatttcctgcctataggggaagtatatagagctgtagaattcatcagcatacacagttaaggaaaatgtagttaagaaagcccagggagaatattatttttatcttggcataggagagatgagagatgcaagaggagaaggaaattaaaatagaaagttggagaaagtgctagtaatgtaccttccagtagcatgtggagggaaaagtcctaagagcatgtctgggattatctgccttgaaccttatctctttcttggcaagccttgaaggaatcagattgtgttgtaggtgtggttattattagttacagtctgaaggcctcaatttatatagttgttaatctcagaacagccttacctggtaagtttcttcatctgtaaaatgacgtataagttctcacaaagttacttgtcgatgttcatactgcttttaaatagcaggcatttaaattcccatctgactctaaagcgttttcactgcagtaagttacaaaaacaggtagaatttttctggtgtctttgttagtctgtaacatttttttaaataaaaagcacattttgggttatttgtctgtgaaaaattaagggaagtaattgcttggtgtataggtcttttcttaaaacatttagactaacagtaccattatgtcttatacagtctatgttatcttaaaaacaaaattgaatttacatcgctgctacacaaatatgaaggcataaaagcaacatgtggtgtctctaacttgtttccattctccaatggaggtggatatcattacttttaaaagcatagcaagttctcttaaagtcacttcatttactcaacttttatggctgtttactcagaaataattaatgagatagctactaaatttagcactcactgaaaatagagaccatctcctatttatctctgtatcaccagtaccttactttgccgcagattatacctacacaaatgtttgtttaatgaataacctttataagactttagtattccccacctttggtagcattcgctttgtggctttatttcagttattttgttgaaat

SEQ ID NO: 325 - DNA, 1402 bp, Homo sapiens
attccacagaggggcggagtccctcagtcaggcgctggctgcaatcacacccgagcgccagccccctccagcatccctgagtcccagaggagatcgccgaagcgctggaaaagccgttccgcccacgacttctggtgccgggtcggcggcgactgggggagcccagttccgagaccgtaccgcacccactgcggacctcctgggccctacatagtaggcgggtcatgcagggcagcgggaggaggggcgtgggagggccaaggccgccgagtccccgctgttcagccagcaggagcgccccgcagccctcccgggacacggtggacacgcttgtcccagacctgggcgccctcctgccgggagccaggactggccgcagcaggcgctgtccgggcccgtgggcggggtttcgggagggggcggagccaggcccacggccggtgtcaggttgctccggtaacggtgacgtttcgcggcgtgggcggggccagcacgcaggttgcatattttaggaagtgaggaggaggcgcgggctggagctgcggcggggtctggggcgcagagcagcggcgggaggaggcggacacgtggcaacagcggtagcagcccgggcggcggcagcaacagcggcggcggcatcggcccgagccgccggccgccctcccaccctcccgccccgcggcagccctagctccctccacttggctcccctggtcccgctcgctcggccgggagctgctctgtgcttttctctctgattctccagcgacaggacccggcgccgggcactgagcaccgccaccatggggaagggggtgagtgtccggcgcgcccggggagggggctcggggagccctcgaggggaagaggaggaagtcgggagggcgaccgcggccagcgggaggcggcggaggaggaagcggcgccgcgtggagtgggctggcagagccgcgcggcttaaaagacgacgcagtttggaaatggagggagcgcagtaacggggggcgggggaagggagcgccgaggggctggagcgcggcattgcttaggggggtgggcggaccctgggcgggggctgcgcgccccggaggccgagcgggccgggggctccgagaggcggtgcttgggaagcctcggggccgggaggagggggcttgcagcagcgggggcggccccgggactgagccggcatccctgagcctggctcccctccctgcgaccgccgtcacctccttctccttccttttccctccgccctccgtgccctgaggaaaggcgcgctcctccccttcccctggggcgctccgccggggcctcctcccgggcctccgttcccgccgcggccccggttccggcgggggcagcctccgggttcggggctccttctcctggggacgctggg

SEQ ID NO: 326 - DNA, 1202 bp, Homo sapiens
gcatttagatgtattgtatcatttaatccttaaaaacatgaaatgaggttggcactattctttatctccacgctgtggaagaggaaattgaaatgtagaagttagtaacttgcctaaggatacactgctggtaagtggtaaagcccaggattttaactcaaggctgtctgattgagaatgcggactcataagcacaatattgcactctaagttaataatgtaaagttagtttcattctttcagtagggaagatggaaggctgcagaatagggattttgatagcaaaaatctcctcattaaccccaaaaggaagtggcactggcagggccattctgaagcctaccggtagcttcagtattgttcttaatgctcttggatggagagaatgtatcttgagccaatgtattaatagtagattgctttgcttatgtagtaggcaatatatgggtatacattttcctgactattatcttaatgactattccaaattatgactaccttaaaaactaccaaaatcccctgctccagaattttcagtttcagatgaggttcataattcatggcctcacttttcccacattctcctacaggttggacgtgataagtatgagcctgcagctgtttcagaacaaggtgataaaaagggcaaaaagggcaaaaaagacagggacatggatgaactgaagaaagaagtttctatggtaagtactaggaggaatattgtattccatccttattaaaaatccatgatttttaatcccccaggcctcactgtattcttcaaagaactgctatatattaaaagagatcatagcagctgtacagatctcatctagtcgtagaggttaatgttgaacatatactttttaaaagctgttagagggtaggaaaagttattcagtcactctggcataaccagagataacagaaggaacttaggttgataccatgagtctttgcttttctctgtattatatcaaacattgggaaattcagcctctccaggcgatggaagcttccatagacttaacctgtctagaatcgacctggtcatcagagaaggcagataaggttttactagatccctgagagctgctgggtttctctgaagtgttatggcaaatagtaatgggccacggtcactcagctttagccattctccagtgaagagctgtcaatgataactgtgtggttgcaaagcc

SEQ ID NO: 327 - DNA, 1205 bp, Homo sapiens
gctggccactgtcacggtaagaggcaggtgatggtcaccctgactcagatcagcttgcacgaatgttacactcttccgctatcctattctaaggtattgccaacttatgttttattctggatgtttgatatagttcttcttgagagccacatcacgtggtgaattttgacagtgagaaaacctcagcatttgtttatacgtaagataaccccaaagcatacattttgcttttaaattatcacgtggtcctgaacagtgcagtggagaaaggagaagaacttgggatcaagtagggggatagaatatggtagaatcctgttattatttttcttaatagattgcttttctggaaggaaggggaagcctcatgtatgggttccccttattatttcttcaaacttcagaagaaggttggagagatttaattttagacaaatttcttccacattaggatatagcaagaatctgtatagaattccagcctggttgagtgaagtaataatcttcctaatattttttaggtctgtctgacacttactgccaaacgcatggcaaggaaaaactgcttagtgaagaacttagaagctgtggagaccttggggtccacgtccaccatctgctctgataaaactggaactctgactcagaaccggatgacagtggcccacatgtggtttgacaatcaaatccatgaagctgatacgacagagaatcagagtggtaaggccagggttaccacacacctcagccacctgctgacttcgcttggttttttttcttttaagaaattgcatgaaatttcttttttttttttaagctcatggcagctttttctttcttttttgttttttttttttttatcatttagtgaagagtcaagggtatgggatattgattttttgcatgtcagtagaaactttaaattgccctacaaacgtgactgaagaatgcctaaaatgtgattggtttcattaattgggaaatgagatgtatcactgcagatttctatgggactttaataggagaactgagaacacagcctttgaagttaatgcattgttgttctgttgtgttttcttgcctccatcaggtgtctcttttgacaagacttcagctacctggcttgctctgtccagaattgcaggtctttgtaacagggcagtgtttcaggctaaccaggaaaacctacctattcttaaggtatg

SEQ ID NO: 328 - DNA, 1215 bp, Homo sapiens
gtgccttcccctactctcttctcatcttcgtatatgacgaagtcagaaaactcatcatcaggcgacgccctggcggtaattatgggcattctgactttggttggaggaggagtgggaggggctatagttctattggttttttgtttccctcaaggtgtctaggctccctcagtggtcagtctgattagctaaggtgactggaccagcaaactgaccatagtcacatcttcagaatgtagatctcagttacagtttgaggactggtcatgttttagactttaaaatacaaaccaagtatgatttagtgaaaacttgtcagaatctaaaccatctttccaggtaacttggtattcctaaaaacatgtaaataagtacagttgaggtcccatgtttggattttaacacacccgacccccatcatcctccggttggttttcatccctgtttccctctgtaatgctggagcgaggaagactcactgtagtgtgtcttgtctgtctctttgccacccacaggctgggtggagaaggaaacctactattagccccccgtcctgcacgccgtggagcatcaggccacacactctgcatccgacacccaccccctctttgtgtacttcagtcttggagtttggaactctaccctggtaggaaagcaccgcagcatgtggggaagcaagacgtcctggaatgaagcatgtagctctatggggggaggggggagggctgcctgaaaaccatccatctgtggaaatgacagcggggaaggtttttatgtgcctttttgtttttgtaaaaaaggaacacccggaaagactgaaagaatacattttatatctggatttttacaaataaagatggctattataatggaatttgtctgtgccctcgtcgcttctttggtacagatgtctatgtgatctggagctgtggttttcaacatgagtccctgaccagcagtttatcagcatcacctggttgcttgctaggaaggcgggcccagacccactgagtcagaaatgcatcagcaatgtggcttaataagccctcaggtgattttgatttacattcaagtttggaaaccactggctaagaggaagcattctgcccgtgctcttttagttggagtaggtgagtttacctgacccattttttctggctgctgcctggggtgatagggctgtaactccacctgctgccttagcatctggctttt

SEQ ID NO: 329 - DNA, 1198 bp, Homo sapiens
ggcacctcaccgaaacacttaaggcctctgtatggtagaggttggaatccgtggcctttaaaagtcctttcagctccttcgctcctatctgcataatttttggcataggccaagcggctggttggtggggtgtttagctcaggacgagaggccgaacgagcggggagttggctgaggatagactagacacgcgtgggtgactccagcgtgatggaacgcggggtgtcccgggatagggctaaagcgatgggatttccagacgagtctttcccaggccaacttttaaaggtcggaggaaagtttctcgtggggtgggggcccagaggggatggcagggtgggctccgacgcctcctcgcctttaagcgggtggccccggctcttcctccgttacctggagcggggaggggcttgggaaagtttgtgtttgttgctggcaaagcgccggatgggaggcgcgggcgggcgctgcggttcttcccttctgctttcgggaagcggtcggggctgcacactcggatcggcggggccggctcccgggcccggccggctggaggagggagggaaggaggcgggagggagcgagcggagccaggggcgcacgtacgccccagcgctgggatttatcggctcgcgaggagagcggagcaggcgcgcggcccaggcggaggagcgccgactctggagcagccggagctggaagaggaggaggaggagaggcggcggggaaggaggaggagggggagagtcgctcccgccgggcgagcatggggcgcctggcctcgaggccgctgctgctggcgctcctgtcgttgggtgagtgtgcgcggggctcagcggggcacacggggactggcgaggccctggagggctcggcggggcgcggctgcagcgcgcggcctggggcgccgagggtgcccgggctgctcccgggaaacccggccggggtgcgcgggttgttcggcccggcggggagcggccgcggggccgcccggagcctggcgcgaatccgctcgggccccgcgcgcggggtgcaagtggccgctccgccaggccgagcctcgcccccaacatgtgccggggggagtggcccggggccgtctttcccccaggtctccctacctgttggccgccgggagcccggctcaccttgaactcccggcccggaaggtgctgcggtcccggcccgggtcctcggc

SEQ ID NO: 330 - DNA, 1199 bp, Homo sapiens
gtgttgctaacagaaaatctcataatgagtaccagtttctggttttccagttatgccaatcaaggattgctgctggggattgtcattggtccaattctccagacagcccagatgggtacaaataggtcaacctgttatcatcttccaggagaacgggtttagttcttacttgggactcctctgtacacgtgagtgaggaaagcatactaggaatcatgcttttttttttttttcagagatagagaaatgttatccaagattttaaagaggtaagatgagaaactaatttggagttacaatgggaatcaataaagaaggaaacaaattaagtctccttaatcgaatcacagaatattcaagttgaaaaaggcagctagtcaagatcattagctggcccttcaatttccaagtagcaatctgaagcctagaggactgaggttaaataacttgcccaaggacatctagctacctagagaccagacctgagttttggtttcacctctgttacttaagagttgtcaactgatgatagtgctaagagctattattaacagtctgaccctagtttctcactagaaactaggcaagaaggtatctggcaccagcttgtcttaggccagtatagcttaggacagggatcgacagattttttttctttgaggcttttcaggccacatagttctctgtcacatgatgtgtgtgttttgttttgctttgctttcttttcttaaatccctttaaaactgtaacaataatttttagctacaaaaacaagctgtgggctggatttggcccatggcccatagtttgccatttctgatctagtatgtcagttcctttgagctttagctgtcttctaacaggaatccatcacttgaagatcaagcttgtgaccgaatttaccgagtagggcagcagaaagatgttgtcatacacaggtaagtaatggtccccaggacccaggacccttctcaacttgtactttgtgaaagtctttctttcttaggtagtgttttcatagaatttaaagtatttggtgatgactttactgatgatgcccctgaggcataccttcaggcaaaccacagtcaggagaaaaacgagcaatttggggtaagcttgaagttggtcactgcaaaagaagagcaaatttgtgtatatggtgagggcagtccatgaaaggatgctcctatctttta

SEQ ID NO: 331 - DNA, 1148 bp, Homo sapiens
ccagcgccgctgcttcggcttcccagcgaagtgggagaccttcctccctgtttgcagacgtccgtgggagacccttattttttccaccgctaaggttaagagattctggaatagaagcgtcgaaggagatcaagtgaaccttctacaactcctcggatgtcgccagtctccctttcggggcggaagactacgtttgagcatctcactgaggtgcaggaatggaagaacccaccttgcagcttttctgcagtgtggcttgcctgatctacccctaggaatgaagaggaggcttgtaataatccgatgaagtacagatgttgaagaggatatcgcaggacctaaacttgtgatcgtttgggggaggtcacacacgtttctgagtgggaatggatgggcgtgaatgacgtgccctcttaaaaagcacaacagtcctttaagaggagcaaaattgagttttcccattttggccaagattttgaagacagttcaatgtattctacatttgacataagatgagaactttctaaagtattctctccaagagcgtaaacgatgactaccccagccctgctgcccctctctggacgtaggataccacctctgaacctggggccgccttccttcccacatcacagggctaccttgagactttctgagaagtttattcttctccttattcttagtgccttcatcactctgtgttttggggcattctttttccttccagactcttcaaaacacaaacgctttgatttgggtttagaagatgtgttaattccacatgtagatgccggtaaaggggctaaaaaccccggagtcttcctgatccatggacccgatgaacatagacacaggtttgtttatttcagaagttctggtactaacatttggcagagcaaggtacggtgattggatcgaatctgtcttttttttttcttgcagtaaaatgtaatttttcgagtcataaatattgtattgttacttcaagactggctgaataaaaccatagactggagggactctacctccagtctatggtagagtccatagactggtaggactggagtcctacctaagtcgttcttctcttcggttttatataagaaaaacatttgcgttcagagttgtgtctaatgtggacatctggg

SEQ ID NO: 332 - DNA, 1406 bp, Homo sapiens
atgcccacatctgttgggaatgttacattatagtatctatgcacttttgaaaacttaaaggttttagaagcatatgctgtactatataaatgaaaaacttcctgttctcttatcttttcctcttatttttttctttggccttatgtttatatttttgtctcttctctgttacttattctatttttgttttctctcctccatttagttttcactggtgtctgttttttgcaagtgtctatggataagttactgttatctttgctcttagtctggaaattgtataaagagattataaacagagtttgatcttaggcatccagggttccttttctttctcattccagatctgaatgtgtctcactgataattctttccttttaatggcaaaagtagaaaacaagttcctgggtttaatggagaaacctttatgttttatatttaaaggttgacattcttaagtaggctcactgttacgttttatttccttcttttctcacagggaagaggaagaacgtctgagaaataaaattcgagctgatcatgagaaggccttggaagaagcaaaagaaaaattaagaaagtcaagagaggaaattcgagcagaaattcagacagagaaaaataaggtagtccaagaaatgaagataaaagagaacaagccactgccaccagtccctattcccaaccttgtaggaatacgtggtggagacccagaagataatgacataagagagaaaagggaaaaaattaaagaggtaataagctgagttttgtgatatggagtgtttatggatttgtatttggatacaaacaaatatatataatctatggtatcctgttttgatctgtttattcttgggtcatagttgtagtatagtttccaggttggtaataaggactagaactctttcttgtttttttttttaatgttaattataatgtaattattggacacttaaaatatttttgatacaacttttggatggttagtgccactcattctttgttcagagatcttttgaaattcagcgttttattaataatatatctgtatataacttattgtctaagcagtttcttaaatgttcagttacaaagggactctgctagatactatgcagatcacctcataaacatgcttctaaagagctagcattatatctccaattttttaaggaacatgtcatggtatccctcaactatactgtagattaagaacacattccttccaaaaagtctccatggattgaaaaatgggaaagaattgatttcaaaattctttaaatttatttagcctcagaagtctttcaatttgttattctgtagttacttaaaagtaaagagaataccagatgggaaaaatctagtgaatatttgggttaaactttgttaattagaactcctaa

SEQ ID NO: 333 - DNA, 1230 bp, Homo sapiens
ctctgctaggggagggccgaagggaaatgtggggttggagccccaacacagagtacctgctggggcaccacctagtggagctgtgagaagagggcaactgtcctccagaccccaaaatggtagatccaccaacagcttgcatcatgcacctggaaaagctgtactcaatgccagccagttcaggcacccaggaggttgggctataccctgcaaagccataggggcagagctgcccaaggctgtgggagtcctcctcttgcatcagtgtgacctggatgtgagacatggagtcaaaggagatcattttggagatttaagacttgactgacccaatggatttcagacttgcatggggcctgtagccctttgttttggccaatttatcccatttggaatggctgtatttacctaatgcctgtacacccattgtatctataaagtaactaacttgattttgactttacaggcatgtaggcggaggggacttgccttgtttcagatgagactttggaccatggacttttgagttaatgctgaaataagactttgggggactgttgggaaggcatgattggttttgaaatgtgaggacatgagatttgggaggggccaggggccgaatgatgtggtttggctgtgtccccacccaaatctcatcttcaattcccatgtgttgtgggagggactcagcgggaggtaattgaatcatgctattcttgtgatagtgaataagtctcacgagatctgatggttttaaaaaggggagttttgttacacaagctcttttctcttgtctgccaccatgtgagatgtgcctttcaccttccaccatgattgtgaggcctccccagccacgtggaactgtaaggccattaaacttctttcttttgtgaattgcccagtctcaggtatgtctttatcagcagtgtgaaaatggactaatgcagcatgatggtgcatgcctgtagccccagctacttgggaagctaaggtaggaggactgtgtgagtccaggaggcggagcttgcagcgagctgaaattgtgccactgcactccagcctgggggacagagccagaccctgtctcaaaaaacaaaacaaaacaaaaaaacagaaaaaaacccagccaggcacagtggctcacacctgtaatcccagcactttgggaggccgaggaaggtggatcagctgaggtcaggagttcgagaccagcctagccaatgtgatgaa

SEQ ID NO: 334 - DNA, 1196 bp, Homo sapiens
ccaaaagtgaaatacaaactaacgtatttttttaaacaaacagttccaggaaataaacagctgttgcatacctgacatgttaattaaaatgatcctaaatcaatattttcccatagtatttcctaaaacactcatctatgagaagactccaccaaaaatgagtttcatattaaaataagtttggataatgcttcatattgtcttattttcttagtgagtcacaatgacgttaattaattaaagatgcggaaaagtagtgaaacctatttaaccttggataaatcagtgtttcccaagctcatataaccgtgaaacatgaaaatcttttcctctttttaatctcccattgacatcccaccaagagcgtgttttgtgaataaactgagaatcgctgcctaaattgttgaacaaccattgtcttataatcatgttcttagattcgggaacaggaaaatatccagaaaaacaatttcaatgttatggttaatttgttttaaggtttgctgcttcagatatgaggaaattcagttaagtagaacaccacttcccctaataatatgggataaatgagatatcactgcattttacattttgactataagttgtgtgttttctagtaggatatttcataaaagtagtctagttttctgttgtattacagcttggtcatgtaagtcctagtaaacacttgatagattaactatataggctcttaacaggcatctcaaatgagtaattgtgtactgattgtgtgttgccctataaagaagtggggataaaagttaaatacatctatgtttaaagttgcagctcacctaactgatttattcaagcagtctttggctacgcctccaaaatgcccaccagacacatttggtaaagatttctttgaaaagacatggaggtaagctaatccaataatgtgttctaattagtattaggtatgcagtgattgaggaaatggaatatgcaggtgctataacttttggtgactacatcaatgaattcacagcccttcatctcccatactattaataattcatcatatagtggtgagggtttttggttttgtttttaagctgaaatcattgccccttttcaccatactttcctttcctttcacatagacacacagcatcctcaaaacgctggaaagaaaagatagacaaaacgaggtaattataccccaaaacgca

SEQ ID NO: 335 - DNA, 1215 bp, Homo sapiens
ttggacgctgattcagagcatacacagccttcttgagaactttgccccaaccctgcaaagtattctcacctagttggcattgtaattgtgactgcaaaaggccattccaccgttctgcttcaggatgttggggaacatggtaagaccagtgaattccatgagcatgagcccactgctgcacttctttagccataaagtgaatgccttggttagaggcaatgctgtgtggaataccatgacagtggataaggcattccatgagtccgcggatggtagtcttggcagaaccattgcatgcaggataggcaaacccatatccagagtaagtgtctattccagtaaggacaaacatctgcccttttcacaatggaagaagtccaacataatcaacctgccaccaagtagctggctgatcaccctgaggaatagtgccatatcaaaggtgcagtgttggtttctgctgctggcaaattgggcactctgtagtggcagtagccaggtcagctttccaccggcccatcttgttttctgcactgggaagttggggcatgagcacaaatgttaggacctgaaaggtggtgaactctgcctgggcagggcaaagccagaggaaactctggtggaggtccgtagcagtcctgatgtgcaaatcggtcatccaacctgggtgtaggggcgaaagactaattgaaccatctagtagctggttccctccaaagtttccctcgggatagttggcactctggcaaaaaccccactcttggtaccaatttactgtattagtccattttcacgctgctgataaagatatccccgagaccggaaagaaaagaggtttaattggacttacagttccatatggctggggaggcctccgaattatggtgggaggcaaaaggcacttctttcgtggtggtggcaagagaaaattaggaagaagcaaaagcagaaaccctgagaaacccatcagatctcatgagacttattcactatcatgagaatagcacaggaaagactggcccccatgatacagttaccccactgggtccctcccacaacacatgggaattctgggagatacaattcaagttgagatttgggtggggacactaccaaaccatatcattcatcaaaaggtgttggtggggtagagggtagttaggatgatccattatctccatcatgacgatgatggtattgatgatgtaagtcact

SEQ ID NO: 336 - DNA, 1262 bp, Homo sapiens
cctaaatccccaaggataacaactgtcttgacttttaacagcagagattagctttgcttggtttcatactttatataagtagaattgcacagtatgtactcttttttgtttggtttctttcaatattatgtttgtgagatttattcatactgttgtgtatagttgcagatcataggaatttctcttgatctttgtaactttggatcaattaaattgtagttgattagagacatgcccagggttgttgaatggccaatgattactatcccacagggtgaataatctcttttctccctcccttggggcattcccatgtaggcagaaaactcttaaattaggagctggttggcagatcataaaaatagattgagccaagcaccatggatcattcctgtaatcccaacaactcaggaggtcaaggtgggaaaatgcttgaggccagaagttcaagaacaacctggacaacataacaagaccttgtctctaaaaaaattttaaaagttagctgagcatggtggcctgtgcctgtagccacagctacttgggatgctgaggtgggagtattgcatgagcccaggtgtttgaggatgcagtgagccgtgatcatgccactgctctccagcctgggcaacagaatgagaccctgatagtttgaggatgcagtgagctgtaatcatgccactgcactccagcctgggcaacagagagagaccctgatggtttgaggatgcagtgagctgtaatcatgccactgcactccagcctgggcaacagagggagaccctgactcctaaaaaaaaaaaaattgattcattctcttttggctgggtaaagagcctctctgctttctagtaatgggcaaacaaacattcttcataccacaccccagttttttaacctcttttgtttagagtgtccttgcacatgaattagaatcctactggttaagatatagtatcagataagagtcctaaggaatgtcctcagccattctgtagttacatgaatcttcccggggatttgctttgtgctatcagaggagatgccttttccaagtgaccctttctcttgggcctagctctgctcttaactctgagaccttggacaatgacttctttctgtgcctcagttccctaaactttaaaaaaagagtgtggtctatgtgatctccatggtgccttccaaattcaggataccacagttctgtgacgataaggggatcctacactgggggcttccttctggttgttaggttacctttg

SEQ ID NO: 337 - DNA, 1343 bp, Homo sapiens
ttttattcaaatcaggaaccacttctgttcagtttctctaaagctgagctttcaaactctcctgccagctatttctgggtcatgttaatctttgtttttctgtggttcttgtagattctcatttatctgacagtaaccttatttgtcaaatgaaggtgacaataacatgattatgctgttttggcaattcaataaaaaaacacatgtggtccaccaagcaaaccgcctgaccaccaggcactgctcagcttacattagttggacaccttgccctcctctgggctgccctgatggttgtggtgttcagttatgtctccaactcttccttctaaccaggccttcttctctcactggcttcccatacagcagccaagactcagccccactgatgcagtccctgcccctctttctctagcaccccggaggcctgagctggaaagcaggcactgggccacacttgcctgagcaggaccttttctaccttctttgtgatattttccaattcctccaccatagggttgctttttagtctccagcaagacaatgttaacccaccaagccttctgtctccgttcttctcatacaagtcaatttttttcagtattacctcatcagaatgatgactagaatgttgagtcccccatgaatccattcattccttgattctttgattctagattttaatatgtactatgtatatttatacatattacatttagttacagggcatcatattagataccacacacaaattatacttaagactcggtttataaaaatacacctaataatttttcaaactagaagttacgttctcatggaacacccctcaattacaggaatatctttttgttctgaagaatggaaacattctgaactcagtgactcataggcttttgattttgctttggcttgtggggtatggataattctgtaagaggagagtcctgccaccttaggtctcagtggggacagctaggtgtgcatgtgcttcatgtgcagtgtgttccagggctcctgaaaactgtggttgcctttaccccctagattcagctgtgtcccctccagtccgggatgttggtatgaattccccagctctggtcttccccagctctgcttcctctactcctggctcagaaacgcccataatcaacagagcaaatggtaaatatggcaactaaagggcccagggactgatgatggaaagtgattaatgcaaacaaccttttgttgtctctaaacatattatctgtatttagagagttttctctgcatgccccaaggcctttagccctactccctgcaccttctgtggctgcctttcttgccattgttcatcctcc

SEQ ID NO: 338 - DNA, 1173 bp, Homo sapiens
aggcattggcatggggcaataaaaccaatggctgcccctgagatacttaatattgtcgggaaagatggcacacaaacaggtaattttaacaggatgtggtaactgctgtaacatagggatgcatcaggttatgaggcagcccagacaagtggtatgtaatgacatcccttatcactgccatttttttgtcacagctcatcacaggtgtctgttcctgggcttcagatgggttactgggatcctctttagggaaggagccatgctgaagattcagtgaaatggagaatacagggattctgagagaatcaatgggacagaatgtgaggggagatgagtggtctctttttgaccactgagaaaacatttcctgagagctcctctgtagacttgattggtgctgtgctgtgtgctgtggatacagatatgaagaaaacattatcccagcgctccaggagctccatctggaaagcaagtcactgccaaatggcatgagaagtgctgtgacagacttgagtaaagtccacagggttcagaaggggcggtggtcgtcactgcatgggggtgacctcagactgtcctgatccctgtattggcccctttcacagttggataaccagtcccagcctcgtgaccctgggcctcagtcagcgtttagcctaccagggtccacccagcacctgcgctcccagctgtcacaatgcaaacaacgctatcaagatctccaggagaagctgctgctatcagaagccactgtctttgctcaggctaacgagctggagaaatacagagttatgcttagtaagtaactatgacttactagtaaagaaaactagcctatatgtcttataagttctgtatgttctataccgacataacgtggttattgagcacacgaagtgtggctagtgcaacttggacatttggttttatttaattttagttgatgtagtataaagtggccatatgtggctgctaactaccttattggacagtacaggtctagggtcttgggactctaaattagttcagctccattcaacatttattgaacccctgcggataaagcacttgccagcttcaatggggctgctagagatgatagtgtacaatccctgacttacagatatctggtcccaactaaagcctgggttatctgaaggggagataatggca

SEQ ID NO: 339 - DNA, 1154 bp, Homo sapiens
tactggggaagcactctggaatcttctgattaagtcatttgcaaaagattaatagccataagccttactcttaatggatctgccatttcagtttcaatggcttttgaggaaaaaggagtcatttaaggaaggagataggaagtgtaggccgatccatccacttttcttagtctcccaattttaagagaccctttcttgcacaaaattttttgtaactttccataagtaaagaggaaggtaatggagccgtagaaatgtcaacccatcaaagactagtttgtcgtgtcattacaacaaggcatttagggaacatctttccttaattttactaatagaccaaccaaggaagccttctgaatcgctagtaagattcagctctgggtgattcttcatttctaatggctcatagtgattacagtttatgttaataatcactcctacttctgtcaacctccagcaagagtaaattgatagcaggataaattaaaagtctgatcttaatgtcataaatgtgactagaatatggtactaactttttcgggtctagatagctggaatgaggcttgcaaacagtgttatctggagagagcttgctggtctaacaactttgtgtgataatttggcatctgattagagagcatgagtctgataaattttataatccacacagagatcatgctgtggttggacacatcatttaataatatttagcatgatataatattccattttctctacaggagcacagactctttctcatactggattattttacctttgacagtcatttttcaatgacagtaattttaaataaagcatcgtgtgcttatagaacctgtgcttgagtaaaaatagtcttcaaataaaaataatgaagtaaatttttacttaggccatgcttaattggaagcatagaacttaaattgagaaaaaaatccatatgatagattttgtttttctcatgcttcccttttgaataatagcaaataatgcagagtaatggttctaagagttcagggtagatgaagtctgtaggttttagaagtatagagttgaaaagaacctccaagaggacttatttaatgagtgaaataaatgtccttagatagatattgtccctaaactcttttctattgaaagtttatagtattgaa

SEQ ID NO: 340 - DNA, 1388 bp, Homo sapiens
aaaaggcactgagataggaggtctgtgttttttattttagcttaacttgttactactttctagcccatgaattttaatgtctggcttagaagaaaattgctacaatttgggatgctgaacttgtggcctgggtgcccttatagtgccctctcctatgctagatagcagaagctctttggtccttgtataagggatccatattagaaaccacttgcctacttggtccatgtggacaagttcctagtatggctgccatcatagagagatcacagtgcgtgaaaattgagacaatttagtattgaaggaagtatttcatttctcctgctactttttgttgctgattgacttaccactttaatggttactctatgtaggaaaaataacaaggtaatatcccctaagaaattctttaaatcctagatttgaggaaaggctttattcatttgaggctaaaagacatcattgacctaaaaaactgtttttctttgctgaattcagattcttcaagagaaacttaatgaaatgagctatgaactaaagtgtgctcaggagtcgtctcaaaagcaagatggtacaattcagaacctcaaggaaactctgaaaagcagggaacgtgaggtaacatatttaccaatcaaggacctgtgtggaaacaattggtcccttcaaagtagacaagtattttatattttgtcaaaatggatattgtcagactagcatgtcttagcctggagaagttgtagcttaatctcaattgatattttggaatagtcctgttactaaaatgtgtacaggtgatataatggaatttataattagtttactaacatatttgatattccctctctcattttcagactgaggagttgtaccaggtaattgaaggtcaaaatgacacaatggcaaagcttcgagaaatgctgcaccaaagccagcttggacaacttcacgtatgtgagggtcacgtaggacaggagagacttcagttggggatgtgccattttggttgcagtcttgattttatttttagtctttgtgggagctcagtgcttgccctccttgtgattgtgatttctactctcttttcagagctcagagggtacttctccagctcagcaacaggtagctctgcttgatcttcagagtgctttattctgcagccaacttgaaatacagaagctccagagggtggtacgacagaaagagcgccaactggctgatgccaaacaatgtgtgcaatttgtagaggctgcagcacacgagagtgaacagcagaaagaggcttcttggaaacataaccaggtaaatcattaactattttattgccctaaatgctgactttgccctgatcataactttttagcaggacagtttgtgttgaacccttg

SEQ ID NO: 341 - DNA, 1121 bp, Homo sapiens
ccgattctggtggctgtgaaataatgaatacagtcactggtaagggagaacctagaacccagtaggtgtatattttcaggaaactgagctcacagagatgtgtattagaatccaagtggaacttctgcctctaaagaccttgcaagaaaagagatgtcctgaaaatgaaaggttgcacctcatttaatgaagcttaaccctatgtagaaagtctctttcgggggcagaggctttctctgggtgccaagccatatatattagggaatagtagattgttatttcgttttttccctcccagtgcattttaaaaacagcactggctggggcattctcattctctgatggagccatcaatgagatttaacttagtcaacctgtgctagcaacattctgaaattccttcaaagaaggcagtcctttgggaaggtgtttttttttttgtttttttgtttttttgttttttttgactctaatcaacattccttttgttggtgacatttgtgattttcagtaatctgagtttttgatggccttttaaacaagactccagtatgtgaaagttaattgctgtgctccacagatcttgtctattggcccctgtagaaagttaacctttgttgttttccttttataatttgcttattgcacaattgctttagggtaagtgaattatattaagatgccttgaaattatagcactccttgattaagaagctaaaatgtttctctcatttactccttaaacaaaagacttaaattagtttgggtcattattacttttattttgcagcatttggtttgttattagtgtaagagcaagtataggatatggagaggcccctggcttcatgagaacaaaggcaggcccaggttataattacagctttctcctgccccttctttactttctctaccacagttttctccgctgtttgttttcctcttgccacaatttgctaacacttaaaaaattttcctgcacccagtagtttcatatcctgtagacatcctcttaggacattctcaaatttcaaaataaaaaatattcatctatgtagttaattaaagttaaagtttctgcagatcaactactcaaactactaaatacatttacctgagaa

SEQ ID NO: 342 - DNA, 1222 bp, Homo sapiens
ttctagtctgagaattaaaagccattgttcgaagaagggtgcccagggtccagctggtcgccgaaagcttgctccgcaatacaggctaaggaccagcttctttggaagagaacagatgagggaagcaggagagaaaaaaggaagaggcagacgtcacttccccttgccggctccggcagcgggttggtcggctgagcggcagaaaggcagacggggactgggaaaggcactgtcggtgacatcacggatagggcgacttctatgtagatgagccagcgcaggggctgctgcttcgccacatgctgcttcgccacgaaggagttcccgtgccgtgggagcgggttcaggaccgctggtcggacctgagtgtcccagctgtgtgtcagggctaggagggctggggggagggggggtgtgcgcggggcaagtgaccgtgcgtgtaaagggtgaagcgtgtgaggctgccggcggggcggagagtgcaataactcatacttacctggcaggagagataccctggtcacgaaggtggtttttccagagcgagtcttatccattgcactccggatctgctgacccctgcagtttccccaaatgtgggaaacttgactgtataatttgtggcagtggtagactgcattcgcgctttcccctgtatttttgtcgttttaaaaataggttttgtttgctgcagaaacgcatactgggcgtcagcgtaagctgagaatcaggtctttgttcccatctgtaacttcactgaaactaaaaatttgggacatcgtggttctcacgtttgtaatcccagcaatctatgaggtacgtcgataggttatgtttatgttaatatcgctcgacctcaggcgtgtgtgggcaaatatagtgaacccgtctctactaatctcttatctttttttgttgttgttctatagaaataaaactaagcttttcttttccctatgggattaacagcaaacagtccgctggagtgtatggcgcgatctcgccttactgcaacctctgcctcctgcgttcaagctattctccttcctcaaccagagaatactcagcctcccgagtaactggcattacaggctcaggcaaccaaaaaattaggtccggctaattttttgaatttttagtagagacatggtttcaccgggccgggcgcactggctcgcgcctgtaatcccagcactttgggaggcggaagcgggtggatcat

SEQ ID NO: 343 - DNA, 1206 bp, Homo sapiens
caatagttccagttggctcacactgcggctcgcccaccaaggtgctaagcagcccaggcgggaagctttagagcgatatggaggcccacggagctgggaccacggttgttcttttggccttcacttgagcagaggagagaacccttcccttgtgactctggaactcagtgcctcttccaggatggagaattaaaatgctttgcagagaggtctttgcgcctctcatctgagtttccttgggctctttcgcaccctcctctgaagtgggtgaggaggttccctcagtggaaggaatgtgcggaaaacactaaggtttcaggcaggactcgtgattcccgagtcctccgcgagacttcctggctctctgcagcccccatcgctctctaaaccccgaattccttcatggcaaaaagctattatgaaaaggctactgccgtgtccaccagtcctaggtcctgaaacttctttcacacgcaataatatgcaattagatcatacaaccgctccgtcagtggaaaatgattccacataagaagacgccagtaatcagtgcccggctagctcagtcggtagagcatgagactcttaatctcagggtcgtgggttcgagccccacgttgggcgctgtgtttttatttaaccctctcgcttagctaccatggaaacatgaacttctaaatcgccacagcggctactgtccttttatggtaactgattccagaaatcatctccattcaccccaaattcatcaagaaaagaggaatctgggccgggcgcggtggctcacgcctgtaatcccagtactttgggaggccgaggtgggcggatcacctgaggtcaggagttcgagaccagcctcaacacggagaaaccccttctctactaaaaatacaaaattagccgggcgtggaggtgcatgcctgtaatctcagctactcgggaggctgaggcaggagaattgcttgaacctggaagacggaggttgcggtgagccgagatcacgccattgcactcggtctcaaaaaaaagaaaaaaaaaagaaaagaggaatctggggattctagtgtctgtagtgaccacatacttcgaatccacgatgggcttctcaactgggcgaaggcagacaagctgagcagctctgagaagagtccaaaatcgctccgacactgctccagggagaacagccttaggacggctccagaggga

SEQ ID NO: 344 - DNA, 1213 bp, Homo sapiens
aagttgaaataaaatgacattggaaatctatgttttgtcagacacgccaaagagacagaaacggagatgatgtatatatacagtagagatatatgatgtacattcattgtttaaagtgtgtagatttttctgagtttagatttgaggaaaaagatactcagtgatacttggggaaataggagggttttcatatctgtcttttcactttccccaggggtatactctagttgaatatgaaacatacaaggaagcccaggctgctatggagggactcaatggccaggatttgatgggacagcccatcagcgttgactggtgttttgttcggggtccaccaaaaggcaagaggaggtaaaatgaagagggcaaatactgtctgggtgaagggaatacgaacgaaacagaatgaggacttagtattatgtccctctaatggactcctctccctgcttctttttccctagaggtggccgaagacgcagcagaagtccagaccggagacgtcgctgacaggtcctctgttgtccaggtgttctcttcaagattccatttgaccatgcagccttggacaaataggactggggtggaacttgctgtgtttatatttaatctcttaccgtatatgcgtagtatttgagttgcgaataaatgttccatttttgttttctacatttaatgttactttcctgtcctaaaattgaaagttctaaagcatagcaaggctgtatggatcattgtgaagatacttctagggactgaactctatgtatttcttttttttcttttttttgagatagagtcttgctgtgttacccagggtggattgcagctgatcatagctcactgcagcttcaaactcttgggctcaagccatccttctgcctcactgtccctagtagttgggattacaggcacatgccaccatgcccagctaaatttttaatatttttgtagagatggggtcttgctgtgttacctgggctagttatgtgagtttctatattagacatagtctcaagtttcaggtagggtttaaagtagagacactggtcagtatttcttttttggggggaactaggagagcaggagtagaagtgagatgttaagatcttatggcactaaagacttactattctgttcctacatactctgttaggatcagatagatgttatagaaatgccttttgtttctcctgcccttcttgatgtcaca

SEQ ID NO: 345 - DNA, 1243 bp, Homo sapiens
gagaatgttgcaaaccgttttccccttcccaacctgggactatatgatttcttacccccagggattatgatagaaatatgaagccaccaagtctagacttgatggtgttcaagaataaataatactgattgcctccctagtccttgtccagctaactcagctgtttataattgaagggattcaacaaaattatctctagcatcaggtgctagacatggttagaatctcaccatggtttagtgactggtagatagctattaggtaggtagataaataaatgatgctagaggcaacaggtctagggttaaggattaaggcctgggaattggagtctcaccatggctccccttccttgtctggggcctggacacactgaggacaatgcggctatagcagatggccatggcagtcagtggcagcagaaagaggcagcagaaggtgaagaggttataggtggtctcttgccattgagccttgaagctgcctttggtgacacactgagtgaaagggactgggccagctcagtggaccgtgtggaacaggaacagctggagtggagttgaggactattagaactggttcccctcaccacccaacctacccacctatgtcatactgtctcctcccaattcatccttaattccaagtgaagcagcacagtgctgagaaacagttcatccatggtgccatgttaaagaagttggaaatatatcttgaaaatcctatcttccttttaggcttgaatatgatgctgaacagtaagtttgttaaatcttggaacttaaaacaatcctgctttctcaagtactattctaacattgcgctttataagggatgatatttctaccacctcactcatatttttagctgaaatgattttcctggtatgtctgttattttgtggaaaaagaaatattgtgtaaaatgggtgctgccaaaattccaggccattttgcagggactctgaagtgacctttagtagtaatagtcttatgtgcagtaactataatggtaaagaatgttaaataataaaatttaacattttccaaatgctattgggctgcccctccccctttttgttaaattgctgggttttccaactgaatcagtaaaaactatttctgtttagagctacaaggttaaagtgcctgctttccagtaatggagattgagtcactattaatttgataaaaggtaagctcagtaggcatcagattcctagatacaaggcatttgggaaagt

SEQ ID NO: 346 - DNA, 1222 bp, Homo sapiens
ccttctccctgtctcctatcctgttcccaggaggctgggatgggtttgagagtctgagaaagggcaagagaggagataagcagcttaaagcagagtccagggatggaggcgggaggctgcatggactcggaggtgtgtctgagggtggcttgctgtctgccattccctgccccactctggctgcttccaggcctggggaaatagtgttgctcaagctcgggggtggtggtgatgatgctgacctgatggttgctaaagtgggactgagatgtccctttggataggtcgactacctggcagtaatccactagctgcgaagcatcatctttcccatcagtgctggagagaaaggcactgcccacctggtagctcagcccatgtcttggcagggcaggcctgtgcaagggaggatgctcaagcttctctgtttttctccacagcacatggtgatgagtttccgggtgtctgagctccaggtgcttcttggctttgctggccggaacaagagtggacggaagcacgagctcctggccaaggctctgcacctcctgaagtccagctgtgcccctagtgtccagatgaagatcaaagagctttaccgacgacgctttccccggaagaccctggggccctctgatctctcccttctctctttgccccctggcacctctcctgtaggctcccctggtcctctagctcccattcccccaacgctgttggcccctggcaccctgctgggccccaagcgtgaggtggacatgcacccccctctgccccagcctgtgcaccctgatgtcaccatgaaaccattgcccttctatgaagtctatggggagctcatccggcccaccacccttggtatggctctttgtggtcccttagtcttctggactccctacctgttccccaaacatttcttaggctttagtcctatgggatcagtgacctgggatgggggcgatttctgtggctgcctgtgcatgggcttggaataactgcccctttgtatcctcagcatccacttctagccagcggtttgaggaagcgcactttacctttgccctcacaccccagcaagtgcagcagattcttacatccaggtacatctcttccagtcttcctgcctcatccctggtctctgctttctgactttcttctcttctgccctgtgctcttccctatccctcctcctatacctacttgtctcttgttcttctgtgtg

SEQ ID NO: 347 - DNA, 1173 bp, Homo sapiens
agtgagcggagatcgtgctactgcactccagcctgggcgacagggcgagactccggttcaaaacaaaaaacaaaacaaaacaaaaatcaaaaccctcttccttgggggagaccagcggcgcggaagggaggaaaaagaaggagaggcaaacgtcacttctcccgcaggctgtggcagcatgttgttcggctgagtggcggagggtgggatggaaaagctgactgggacggggaaggcgctgtcagtgacatcagggatagggcgacttctatgtagatgaggcagcgcaggggctgctgcttcgtcaccggcggcttcgccacgaaggagttcccgtgctgtgggagggagtccaggaccgctggtcggacctgagagtcctagctgtgtatcagggctaggaggcctcgagggtgcgcggggcaagtgaccgtgcgtgtaaagggtgaggcgtatgaggctgtgccggggcggaagcgtgcagactcacatttacctagcagaagaaaaatcgtgtttacgaaggtggttttcgcagggcgaagctaattcgtgcaacttccccaaatgtgggaagctcgactgcataatttgtggtagtgggagactgcgttcgctcttttcccccgttttttttttttttgcagtgtggaaagatagactgcatgcagtctatcgtgttatatcctggacggcatccgaagtgtttttccttgtagttaggaggctatgaaatagaaagtaacgcgttggttgttgtccttgccgccggagaaattataaggtcagccgaggtgagattgtttaacataagctaactagcgcgatggccccagagcgctttcctttctacgtggggctgcttttagcagagattggcccgtggtctccagtctcctgggttctcacgctctgtgaaaatcttcgtgtttttccgcagcctctagagttacctttaacagcctctgcttctaaccgctgccccacaggagtttataggatttctgtgctggcggggaatgtgttctcacctcatagagccaggtagaaactgtatgccgacgggctcagttctttgcgatgaaagcagggcctttggggctctgtgacccccttcggttgtagacataacatgcttattttgtggatgggaacggctctgcccgcgcccag

SEQ ID NO: 348 - DNA, 1211 bp, Homo sapiens
gctatgcggaagcctgaggcaggagaatcgcttcaacccgagaggcggaggttgcagggagccgagatcatgcgactgcactccagcctgggcgacagagcgagacggcgcaaaacaaaaaacaaacaaaaaactacaacagaaacacccgcttctttggggaagaccatgggcggggaagagagggaaaggaggcagaggcagacatcactgcccccgcaggctctggcaccatgttggtcggctgagtggcggagggtggggcagaaaagcagaccgggacgaggaaggcgctgtcggtgacatcacggatagggcgacttctatgtagatgaggcagcgcaggggctgctgcttcgccactggctgtttcaccacgaaggagctcccgtgccgtgggagcgggttcaggaccgctggtcggacctgagggtcccagctgtgtgtcagggctaggaaggctcgggggtgcgcggggcaagtgaccatgtgtgtaaagggtgaggtatatggagctgtgacagggcagaagtgtgtgaagtcatacttacctggcaggggagataccatgatcacgaaggtggttttcccagggcgaggcttatccattgcactccggatgtgctgacccctgcgatttccccaaatgtgggaaactcgactgcataatttgtggtagtgggggactgcgtccgcgctttcccctgaatttttgtaatgaaaaaatagactcccctataagggttattcttaaaactgcagttttgtggcttgggtggcatgttaagtgttctccttacagtcgcaatgatgggaaacagaaagtaacgtgttatcctctccgccgccgtgagctcttttaacactaagtggccgcagggctcttctcttccctttctacttggggctgctttttgcagatcgcttcatagtctccagtcttttgggttctcatgctctgtgaaaaccttcgtgttttttcatagcccccagagtcacccttcacacagcctctgcttctaaccgcagcctccgcaggagtttgtaggatgtctgtgctagcggggaatgtgttctcacctcctagagccagggaagaaactacgcagtcgggtgctgttctttgggatgaaagcagggtccccgttcggttgttaacataacacgcttgctttctgtaggggaagggaggtctctcccggcgcccaggt

SEQ ID NO: 349 - DNA, 1199 bp, Homo sapiens
aaagctggagggagctggggaaaatgggtgtgggggtagtgtgaggaagacagggagcaggagagagaggggactggaaacagaaggagaggaggaggagaaagaggaggagaagaaggcagaataagaagagcagaaattccagcatatcccaaatcttgttccagaaatggttatcagtgccccatggataaagggaaaaggaaatttgcaaagaaaaagaaagaaaccccagcgggtagagggtctcggcagaatgtttatttcagagcaggaaactctggcaacccaggcagaactgttggctttagtggaggcctaaatatagctcttctctgttcctaatcctgaaaggtgcttaatctcattctctgagatagaaacctaaagagaagggcagagagaggtaagtctggggtgactcctcctattgtagattaaaggtactcaagtcctgtgtgacaaagagaaaaaaatacctgaaaaggaaattctggtgactatggaggctgagaattcacttgtcaaatgctcataactgagagtattctcaacagctggttccatgggttaatggtgagcaccctggactctgaatcaagcgatccgagttcaaatctcggtggtaccttggtgtctgctggccttttactctggagccagaagccactttgggaagcaaactccaccctcaaagacagagtgaaagggatgtggtttacatttgcccttcgtaccaagtcctgggttaaagaagagaaaggaaggtttgggtcccggggaaggaagctctgctgctgcaaatcccctagtccctcctgctccggcctcgcaatgcgtcccctgcaatgtccctcctcctctcccgtgtccctcctgctccggcctcgcaatgcgtcccctacgatgtccctcctcctctcccttttcctcctcagtggtctgggtcccagaaaccggcttcttgcagtggcctgctccacagggaaattgcccaaacatcccatcggagtcaccaatcctggtcccagtcctgggcgagcctcccggccccctgcaatcggaggcccggaccccgcagccagcgtcccagcaaccgaacaagtccccatcccctctcagggcgaccctgggcctcggggtgagaggtttcctacactaaaagggctgcggcccctcagtgctagaccccgagattc

SEQ ID NO: 350 - DNA, 1244 bp, Homo sapiens
cattatctgaagaagggtgcaaaagcttcctgttggccgccagaagggttctctgcaggacacagatcaagtaccacagtcttagggggagaccagacgcggggtctctgcgcacctccccaaaggacaatggcaggaggaaaaggagaaagagacagacgtcacttccttcgccagctccggcagcgggttgatcggctgagtcggcggagggtggggcggaagagcagacggggactgggaaaggcgctgttagtgacatcacggatagggcgatttctatgtagatgaggcagcgcaggggctgctgcttcgccactaaggagttcccgtgccgtgggagtgggttcaggaccgctggtcggacctgagagtcccagctgtgtgtcagggctaggagggctggggggggcggggaggtgcgcggggcaagtgaccgtgcgtgtaaagggtgaagcgtgtgaggctgtggcggggcggaggtgcaaaagctcatacttacctggcaggggagatactattatctaaacgaaggtggtttttctcagggcgagggttatccattgtgttccggatgtgctgacctctgcgatttccccaaacgtgggaaactcgattgcataatttgtggtagtgggggactgcgttcgcgctttcctctggtgcttttgtggtgcgaatagtaggtgagccgtaagtgtttttgtaattcagggtgcgggctcgtgttttgtggctgtgttctgtccggtcagttgtttccgttcgcaacggttagttttcgtttgtgaggccatgtttggggacagcttagaactatccacttactctcttgggaggcgaatttcagtctctgttggttggggtgttctcccaggttagctgccgctgtacttgctaggtggagctcagggatcaagggtcgggagctttctggtttgttcagtgctcccagggcttctaacatctcttaaaaactctggtgttttctgtcatcctcggagttacctcttagcctctgttttttttgttgtttttttccccccctccctaagacaagtctcgctgtaccgtccagtctggagaagtggcgcgatcttcccatctcaggctcccgagtaggacaaccacacgccaccacacctggctagttttttctctttttttttcttttcttttctttctctttcctttctttttcttttttcgtagcggtttcaccattctgctcaggctgggctcca

SEQ ID NO: 351 - DNA, 1248 bp, Homo sapiens
cgcattaaaagacattatctgaagaagggtgcacaagcttcctgttggccgccagaagggttctctgcaggacacagatcaagtaccacagtcttagggggagaccagacgcgggatctctgcacacctccccaaaggacaatggcaggaggaaaaggagaaagagacagacgtcacttcctccgccagctccggcagcgggttgatcggctgagtcggcggagggtggggcggaagagcagacggggactgggaaaggcgctgtcggtgacatcacggatagggcgatttctatgtagatgaggcagcgcaggggctgctgcttcgccactaaggagttcccgtgccgtgggagcgggttcaggaccgctggtcggacctgagagtcccagctgtgtgtcagggctaggagggctgtgggcggtgggggggtggggtggggggggggggcgttcgcggggcaagtgaccgtgcgtgtaaagggtgaagcgtgtgaggctgtggcggggcggaggtgcaaaagctcatacttacctggaaggggagataccatgatcacgaaggtggtttttctcagggcgaagcttatccattgcgttccggatgtgctgacccctgcgatttccccaagtgtgggaaactcgagtgcataatttgtgatagtagggaactacgttcgcgctttctcttggtgtttctgtggtgcgaatagtaggtgagccgtaagtgtttttgtaattcagggtgcgggctcgtgttttgtggctgtgttctgtccggtcagttgtttccgttcgcaacggttagttttcctttgtgaggccatgtttggggacagcttagaactatccacttgctctcttgggaggcgaatttcagtctctgttggttgggttgttctcccaggttagctgccgcggtacttgctaggtggagctcagggatcaagggtcgggagctttctggtttgttcagtgctcccagggcttctaacatctcttaaaaactctggtgttttctgtcatcctcggagttacctcttagcctctgtttttttgttgttgttttttccccccctccctaagacaagtctcgctgtaccgtccaggctggagaagtggcgcgatcttcccatctcaggctcccgagtaggacaaccgcacgccaccacacccggctagttttttctctttttttttttttcttttcttttctttctctttctttttcttttttcgtagcggtttc

SEQ ID NO: 352 - DNA, 1267 bp, Homo sapiens
tctcatgatttccattctcaaggctcttcaaaggactaaaagctaaaaggatggattcattcgacaagtcctagtcctgcgccctggtgagtgccagaccctgctccccgtgagggggacccacgagccaccctcaccacgatccctgccctggtggagcccccgtgcggaacacaggatccgaagatggcagcggaagctccgcagcggccccaaaagcgactgggcagggagggcacaggctccctcactgggtgaaggcggcgcaaagaatgggaagagccatcccgggagccaccgggcgttcagcctccctagggcccccaggcggctcgggccggggtctcaaccggggcgtttccgggggtttctgaagcaggcgaggggcagggcgggcgaaggccattcggctatccttctggctccagaatctcccaacgcgcaggtgtccaacgtgaccagcgcgacttaccgctccaatctctccagttttccaaggccttgctcagtcctcctgccgggcgggccctgaggatgcaagggacggaggaagtttcgtgcgtgcgcccttcctatagcgcccagtagaactaacagtacctgtctctgtggcgcaatcggttagcgcgttcggctgttaaccgaaaggttggtggttcgagcccacccagggacgcctctttgagcttttaaagtattcatgcattgtcaatcactagataaatggggaagattttatcttcctggagtcctaagccactaatttgtgacttatccatgtcaagggccagcccacctccccaaccggattcttaaccgggtatctcctgaaatcctgggtttatacgtgtgtaactcaggaatcctgaaacagagacctaggaacccacttctggtgtgataaaattctaattcagtccgttatacgcttaaatgagtaatttacatgcctccattttttcatatgttaataataggaggtcagtaatatcccgaggatgtgcctggatttactgattgctctatcaataatgtgaccagtggaatcattcatcatcatagtgatcctctccatcatttttgaagagtatttttcctcagtttgtgcatgatttatttaacccttttcaaaatgtttttgttagccaggcatggtggcatgtgcctgtaatcccaggtacttgggattctgaggcaggagaatcatttgaacctgggaggtggaggctgcagtggaggctgcaccaatggaggctgcactgctaca

SEQ ID NO: 353 - DNA, 1417 bp, Homo sapiens
cctcagcctgtctcctgggctccatccatgttgcttgtcttgtctgtccctcagtttcctcatctgttcagagggtactacaataatacctacctctgtaaattgctgcaatgaattacatgaggcatttcctgtcaatctccttgaacattaattggcacagtgtaaacactatctattagttcttcattctgatgtttctaaattaacacaaactaatcttatgctgtttctaaattaacacaactaatctaaatcttaatgctgcctctcatactaataaagtatttgggcatatttccttcatggccttattgtcttatgtctcacactttatgcttcagatatgattcttaaaaccatatctgaatattgatttaaaaatgaaatatttttaaagtccttgacatatttgtccttgaaatacccagtaaaagggaaaccatcagtcccatagtcctaggggccttcccgactgtacaagaaatcactacttcatgccccagtgcagtgttttagaggagaggctgcaaggcttgggaaagtggccccgcattcagagtcagacctcaggggctgtgagttctgactccgcttcgttgtggttgaatcatcttgtcaacttccttgacgcgcccttgagtttctctttcttcatctttaaattttggaggatcagatgccagaaagtcaggagactgaagagtaaagatgtggaaatccctgtctagaccctggtactggggagagttttgtccttgggatggacctggctcctgccctgtaggcagtgaccacagcagcatgtccagccttccactgaggcaggcgtgtctgtcttttctcagactatgaagagtgtaaagacctcataaaatttatgctgaggaatgagcgacagttcaaggaggagaagcttgcagagcagctcaagcaagctgaggagctcaggtgaggggaccccgtagggggaggcaggcgggtaggtgtgtagatctctgaagtacagcagctcggcggggagaaataagaacgaagctgggccaggggaagggcagaaattgccatggcaggctcatgacacacaaatatttatcagagaacaaggataataataagttctgtgttgcagttgtttcttagagccttgttttctctttttcaaacaagtaattgttgatgtgaaatttacataacacaaaattcaccaaaggagtgggaaccacccagcagcattcagtataatcaaaatggtgtgctatcgccaccccacttacccttagtgagaatcaccttctgactgactgcgtcttctcattctttcactcaatcaatgttgccttctcgaccctgtcattcttttcttctttcatcttttcatttcgccccatctgcacctggcctcatttctgtacat

SEQ ID NO: 354 - DNA, 1417 bp, Homo sapiens; identical to SEQ ID NO: 353

SEQ ID NO: 355 - DNA, 1254 bp, Homo sapiens
taatcctaaactttctagtttgcgcattaaaagccattactcaaagaagagcgcccaggctccagctggccgccaaaggggtccttggcatcacaggctaagaacctacttctttgggagagaccaggggtggggaagggagggaaaggagatagaggtagacttcacttcctccgccggctcccgcagcgggttggtcggctgagtggcggagggtcgggcggaagagcagatggggaccgggaaaggcgctgtcggtgacatcacggatagggcgattcctacgtagatgaggcagcttaggggctgctgcttcccacgaaggatttctcctgctttgggagcaagtccaggaccgctggttggacgtgagagtcccagctgtgtgtcagggctaggagggctccgggtggcatggggcggggtgggggtgggggtgcgggtgcgcggggcaagtgaccgtgtctgtaaaggttgaggcgtatggagctgtcgcagggcggagatgtgtgaactcacacttacctggcaggggagatagtatgatcatgaaagtggtttttccagagcgaggcttatccattgcactccggatgtgttgacctctgcgatttccccaactgtgggaaactcgactgcgtaatttgtggtagtgggggactgcgttcgcgctttcccctgaattttccagtgcaaaaagcagttggtatgcaaaggtctacttctcgcttttttttgctgtataatcttggtggtggtgtgttattcttatagccggatggcagggaaacaggaagtaacatgtcgccgtcgttcctgccggagaaataagcgtcaggcgttgtgttcctgtttaacacaagctaagtagcgcgaaggccgcacagctccttcctttcaacatgaggctgctttttgcagagattggtccatagtctccattctcttggggtctcacgctctgtaaaaatcttcttgtttttccctagcccccaatcaccttttacacagcctctgcttctaagcgcagccccctcaggagtttgtaggatttctgtgctagcggggaatgtgttctcacttggtagagccaggtacaaactacgcagacgggcgctgttctttgggaagaaatcagggcctttggggctcttagtgttcccgttgggttgtagacataacacgcttactttgcggaggggaaggggtctaccggcgcccaggtgccctaacgcaattcatcccgagacacgc

SEQ ID NO: 356 - DNA, 1272 bp, Homo sapiens
caaggataaggatgtgaagagaaccggtttcttttgtaatcctaaacgttctcgtctgagaattaaaagccattatttgaagaacggtgcccaggctccaggtggccactgaaaggttgctccgcagcgcaggctaaggaccagcttcttcgggcgagaacagatgccggggcgggagggaaaaaagggagagacagacatcacttccccctgccggctccggcagcgggttggtaggctgagcggcagaaaggcagacggggactgggaaaggcactgtcggtgacatcacggatagggcgacttctatgtagatgaggcagcgcaggggctgctgcttccccacctgctgctgcgccacgaaggatttcccgtgccgtgggagcgggttcaggaccgctggtcggacctgagagtcccagctgtgtgtcagggctaggagggctggggggggggggggggggggggctgcgcggggcaagtgaccgtgtgtgtaaagggtgaagcgtgtgaggctgtggcggggcggaggtgcaagagctcatacttacctggcaggggagataccatgatcacgaaggtggttttcccagggcgaggcttatccattgcactccggatgtgctgacccctgcgatttccccaaatgtgggaaactcgactgcataatttgtggtagtgggggactgcgttcgcgctttcccctgattttttgtagtttaaagaatagtctacacagcaagggttacttgttttttttactggcttgtgttttagtcttaatcgttactctcacagtcgaaggctgagaaatagtagtaatatgtcgctttctccccgccccgggagaaataagaatcgtcgacctttacacaagctagctagcgcgaaggccgcacagctcttcctttatctaggcggggctgctttttgcagagatttgtctgcccatggtctgcagtctcttgggttctcagggtctgtgaaaatctacgtgtttttccctagcccccagtcacatttcacacagcctctgcttctagctgcagccccctcaggagtctgtaggatttctgtgctagcggggaatgtgttctcacctcatagagccggctacaaactacgcaggcgggggctgttctttgggatgaaagcagggcctttagggctcttagcgcgtccccgttgggttgtagacataacacgcttactttgcggagtggaacggctctcccggagcccaggtgtcctaacgcaattcatcgaggcccg

SEQ ID NO: 357 - DNA, 1198 bp, Homo sapiens
attcattcgacaagtcctagtcgtgcgccttagtgagtgccagaccctgctccccgcgaggggacccaggagcgaccctcaccaccatccctgccctggtggagccccggtggggaacacaggatccgaagatggcagcggaagctccgcagcagcccaaaagcgactgagcagggtggatacaggctccttcactgggtgaaggcggcacaaagaacgggaagaaccatcccgggagcccaccaggcgttcagcttccccttgggacctcaggcggctcgggctgggtcgccgaccgcggagtttctgggggcttctgaagcaagagaggggcagggcgggcgaaggccattcggctctccgtctggctccagaatctcctaacgcgcaggtatccaatgtgaccagcgcaactcaccgctctaatctctctggttttccaaagccttgctcagtcgtcctgccaggcgggcgctgagaatagaagggacggaggaagtttagtgagtgtgcccttcctatattgcctattagaactggtagtgcttgtctctgtggcgcaatgggttagcgcgttcggctgttaaccgaaaggttggtggttcgagcccatccagggacgctgattgcaacttttaaagcattcacgcattgtcaatcactagacaaatggggaagattttatcttcccggagtaccaagccactaatttatgactgatccatgttaagggccagccccaaacccctaatttatgactgatccatgtcaagggccagcccccctcccccatccgattcttaaccgggtatctcctgaaatggcgggtttacacctgtgtaactcaggatcctgaaacagatacctaggaacccacttttggtgtgataaattctaattcagtcccttatgcgcttaaacgagtaatgtacgtgcctccattttttcatattttagtaataggagttcagtactatctccaggatgtgcctggatttactgattgttctattaataatgtgaccagtggaatcattcatcatcatagtgatcctctccaccatttttgaaaacagtatttttcctcagtttgtgcatgatttatttaacccttttcaaaatgttttagccaggcgtggtggcatgcacctgtaatcccagctacttgggaggctgaggcaggagaatcatttgaact

SEQ ID NO: 358 - DNA, 1187 bp, Homo sapiens
tttatacatcttcaagcagacaaataacagtattatggttacaagaccgatcattactcttttgccaaaaaaaccagcgacaaaagactaactcagtggaccaacctttgtttcttcattatctctaccttgattctgtccttttatttcctctttcctctaattctaattctgcttctgcttcttatttcctccctggattagaactttacttacctaagctaccagttaggttaccttctcagaaccactaaggcagcagtttgacgttgacaattgaagatttaggattagaaaaaagaaacatgaatgaatttgtgacgttttattataggggtatgtaatgcaggtagaaagacctttttcagagttaagagtttgatccgacaaatgagctattttgatatttataactttgtttagtaaaagtttcctataaaaacatttggtttggatgtctttgttagctttgagtcgacacttgaaaaggccgcttggaagtttctaagtctttctggatactctttccgataattctccaagggttgctggggagaggcactggtggttcagtggtagaattctcgcctcacacgcgggacacccgggttcaattcccggtcaaggcaagaggttcttttgctcttcactatggctctttacccttctgccctgcagaattacactgcataacctaatagtgcatttaagggcttggccaccacaaggtaaactgacaacaacgctgaccaaagtagcagcaaaagacattcaggagactaacccgggacccacgcagttgttggactcaacaaaccgctaagcaaagtggcaagcacgtagtgtttctggtgagtcactgcagttttgatattggtacctgttactttcatctgttctctgggcggattcctgcaaacccaagaaccatcagtttcctgattcgtgtgctggaccttgggcttaccgctgagccactacggagaggaacaagaaatgaagctcccggaaggagagaagctgcgggcggggcaatcacctcggaggtccaagaggcctcagcggcccaaagaaaggggaggtgtgtgcgggagaatctcaatggagatgaggagagcagcggtgactggtccttgcgcagagtggtccttgcacagaggtagccaatggaccctcgaggctgtacc

SEQ ID NO: 359 - DNA, 1185 bp, Homo sapiens
gacggctcttcccgctcctgtaggaaaaggcaatgccccttttgtcttgtctatgtgggactccaaagggtccagacgagacagaaagggggcgaatcctctcagagtgggcaggggaggagatacaatatgggaatggggcggtagaggggtgggatttcatgaaatttcctgatttaaggcgatcatgaagtaggcctctttgggaggttggccctccagtcgctggtaagggtaacagcccaccagtctctggtgagatccagtcgcgtcccccgactgcatttagagccaaaagcagaacgaggccggcgctgcggcctggcgtccagtgacccagctgtctgcatattccccagggtgcaaacacttggacttcaggtgtgaaggcaatgcggtcaccaccgcagtaagaaaagcaactagggaaaatggcaccttcttctcctaacttttttttgagactctcgctctgttgtctaggctggagtgcagtggtgcgatcttagatttggaaactataatagaaacggctgatctaagattttcatggttatgttttgccgcgcaggttccgcgtgtggtttccgtagtgtagtggttatcacgttcgcctcacacgcgaaaggtccccggttcgaaactgggcggaaacagaggttttttttgttttgttttgtttttttttttttgttagcccttaaatttagtgagtttactcgaggttggaaaacagaaaagtagttgaacctgtgactacattttagacctcatcaatctatacagattgtcgaccaggctacaatttccactggtctgccaggaagaggacgtcacagcaggcctgcttaatattaactttggttccagcaattccttaaggttctcttcattctctttatcgcctgaattttcacaggcagacaccgaaagtggatgacatgttagcgcatttcctaagggtccagcttggcttcgctttactctgatacagttgcagatctggctgatttgcgagacaacaaaaacaaaatgttttttaaaaacgttccaaatctgcatctggaactcatggagtcaatattccgaaatcacacgaattatgtacatacatttgcatgcataccccttccccaaataatcctcagaaaaccggtaagcgtccaaactactctccggaggctt

SEQ ID NO: 360 - DNA, 1226 bp, Homo sapiens
ttatctgaagaagggtgcaaaagcttcctgttggccaccagaagggttctctgcaggacacagatcaagtaccacagtcttagggggagaccagacgcggggtctctgcgcacctccccaaaggacaatggcaggaggaaaaggagaaagagacagacgtcacttccttcgccagctccggcagcgggttgatcggctgagtcggcggagggtggggcggaagagcagacggggactgggaaaggcgctgtcggtgacatcacggatagggcgatttctatgtagatgaggcagcgcaggggctgctgcttcgccactaaggagttcccgtgcagtgggagtgggttcaggaccgctggtcggacctgagagtcccagctgtgtgtcagggctaggagggctgggggggggggggggggtgcgcggggcaagtgaccgtgcgtgtaaagggtgaagcgtgtgaggctgtggcggggcggaggtgcaaaagctcatacttacctggcaggggagatactattatcaaacgaaggtggtttttctcagggcgaggcttatccattgtgttccggatgtgctgacctctgcgatttccccaaacgtgggaaactcgactgcataatttgtggtagtgggggactgcgttcgcgctttcctctggtgcttttgtggtgcgaatagtaggtgagccgtaagtgtttttgtaattcagtgtgcgggctcgtgttttgtggctgtgttctgtccggtcagttgtttccgttcgcaacggttagttttcgtttgtgaggccatgtttggggacagcttagaactatccacttactctcttgggaggcgaatttcagtctctgttggttggggtgttctcccaggttagctgccgcggtacttgctaggtggagctcagggatcaagggtcgggagctttctggtttgttcagtgctcccagggcttctaacatctcttaaaaactctggtgttttctgtcatcctcggagttacctcttagcctctggtttttttgttgtttttttccccccctccctaagacaagtctcgctgtaccgtccaggctggagaagtggcgcgatcttcccatctcaggctcccgagtaggacaaccacacgccaccacacccggctagttttttctctttttttttcttttcttttctttctctttcctttctttttcttttttcgtagcggtttcaccattctg

SEQ ID NO: 361 - DNA, 1332 bp, Homo sapiens
aaaatacagtggctcggtccaacaaaacagagcctggagccaggaattatggcgaacctgctccctcccgtcctcccttggcgcacagatccctggcgccgccgctcttgaggtcgcctctcgcgtgtcgacctcatcgtcggaacggcgcttcctgaagctttatataagcacggctctgaatccgctcgtcgggattaaatcctgcgctggcgcgctcctgccagtctctggcctccatttgctcttcctgaggctccctccagagacctttcccttagcctcagtgcaatgccttccgggcgtcctcagaccagacacaggccaaagccactacagaatccggaagccccggttgggatctgaattctcccggggactgtggcgtagcggttaaaaaaaaaaaagagtgagagggacctgagcagagtggaggaggagggagaggaaaacagaaaagaaatgacgaaatgtcgagagggcggggacaattgagaacgcttcccgccggcgcgctttcggttttcaatctggtccgatactcttgtatatcaggggaagacggtgctcgccttgacagaagctgtctatcgggctccagcggtcatgtccggcagaggaaagggcggaaaaggcttaggcaaagggggcgctaagcgccaccgcaaggtcttgagagacaacattcagggcatcaccaagcctgccattcggcgtctagctcggcgtggcggcgttaagcggatctctggcctcatttacgaggagacccgcggtgtgctgaaggtgttcctggagaatgtgattcgggacgcagtcacctacaccgagcacgccaagcgcaagaccgtcacagccatggatgtggtgtacgcgctcaagcgccaggggcgcaccctgtacggcttcggaggctaggccgccgctccagctttgcacgtttcgatcccaaaggccctttttagggccgaccacttgctcatctgaggagttggacacttgactgcgtaaagtgcaacagtaacgatgttggaaggtaactttggcagtggggcgacaatcggatctgaagttaacggaaagctaccgcggcccatagcgctcacagccgtaaagacttaagtcgttgaccgaaagcggctttttcacttacctgggctttttttttttttttttttttttttttaaagcctttatcggtatgaaaggttgaatgctctaggtttgagcactgctttctcggcttgctcttctggtgcagtataggcacacctagagggccacgtcagtctttgcgatcaccaaatctggttctgagaaataggcactggc

SEQ ID NO: 362 - DNA, 1332 bp, Homo sapiens; identical to SEQ ID NO: 361

SEQ ID NO: 363 - DNA, 2154 bp, Homo sapiens
ttgcttgagccaatcaaagtgctccgtggacaatcgccgttctgtctataaaaaggtgaagcagcggcgttttcggcgactttcccgatcgccaggcaggagtttctctcggtgactactatcgctgtcatgtctggtcgtggcaagcaaggaggcaaggcccgcgccaaggccaagtcgcgctcgtcccgcgctggccttcagttcccggtagggcgagtgcatcgcttgctgcgcaaaggcaactacgcggagcgagtgggggccggcgcgcccgtctacatggctgcggtcctcgagtatctgaccgccgagatcctggagctggcgggcaacgcggctcgggacaacaagaagacgcgcatcatccctcgtcacctccagctggccatccgcaacgacgaggaactgaacaagctgctgggcaaagtcaccatcgcccagggcggcgtcttgcctaacatccaggccgtactgctccctaagaagacggagagtcaccacaaggcaaagggcaagtgaggctgacgtccggcccaagtgggcccagcccggcccgcgtctcgaaggggcacctgtgaactcaaaaggctcttttcagagccacccacgttttcaaataaaagagttgttaatgctggccactctcagtccagcgttcctcagtagtgaatagcgaacctggagctgacgggacgggacgggacgggacgggacggggcggggcggggcggggtgtgtgtgtgtgcgcgccgtcttccatctggagcacgtaactgccttggctcttcgatgagtgggtccccagtcctaggacttcccagggcaggtgcaggcaccaaacgtcctgggcgccgccacggtccgctccacacagtcacaaacaccagcgccgcgggcagtacccaacgcgctgaagtgttgcgcgcggagcgcgcgcttccctagtggtttccgcaggctatggccggacacttagacctagtctggcaccagcgggacgtgctcctcgtccccacccccgatggggagggccctgagcgggtagtgctcgctagtgtggcggagctgggtcttggcttcactgagctgacttaagtcttagtttctgttttgttttccaaagcgccctggcggcggagagtaagggcctcggaggcggaatcttgcgtcctgggggcgggcacctctcccacccaaaaggcacccgacaggcgaaaaacgatccgccaagtagcaactgggggcggggggcaaatggaagaatgaggttccacgcgggagctgtagggcgcagcaagaaagggggggtattgcgggcagtgtgttctaaggaagcgaagggcggaaagggaacaatctgacaaagctgcaatggaaaatgactttcaccctgaaggaaaggggaaaaacaagcttgcgaaacttcgccaactggtaagtagaaagtgaggcggggtgggcgggattagggaggaatctgcccaagccaaccggtgactttaggacgggtgacgtcacagccaatggacagccagcgcgggattttcaattattgttccgcccaatcgggaaaagactgtgcttataaagacggctgcggcggggctaggagctcgtttttctccccgccgctgcgctggtaagcctgtgttttggttcgctatggcccgtactaagcagactgctcgcaagtcgaccggcggcaaggccccgaggaagcagctggccaccaaggcggcccgcaagagcgcgccggccacgggcggggtgaagaagccgcaccgctaccggcccggcaccgtagccctgcgggagatccggcgctaccagaagtccacggagctgctgatccgcaagctgcccttccagcggctggtacgcgagatcgcgcaggactttaagacggacctgcgcttccagagctcggccgtgatggcgctgcaggaggccagcgaggcctacctggtggggctgttcgaagacacgaacctgtgcgccatccacgccaagcgcgtgaccattatgcccaaggacatccagctggcccgccgcatccgtggagagcgggcttaagaagtggcggttcggccggaggttccatcgtatccaaaaggctcttttcagagccacccacatcagcacttggaagaa

SEQ ID NO: 364 - DNA, 2154 bp, Homo sapiens; identical to SEQ ID NO: 363

SEQ ID NO: 365 - DNA, 2154 bp, Homo sapiens; identical to SEQ ID NO: 363

SEQ ID NO: 366 - DNA, 2154 bp, Homo sapiens; identical to SEQ ID NO: 363

SEQ ID NO: 367 - DNA, 1220 bp, Homo sapiens
gttgcggatggccagctggaggtgacgagggatgatgcgcgtcttcttgttgtcccgagccgcgttgcccgccagctccaggatctcggcggtcaggtactcgaggaccgccgccatgtagacgggcgcgccggcccccacccgctccgcgtagttgcctttgcgcagcaagcggtgcactcgccctaccgggaactggaggccagcgcgggacgagcgcgacttggccttggcgcgggccttgcctccttgtttgccacgaccagacatgactgaaatcaaggttaaacacagacaacgctcagaacctcgcaacaaaataagattgaaagagaaccaagaggaaagcctttataagctttcctaggggtggggtcaagaacgagtttttcattggtcctaatatggcttcagaaccggccaatcaagtcaagagtcggtgttgttacgtacgcattgctgaaaacgcaaggtccgcacacggaccaatggaaatgaacgactttcggagccctaatttgcataaggtggttataaaagaatcaggcccgcccattctcttacttcttttcttggctaagccgcgtttgtactgtgtcttaccatgcctgaaccggcaaaatccgctccggcccctaaaaagggctccaagaaagccgtcaccaaagcccagaagaaagacggcaagaagcgcaagcgcagccgcaaagagagctactccatctacgtgtacaaggtgctgaagcaggtccaccccgacaccggcatctcgtccaaggccatgggcatcatgaactccttcgtcaacgacatcttcgagcgcatcgcgggagaggcttcccgcctggcgcactacaacaagcgctccaccatcacatcccgcgagatccagacggccgtgcgcctgctgctgcccggcgagctggccaagcacgccgtgtccgagggcaccaaggcggtcaccaagtacaccagctccaagtgagtccctgccgggacctggcgctcgctcgctcgagtcgccggctgcttgactccaaaggctcttttcagagccacccacctaatcactagaaaagagcttgttcacttattcccttagtttcttttcataaagtaagttattttagtgtgaaggtcatgggaaatggcatacgtagctttttaactatttggaactcgaggtccccagtgcgtcattggatttgcttttgaatcta

SEQ ID NO: 368 - DNA, 1444 bp, Homo sapiens
tgcccatggccttggacgagatgccggtgtcggggtggacctgcttcagcaccttgtacacgtagatggagtagctctctttgcggctgcgcttgcgcttcttgccgtctttcttctgggctttggtgacggctttcttggagccctttttaggggccggagcggattttgccggttcaggcatggtaagacacagtacaaacgcggcttagccaagaaaagaagtaagagaatgggcgggcctgattcttttataaccaccttatgcaaattagggctccgaaagtcgttcatttccattggtccgtgtgcggaccttgcgttttcagcaatgcgtacgtaacaacaccgactcttgacttgattggccggttctgaagccatattaggaccaatgaaaaactcgttcttgaccccacccctaggaaagcttataaaggctttcctcttggttctctttcaatcttattttgttgcgaggttctgagcgttgtctgtgtttaaccttgatttcagtcatgtctggtcgtggcaaacaaggaggcaaggcccgcgccaaggccaagtcgcgctcgtcccgcgctggcctccagttcccggtagggcgagtgcaccgcttgctgcgcaaaggcaactacgcggagcgggtgggggccggcgcgcccgtctacatggcggcggtcctcgagtacctgaccgccgagatcctggagctggcgggcaacgcggctcgggacaacaagaagacgcgcatcatccctcgtcacctccagctggccatccgcaacgacgaggaactgaacaagctgctgggcaaagtcaccatcgcccagggcggcgttttgcctaacatccaggccgttctgttaccaaagaaaaccgaaagccacaaagccaaaagcaaataaatgcagacaaacaaaccaagaccaaaggctctttttagagccacccaagttttcaaaaaaagagctaatgcgctatttcgtgatcagcccttcatttgacactttggtggctcttaaaagagcctttggggtgaatgagtatggtgtcaagcctcttaattacttgttcttgccaggcttgtgactctccgttttcttgggcaacaggacagcctggatattgggcaagacgccgccctgggcaatggtgacacccccgagtaacttgttgagctcttcgtcattcctcacggctagttgcagatggcgagggatgatgcgcgtcttcttgttgtcccgagccgcgttgcccgccagctccagaatttccgcggtcaggtactcgaggaccgccgccaggtacaccggggcgcctgccccgacccgctccgcgtagttgcctttgcgcagcaagcggtgcactcgccccaccgggaactggagaccagcgcgggacgagcgcgacttggccttagcgcgggccttgcctccctgct

SEQ ID NO: 369 - DNA, 1292 bp, Homo sapiens
cctcttttgctatggaggctccatgttcaaggcaatggctttttaaatcttggctatctaaaattttttccctttgttttgaatatttgtaagtttttaagaagttagtgtcagcaaattaattgaagttatgcttctatactgggacatatttaaatactgagtatagtactgctgctactgcttctacaatgtaaaatgtatgacttggtgttttaaagtaaaaattatgatgttacttgtggagaaactaaaaatgttgtacaactgaccgaaagaaaacccttggggataagtttagtgaggggattggaatccccaaaaagataacatttttcttctgcttttaaaaactgaaattccctgttctagttcctaacaattctcattacatactatgccagattacaaaatacttatttttaaaatgaaatctatatattgactttcttatcaatcatcttactgtgcaatcaaaattagagtactttggtttgaaaacaacacttagagcctccagataacttttaagacttatttagctttgtgggtggtattttcatgcaaataagtaagggtgggttttatattttgtagaagttttcggtcctattttaatgctctttgtatggcagtatgtatatattgtgttaagttcctcaagaatctccttaaaaactttgaagttaatacttttgtgcaactgtgttttgaataaagccatgacagtgttaaaaacaaacaaaaaaatttgcagtactcctgattattcttttattgtttttgactgttccctgtttttttctgtgactgctgtaacttaaagtttttgaaactgaattgcttcaaataaattgaagatttgttataatgattagtttcagtgtatagcattcactttttcaacaataccattagcggctttgaaggtctttttaaaaactaacagcttgaaagttaactgatttaaatacttggatgtgatataaggcattacaatttatttatttattttttgagatggaatcttgctctatcgccatgctggagtgcaatggcgccatctcgactcactgcaacctctgcctcccgggttcaagcgattcccctgtcttagcctcctgagtagctgggactacaggcatgcaccaccatgcctggctaattttttgtattttagtagagacagggtttcaccatgttggccaggatggtctcgatctcctgacctcatgatctgcctgcctcagcctcccaaagtactgggattacaggcatgagccactgctccc

SEQ ID NO: 370 - DNA, 1306 bp, Homo sapiens
gacagtttcgttgtctgttggatttggtttttagtttttggttttttattctgttgttagtgttaaagagggagaaagcatccttccgtgcccaacttgcgatactgagaattcaccacacggcacgcactggctcttggccgttttaaaagcatagcctctgctttgcaaccaaggtgtacagcaacgtgcgcatcacattaaaaagatgccttcgtggcattgtcctgctggggtcaggctcttcacagagactgaccttccgtgatgcagagctagagccgagattttaaagatggtaggttaacaccataaaagacaacaattttgaaagcagttgggtgaaagcagtatgtaagttagtaatatttaaataaaactatcctggaggaattgttactgagttaattgttgctgtaataaacactaagaccttggaggaaaaacgacgctgtcctaatgaaaatcagacattaattagcatagaaatggcaccgcgatgccgctctaatttccctttggttggtttccatggaaatctgtaggtaaagtgtgcttttaaaagtgtttatcgcttctctgccttttggctaagatcaagtgtaggatctgttcttaacagtttaatatctgatatattttctatccgagtccaatatattaaatggatttggggagcaggaagacggaataggagcttgcttgttcacttcacgcatcgatctggtattgcagtacctccaggaacagtgcaccccctcaggggattaaaatttaatgttcaaaacagaagaaggaaaaaaaaacagtctgtctatgtgggatgggatacaaaagagtgggataagaattatcttttggccgggcgtggtggctcccacctgtaatcccagcactttggaaggccaaggcggttggatcacctgaggtcaggagttggagaccagcctgactaacatggtgaaacctcgtctctacaaaaaatacaaaatattagccgggtgtggtggcgtgcgcctgtaatcccagctactccagaggctgaaacaggagaattgcttgaacccgggaggcggaggttgcggtgaaccgaaatcgtgctattgcactccagcctagacagcaaaagcgaaaccctgtctcaaaaataaaaagaattatcttttaaaattttgtctcgacggtctaacttttttcttagctcttgcttaaattatatcattcttattcccttacaccattctcaggataaataaccaaataaattccaaatgatttggggaaggaagtggaaagtgggggaatt

SEQ ID NO: 371 - DNA, 1167 bp, Homo sapiens
gtcaggagatcgagaccatcctggctaacacggtgaaaccccgtctctactagaaatacaaaaaatcagctgggcgtggtagcgggcgcctgtagtcccagctactccagaggctgaggcaggagaatggtgtgaacccgggaggcggagcttgcagtgagccgagatcgtgccactgcactccagcctgggcgacagagcgagactctgtctcagaaaaacacaaatatccaaggaaatggaggtcacaatttttttttaaccataaaatcacgttcagctgggcacatgtctcacaaatgttactaggtcttcttataaaagaatattatctgatttaaataagaaattgaagtgtttttattatatatctcttttctagggtacagccaaagaccggagctttggagagatgaagtttaaacagtgtcctacagagaacatggctcgtgagcatttcaaaaagcatggggctgaacactactgggaccttgcgctgagtgaatctgtgttagagtccactgattgagactactgcaagcccttgcctctcctcccttgcctttgtctcttcagtcctctcacttattctatttcccaaccccctcccacttgtttgtgtgatctcagaactgtgccaagcagacactgggacaaagggagaatatcttgctcccctcctgagtcagcctggtgttgccctttattccccttatgtgcatatgattaaagagttatttttaaacttggtgtgatatttttcacacattcgtaagtattagagtttgggtctacaggtgatcttttttccggacttttagcaattgctgtggaaaaaaacattttttgtcattgacatttatttatatatataaatggatgaatggatggatggatagatggatgtgtatttttgaagtctagtggaaatgtttgatctcatcctggagctagaatgataaatactgttttcctggagcagaatgaagcagggagatgtgtaaagtggtaagggaggaaggagggacaaatgagtatccatcccttaaccaagagaatcaccaggttagacagattacctcaggacttggctaagtagtctttccaggaaatcagttcctctaagggatgcatatgtgggaatgtgtgttgtgggtgaaatggaca

SEQ ID NO: 372 - DNA, 1214 bp, Homo sapiens
tttgtgatttggagaaacttgtttaagataaaattgtgaggccgggcacggtggctcacaactgtaatcccagcactttgggaggcccaggcaggcggatcacgaggtcaggagctcgagaccatcctggctaacacagtgaaaccccatctccgctaaaaatacaaaaaattagctgggcgtggtggcaggcgcctgtagtcccagccactcgggaggctgaggcaggagagtggcgtgaacccgggaagcggagcttgcagtcagctgagatcgcgccactgcactctagcctgggcgacagagtgagactccgtctcaaaaaaaaaaaaaaagaaagaaactaagagtattagagtactgcacagtaaggcagcaagagtatgttcacaaagagaggttttcttcaaaagtcaaaagactaaatttttttattttttattttatcctgaaatgaatatttcccatgtcattttagataaaacaggtgggaagaagttctccaaagaatttgaagaggcaagctccaagctggaagaatttgtgaatggattagataagcaggtgaaaaacggaccctcattaacagaagcactggaaaatgctggaattttctatgaagcacaatacaaagaagtaaaagtggtggctaatgtaagtaataattaaagctgtcttatactgaatgcttgttactatatttcagagattgttaacatgcattatctaactctgttaggatatgcatttttatctccttatcgcagatgaaattacttttgggataggtgctgtggtacacacctgtaatcccagcactttgggaggctgaggcaggaggattgcttgagcccaggactttgagaccagcctgggcaccatggtgaaaccatgtgtctagcaaaaaagtacagaaattatctgagtgtgatctcaggcttcaatgagctgtgatcacgccactgcaccccagcctggccaacaagagtgagacccgtctcaaaaaaaatagaagaagaaattatgaggattagtaaacttgtacaaggtaatacagctagtaagtggtagaataagacctgggtctttttttttttttttttggaacggagtttgtcgctcttgttgcccaggctagagtgcagtggtgcaatctcagcacacagcaacctccgcctcccgggttcaagcgattctcctgccttagccccgct

SEQ ID NO: 373 - DNA, 1191 bp, Homo sapiens
ttaaagagacccaggccaccttttgctaggggccctccgttctttgcaccaaaacgcccattcttccctcccaggtactgatggaaaccaagggaaaggcattttgaacagtctagagaacattggaagtaggagtttggtttattgttgttgtttttatttgttttctctttctcgattttttttttattataacaaagggcctctcttccaaagtaagaaatcacatacgcttacgttttactattcaattcaatcctccctcccattgcacttatctaccttccccaagttgtttgtattaaaaaaaaaaaaaaaaaaaaaaagtaaagaaacacaaccaaagccatttcatttggctggggggttggggagtggggaggaaaacaatctttattttaccccatctattgaagagtattattacatttgaaataaaacttccatcagtacagataaccacatgtgcaatgttgggatgttattttgggcttggcttatcgagtagtcaatggaaggattcccgtcccctctctcggcagcttagtaactgctgtagccagctcggctcccttccctgtgtatctgtgtcctgctaacagccaagagatgttgcaagggaggaaatgtgagagaccttgaacctgtcaggtttatttgttttgtttttaaaggcatgttgaagtttagttctttacccttctcctaaaatctttttttaatcagcctcaaggttaaaataaggagtgactacagtatgtaaaataaggaaaggaagcattaatggtgtgatgtgacctgcctgtttttttgtaaacaagagaataggaaatgttttcaaggtagtttcacatgtcttgcaccaagctcatgcctcttgcttttcctttttgactttatctccctcagtttttcttctgctgtggccagaaagacagtcactacagttgactattgatacaaaggtgcaacagaaatattatccctgcatttttaaatataagaagtagacattaattttaccatggtgcctccctaatgtaagtgatatttattggtggttttcaacaaaggttaactattaaagaaagaaatatttgtctttatcttccttttccccttgcctcagtcgtgttattcacccctattcttgatattttaaaggaggagattcagtagcattttccttta

SEQ ID NO: 374 - DNA, 1169 bp, Homo sapiens
tccgcctcctgggttcaagtgattctcctgccttagcctccagagtggctgggattacaggcatgtgccaccatgcctggctagtttttttttttttttttttttttgagatgaagtcttgttctgtcacccaggctggaatgcagtggcgcgatctcggctcactgcatctctgcctcccgggttcaaacaattcttctgcctcagcctcccgagtagctggaactacaggcatgcaccaccatgcctagctaatttttatatttttagtagagacggggtttcaccatattgtccaggctggtctcgaactcctgaccacgtgatccacccaccttggcctcccaaagttctgggattatagacatgagccaccgcgccctgccagggaattgatttttatctgccattgccctctctcagtaggacagttcctttctcttcacctcttctgtcagctaaagaccatgagagggagaaagctagaagctgaagattctgaaaatcactaactggcctcttctttctcctaggtgtggcacattggttgacctttgccagggcccccaccttcggcatactggacagattggaggactgaagctgctatcggtcagttgtgggacagagttaggttaagattcctattttgagccgggcatggtggctcacgcttgtaatcccagcactttgggaggctgaggcagatggatcataaagtcaggagtttgagaccagcctggccaatatggtgaaaccccgtctctactaaaaatacaaaaattagctgggtgtggtggcacacacctgtagtcctagctgctcgggaggctgagacaggagagttgcctgaacctgggaggcggaggttgtagtgagccgagactgcactactgcactccagcctgggcaacagagcgagagtccatctcaaaaaaaaaaaaaaaaaaattcctggtttcactgggatgagcaggagaatcggaaggtgatactttctgtcggcaccccccttttttttttttgagaccaagtctctcggtcgcccaggctggagtgcagtggcgcgatcttggctcactgcaagcttcgcctcctggattcaagcaattctcctgcttcagcctcccgagtagctgggataataggtgtgcaccaccatgcccagc

SEQ ID NO: 375 - DNA, 1218 bp, Homo sapiens
acccaggaggtggagcttgcagtgagccgagatcgcgccactgcactccagcctgggtgacacagcgagactccatctcaaaaaaaaaaaaaaaaagaaagcaccttggaaagagtattgggacaccgatttgagcctacagtcttccccctagctaaccatgtaaatttgggaaactcattttacctctttaggtctcagtctccttaaagttgctatctaaggctcctccttcagctcagtgaccatcacagaacagggaaatggtaaacgatgtctgttattgtgttactgagaaatccacttttgaacctcagggctcagactgtgatgagtgggattgacaggactcagtgggaggatgtgctgaggctggagagggttatagcagatggtgcagagaaagtaggcaagcagattgggtggaggagcagtcttcgggggctagtcctccctatggccctgacccctctgcaccccaacctcagcctgatgttcgcccaccggcccagatcctggcgggaactgcccctgcgactagctgactttggggctctacaccgggccgaagcctctggtggtctggggggactgacccgactgcggtgcttccagcaggatgacgctcacatcttctgtacaacagatcaggtggcctttccctggctccaccaaagcttttctaaaccacctttctttctccctatgaacctgcaaacccctgatctttatttgccccctgtatgtactataattcagctacattctacccccagcttgcttccgcttcctctctgtttttgccctttgttttcctcaaactgccagcatccctgatctctagcgggctcacagctcactgacccttatttcctgcccctagctggaagcagagatccaaagctgtcttgatttcctccgttccgtctatgccgttcttggcttctccttccgcctggcactgtccacccggccatctggcttcctgggggacccttgcctttgggaccaggccgaacaggtgagtaggaggtagagaaatagaggcagataaaccactctctggtgggaaggagtggagaatacagtaatcaaggttctcagaggcatctggtgagtgggtcatttgttggggactgaccggatgtgttgcttttgaagtctaagatgatgtattccactcttgtctcattccttcaaaggtccttaaacaggccc

SEQ ID NO: 376 - DNA, 1174 bp, Homo sapiens
ttttttgttttctaggatgggtttgtggagttcttccatgtagaggacctagaaggtggcatcaggaatgtgctgctggcttttgcaggtgttgctggagtaggagctggtttggcatatctaataagatagccttactgtaagtgcaatagttgacttttaaccaaccaccaccaccaccaaaaccagtttatgcagttggactccaagctgtaacttcctagagttgcaccctagcaacctagccagaaaagcaagtggcaagaggattatggctaacaagaataaatacatgggaagagtgctccccattgattgaagagtcactgtctgaaagaagcaaagttcagtttcagcaacaaacaaactttgtttgggaagctatggaggaggacttttagatttagtgaagatggtagggtggaaagacttaatttccttgttgagaacaggaaagtggccagtagccaggcaagtcatagaattgattacccgccgaattcattaatttactgtagtgttaagagaagcactaagaatgccagtgacctgtgtaaaagttacaagtaatagaactatgactgtaagcctcagtactgtacaagggaagcttttcctctctctaattagctttcccagtatacttcttagaaagtccaagtgttcaggacttttatacctgttatactttggcttggtttccatgattcttactttattagcctagtttatcaccaataatacttgacggaaggctcagtaattagttatgaatatggatatcctcaattcttaagacagcttgtaaatgtatttgtaaaaattgtatatatttttacagaaagtctatttctttgaaacgaaggaagtatcgaatttacattagtttttttcatacccttttgaactttgcaacttccgtaattaggaacctgtttcttacagcttttctatgctaaactttgttctgttcagttctagagtgtatacagaacgaattgatgtgtaactgtatgcagactggttgtagtggaacaaatctgataactatgcaggtttaaattttcttatctgattttggtaagtattccttaggtttttctttgaaaacctgggattgagaggttgatgaatggaaattctttcacttcattatatgcaagttttcaataat

SEQ ID NO: 377 - DNA, 1168 bp, Homo sapiens
gattgtgccattgcactccagcctgggcgacagagcgagactccatctaaaaaaaataaatgaataaaataaaacaagtacaaatttaaactagagacacaagttaatggtgtttattgtggtggggttagtgagccatcccatgatttcctcctgagtatgttatccctggtttgtgtttgccagctggggaatgaggtgaggtctatgaggctgaatgtgggatcattcaatttctttctttctttctttttttttttttttttagaggcaggatcttgctcagtcacccagaatggagtgcagggtgcaaacactcactgtagcctcaacctcctgggctcaagtaatcttcccatctcagcctcccaagtagctgggactacaagcacacaccaccacacctggctaattattttttgtagagatgaggattcaccatgttgtccaggtgagtctcagaacacaggcttaagcactcttcccatctcagcctcccaaagtgctgggattacaggcataagccactgcgcctggctgagaatatattttcatcctttcttttgtagagaggatctcgttttgttgtgtaggctgctcctgaactcctggcctcaagcagtctttccacctcagcctcccaaagtgcagggattacaggtgtgaaccactacacccagcagttagtgcaatttcattttaatacaagtgaggaaattaaggtatagagataagttacttgtaaagtagaaaagctagttagctgaagagcttgagttagtatcttaggcttttatattatttcttcccactattcctggcttccctggtcctcaattttaatttgtggccttaagaagcctggggtgccaaaaatgtttggggctatctgtatttcatgttactccttagccttttttttttccttttagttcttcaccactgcacacttggcaggatgtatcccattttaaaacttgacagtccatctccttcactcccatactgtagggctaggcaagcaaagcaaactgattctgcaatgcttctaatagttattcctgctcattattttagctagatgtattctaaagtctttatcccaaagagttgaatcaaaggttcttccactcctccaacctgattgtgctgacaagccactaagctg

SEQ ID NO: 378 - DNA, 1100 bp, Homo sapiens
ccacctcatctctgtgctacctcagtctttgcaagtagctgtggccatgcctctgaaacagcctgctctgagccaggcagcttacccacctggaaacctccagttattttgatcttatctaaagaattatttttctatgtttgttatccatggatatcccagaaaggcagataacgttgtttcgtggataggaaaagactgaaattctattttttgattttttttgcaactcccttatggataggattgagacatgccaggtagcctaatggttgttaaatgtggaggaatcatggggtagagactgggttggagttcagggtttttttcccctattacttgacagtgttgttttttttttttttcttctgtgttcgtccgcagtggccaagttgaatgatgctgcccggggctctgccagatcctgagacgcttcccctccctgccccacccgggtcctgtgctggctcctgccccttcctgcttttgcagccaggggtcaggaggtggctcgggtgtgggctggagaggcagaagccctttcctgttggtgtcccagcacatggagccccttgggctgagcaccaagaccttgaaccttttttgttttaccttttttccaaataacagttgggagaaatatcaatgaaattctgggggtgggggtggggttgaaagggtggggtgggagatatggaggagtatgaattagggcttggagttggtaaaaacattcctgactatccttcttaaccacgtggctgatgtggggtaggtatgaggggaaggaagtggagtagcctaatgaaaaggggttctagttgagctctgtagataaatgccttgtttcagtgtggttggagacctggtgtcagataaaagaaactccatccgcacagacagatgcaaacagctcctctagttctgcagagctagttgagaactcaacattaatcattttaaaaagtactgtccttgaaatagatttgctgtgggaagaagggcagtgagtgtgggagaaaggagccgtgagcgtggggaaccccacagagcccaaaggactttttcagtattcgaaataaacaaaacaaaaacccatg

SEQ ID NO: 379 - DNA, 1220 bp, Homo sapiens
gtttttcaagcttcattgaaaagtcaggccatcagttattattggcagtatcttgatgaaatttcaaaaagccatgaaaacatcgcatgaatgattttggttttcatttgtcctgcttaatgtgcatatatttcattcagaaatactgaggtggattagggattgtggatctgtagtagtagtagtagtagaaataggaattttagatgcttaacttttttttaaataacagaattcattcatatgatgtgttaaggtagtgcccctcacatatcctccttgggatatagagggtcttaaaagctgaaaacttcttgaaaaacttttgggattatatgcatagccaccatgcctggttagtcctgttcttttaaaaatgacagtaagaggccgggagtggtggcttatgcctgtaattccagcactttgggaggcagaggcaaaagttgctcaactttttgaaaaaaaagaagtttgtagtttgttaaggaactatctagaagaaataacccaaggaatgtaaaactctaaactgctgaatatcactcagttctccttctcttgtcatcagaatatatgcgtaaatttttacattcttcttcattgttactgtgttattttctgcctattgaccattttataaaaacattcccatatattgataaggttattgtatttgtcatttttaatagctaaataatcttttagcttgttaacctgtcatacttagacattttattcagggcctctttatctatataaatatatttaaaatggaattgacacattcctgacacaatggcctgccaacaccttgctatttcctcagttgccacccatcattacagtatctcagttttctagaaaaatttagtgatggttctttgtatccttctccagtggagagggaattgttacttttgatccattcctgtgtggctatactgcagagaaatggcaaaaggaccgaatcaaagttaataattattttaggaacaaatcaataatagaagatatgccagaaacctacctcttagagttatttatataatttctccagtgaaatctggttggttattttgtcattgtgtggcacgtgcatgtgttgtttgtgtgagagggagagagattatatttgtcatcacttgtttgatagtatcatctttaatgtactctgtctttaatttcttcattatagaatagcacatgtggatatcatt

SEQ ID NO: 380 - DNA, 1199 bp, Homo sapiens
gtgtgccaccacacccggctaatttttgtatttttagtagagatggagttttaccatgtcggccaggctggggaggtcaaattcctgacctcaagtgatctacctgcctcagcctcccaaattgctgggattgcaggtgtgagccaccactgccagccaggatacattttcagataacagcaaggtaaataatgaggtaagggtgaaagtactgtactttgggcttactttggatttttgaggaactagtctggaaactaaaccactatttaaaacatttttctatagaaaaagcattctaaattctaaacagagacactttggaatgtggcccatttaaattgaggactgtctatacttaaatatatatacatcgtaatggattctatatctcttaattcctctactggctttgaccttttctgcatgtgttccaatattagggcagtgactaattgtgagtctttggtgaaggacttctactccaagctgggactacaataccgggacagtagctctgaggacgaatcttcccggcctacagaaataattgagattcctgatgaagatgatgatgtcctcagtattgattcaggtaagggatgagctttggataggagagtctcaggactgaagttgaaacactggaagatgagcaaatagaagataatagaagagaggagaaaccattgtcactaactccatatttctaactgcctgagttggctattaaagaaaaaaatgcaacattgttagtatcatagatgttccctatgtgctacaccctgattgtattactttgctttcctcattctgtgtaacccctattttggggtattccatcaaagagtggaattgccaggacttatagtgagtgtatgttctgttattagaatataaaaaatacagttggtttttgtgtattgatcttgtagcccgcaaccgcattaaactcacatagttctagaagctttttgttgattccttaggattttctttttttttttttttttttttttttttgagatggagtctcgctctgttgcccaggctggagtgcagtggcgcaatctcagctcactgcaacctctgcctcctgggttcaagcaattctctgcttcgacctcccaactagctgggattacaggcaaaccccctgccccaccaccacacccagctaatttttgtatttttagtag

SEQ ID NO: 381 - DNA, 1347 bp, Homo sapiens
acaagttcataactggaaaggtgaagccctgttcccattgtgtaggccttactactctctacaacttcctgaactcccatcttgccagtaactctctaaaaaactagtgtggagccctgggtataacaggaacaagccctcagagagaagcagtacttaggggtttgaggatctcatgtaataacccttcttgtcccttttccacagctggtagaagatgaacgcagtgaccgggaagaaacagagagctcagagggggaggaggctgcagctgggggaggagcaaagagccggcccctagccaatggccaccccatcctcaataacaaccatcgtaagaatgactgaaccattactccagctgcctcccagattaatgcataaagccaaggaactaccccgctccctgcgctatagggtcactttaagctctggggaaaaaggagaaagtgagaggagagttctctgcatcctccctccttgcttgtcacccagttgcctttaaaccaaattctaaccagcctatccccaggtagggggacgttggttatattctgttagagggggacggtcgtattttcctccctacccgccaagtcatcctttctactgcttttgaggccctccctcagctctctgtgggtaggggttacaattcacattccttattctgagaatttggccccagctgtttgcctttgactccctgacctccagagccagggttgtgccttattgtcccatctgtgggcctcattctgccaaagctggaccaaggctaacctttctaagctccctaacttgggccagaaaccaaagctgagcttttaactttctccctctatgacacaaatgaattgagggtaggaggagggtgcacataacccttaccctacctctgccaaaaagtgggggctgtactggggactgctcggatgatctttcttagtgctacttctttcagctgtccctgtagcgacaggtctaagatctgactgcctcctcctttctctggcctcttcccccttccctcttctcttcagctaggctagctggtttggagtagaatggcaactaattctaatttttatttattaaatatttggggttttggttttaaagccagaattacggctagcacctagcatttcagcagagggaccattttagaccaaaatgtactgttaatgggttttttttaaaaattaaaagattaaataaaaaatattaaataaaacatggcaataagtgtcagactattaggaattgagaagggggatcaactaaataaacgaagagagtctttcttatgccttccttgcagttatgtaatattttcttttttaa

SEQ ID NO: 382 - DNA, 1205 bp, Homo sapiens
tcttctttaagaaaaactttttttttatttcaggttctgccatcttgaaacccccattctgtttccagcccagaagaaatgctgcccctaccagatccctccttgaaccagtgatctaaggacccctcttttccctatctgcctaacagtgcctcacaaggcttgggggctggactccctctactccctctggccatagcccctcctggagatggggtcaaggcagcaggactgatcaagtgactactggttagccagaggagctcagctgaagccctggaaaccctcaggtctgagataggagttctctaggaacctggaatgagttcctgtctcctgaatgatggtctgggtgccacctgtttttaaactcttaaacctggaactccttaaatggggtaggtgggtgagattatcaaagctgaagctggctttgctgagaagctccctacctccctgcccttctcctccttcctgctggaatgaactaaagcagatgtcaagcaggggctggtgggggtgcctactcccttttccactctatctttagatttcaaaccttaggcttacagcccctcaatatctctctgctaacaccagtgtctctttctagttaggcctctaatcttctgtttctgtttaccagcttcccagcaactttccttttttaaaatattaaaaatttaattcaggttctcttaattatcctcatcctgctgttgcctccgcccttaactctatccctattaggaaccttgtttcccaccgaataagagttaaggtaagaggtagctcttcacctgatgacattccatttaagttttggggcatctttcctgccctctgccaacctccctgctggcccaggtgagaggaggaagaggggtctggaaagaaacccagaatgcggcagaactaggagtaagtccatctcaaggtggacttctgatcattgaggatggtgagataaataggttgaaaacaatcatctgtgagtttaggagtcttaagatcctcacagcacgggagcagggagaggctctagaacaaggtttcacaaccgagatgcctttgacattttgggctgaagtgttctttgtaaggaaaacctgtttcctattttgtgcattacaggatatttagcagcaaccctggcccactctagttatgacaaccaaaaatgtctctatacattgccagatttc

SEQ ID NO: 383 - DNA, 1357 bp, Homo sapiens
cgatcttggttccatgcaacctccgcctcctggcttcaagtgattctcctgcctcaacctcctgagtagctgtgattacaggcatccgccaccacgcccggctaatttttgtatttttagtagagacagggtttcaccttgttagtcaggctggtctcgaactcctgacctcgtcatctgcctgcctcagcctcccaaagtgctggaattacaggtgtgagccactgcacccagcctgatttccttctttctgtatctgttgtcttctctcctcagctctttgtgtttttccttgtcttttgtcctcagacttgatcctgctccctcggtgtctgcattgactcctcatgctgggactggacccgtcaacccccctgctcgctgctcacgtaccttcatcacttttagtgatgatgcaactttcgaggaatggttcccccaagggcggcccccaaaagtccctgttcgtgaggtctgtccagtgacccatcgtccagccctataccgggaccctgttacagacataccctatgccactgctcgagccttcaagatcattcgtgaggcttacaagaagtacattactgcccatggactgccgcccactgcctcagccctgggccccggcccgccacctcctgagcccctccctggctctgggccccgagccttgcgccagaaaattgtcattaaatgaagagatgtctagtcctcagaaacttctttcctgccctgattggggctcttgctgttccgtttcttctccctgcttctcccctttgtcatctctgatctttgcctaatctgtttctttttccttttcccctagttcttacaggtttcgttgtgttttttaatctaataaaatagaaagatcccttttgtctggtgtccagtctagggttgggagcaagaagtatttgaatacctgcatatatttgggtctttattcgatagcatttattatgagctgtcctttctaaattgtattcattcctccaactaaattataaacatctgaaaattgcacaccaaaacacatccttgtattgaccttcctatcactttacactcactgttttgaatacagcaggcaccaaataaggaggaactggctgattctagtcgaactcatatgtctcagactggggcttgtatgaagggaagtggaagagatgccatggctgttaatgaccactagaggctctcagggctgggcagggtatgggggctgtgtatatgtgatctcccactaccccccacctggccagagctaaaataataaaatgctgagctcactgttcccccaccctctcccccggcaccgggctcctcctgctgctgggacagtgctcta

SEQ ID NO: 384 - DNA, 1357 bp, Homo sapiens; identical to SEQ ID NO: 383

SEQ ID NO: 385 - DNA, 1183 bp, Homo sapiens
ctttgggaggcctaggtgggcggaccacctgaggtcaagagttcgagaccagcctgaccaacatggtgaaaccccgtctctactaaaaatataaaattagctgggtgtagtggcgcatgcctgtaatcctagctacccaggaggctgaggcatgggaatcacttgaactctggaggtggaggttgcagtgagccaagatcgcgccattgcacttcagcctgggcaacaagagcgaaactccatctcaaaaaaaaaaaaaaaaaggaattatgcaatagggtacatttcatctgatggaagtaaagcagtcatcaaggctccatgttggggggttaggtgtggatatgtttcctttcttctaggttttcatgcctcttggaaagtgaagtgagctaacaccttgttctctgaatagtaattcataggcctgtctttgttgacattagccttttcacttttcagaccaactttgggtgtgtgttggggatactagcaattatttgtatctatgtcttggtaatagttgctaaggtagttgctaagtaggctctctctttcccttttgaagtgaagccttctccttccaaaaagtttcggtctggctcatctttctctcggcgagcaggctccagtggcaactcctgcattacttaccagccatcggtctctggggaacacaaggcacaagtgacaacaaaggcagaagtggagccaggtcagcgctagggctggggtccccatgtgattgggtactccctcccttccttctgagcctttatcttgtctggccaggacctctgctcccatttctatccaggaagcctagctgctacatatttttccttgtatttactgtaccccatcttctctatcttttttccaggcgttcaccttggtcgtcctgatgttttacctcagactccacctttggaggaaatcagtgagggctcgcctattcctgaccccagtttctcacctctagttggagagactttgcaaatgctaactacaaggttggtttattggcccctttctccatataatcttatctctcttttcaagtccttggaaacctctataatttgattgcatcataataaattaccccaaagattagtggcttaaaataacaaacatatatcatactttctgtgggtcaggaatccaggcccagcttagctgg

SEQ ID NO: 386 - DNA, 1223 bp, Homo sapiens
tgtctttggagggcttattttttcactgagctaactatttttgttgtttcattttccataggactcacttggatagctcactcaaggtaacaaaaactcacctcacaatttaatttctggtttgcagtgtgtttactctgttattattattattattatcatattattgtttcaatttcctagttgaactgagatttctcctcttctctttgctcctcacccctttaggcatggccagactcgtgaccgagtgcatgaccggaacgtgaagaatatgtaccctcctccttccttccccactaacaaagctgccactgtgaaatctgcgggggccaccccagctgagcctgaagagctactaactcccttagccccagcactcccatcaccagcctcaactgcaaccccaccaccaacccccactcacccgcaggctttagcccttccaccgctggctacagagggagccgaatgtctgaatgttgatgatcaggatgaagggagcccagtcacccaagaacctgagctagcatcaggtggtggtggtagtggtggagttggcaaaaaggagcagctgtctgtgaagaagcttcgagtagtactgtttgctctatgctgcaatacagaacaggcagctgaacacttccgaaatccccagcgacgtattcgccgttggcttcgacgtttccaggcctcccagggggagaatctagagggcaaatatctgagctttgaggcagaagagaaactggctgagtgggtgctaacccagcgcgaacaacagctacctgtaaatgaggagaccttgttccagaaggccaccaaaataggacgttctttggaaggggggtttaagatctcctatgagtgggctgtgcgtttcatgctgcggcaccacctgactccccatgcccggcgagctgtggcccacaccctacctaaggatgtagcagagaatgcaggactcttcattgattttgtacaacggcagattcacaaccaggacttacccttgtctatgattgtggctattgatgagatctctttgttcctggatacagaggtgctgagcagtgatgatcgaaaggagaatgccctgcagacagtgggcacaggggaaccttggtgtgatgtagtcctagccattctggcagatggcactgtccttcccaccctggttttctacagagggcagatggatcagcctgctaacatgccagact

SEQ ID NO: 387 - DNA, 1137 bp, Homo sapiens
ctgaaaataagagaatttaagtaagttgatcccttagatctttttctttcctcaccccctttgtggctttggtttagaaagacagaaataattaaaatagaagattaaagaccagttagaatccagttaagcactttacccattaaaacccagagtgcccctggctatagctgactcactggggcactgcaagattgttttcaattttcaagcgaaacaatgccatctgttgggcttcttgcaaactgctactgtcaggatgtatagccctaactaaatactcaataaacagaatggttaggttggttgtttggttttggttttcgcttatggatgtagcagcagaattactaagacactaaggacacttagagccttacagtaaaggctttgtttgaacattgagcagtaatagtactcccgttccaacacagagaaactgacccttagtaaactgttattggagggcagaatagcattaactctttgtttgcaatgcagagatacagactttatttatttgtttttatttatttttattttttttgagatggactttcgctgttgttgcccaggctggagtgcagtggcgtgaattgtggctcattgcaacctccactcccatgttcaagcgattctccagcctcagcctcccgagtagccgggattacaggcatgcaccaccacgcccggctaattttatgtttttagtagagatgggttttctccatgttggtcaggctgatctcaaactcccgatctcaggtgatccgacctcaggtgatccgcccacctcggcctcccaaagtgctgggattacaggcgtgagccactgcacccggctcagactttaattttttaaagggacatgtaatttaggcagtgttttcaaattaagggttgactccgaaatcacagtggaatggcctccaggatttcctagactagacgtacaaggtagtagtaggactgggactagagtatgacaagtaaggttctcatcttagatgcaaaatttaaaggagtacagagaggttcagtaatcataataaatgcattttaatgcatcattttaaaagatcaatattaatgcagaacaatccataatgaacagaatatctattttaaataaagact

SEQ ID NO: 388 - DNA, 1208 bp, Homo sapiens
tggtcctgggaataaatcaagaaattcaaccaacaaggctaccagttatttagtaaataccaaagagataggtggaatgtagcagtacagaatatcacagctaagatatgagtaggtagttccactccctcctaccccacctcagtttttattaagaaaatttcacgcatgcgaaaagggagaaagaggctgggcgcagtggctcacacctgtaaccgaagcactttgggaggccaagatgggcggatcacaaggtcaggagttcaagaccagcctgaccaacatggtgaaacctgtctctactaaaaatacaaaaattagctgggcgttgtggcgcatgcatgtaatcccagctactcaggaggctgaggcaggaaaatcacttgaacctgggaggtggaggttgcagtgagccaagatcactccagcctgggcaactgagcgagactccatcacaaaaagaagaaaaaagaaaagggtgaaagaattctacaaggaacacttaaactatccaccacctagacagagtgactttttttttttaagacagagtctcgctctgttgcctagactagagtgcagtggcacaatcttggctcactgcaacctctgcctcccgaattcaagcgattatcctgcctcagccttccgagtagctgggactgcaggcaccagccaccacgcatggctaatttttgtatttttagtagagacggggtttcactgtgttggccaggctggtctcgaactcctgtccttgtgatccgcctgcattggcctcccaaagtgctgggattacaggcgtgagccactgcgcctggtgacaggatgatttttaatgttttggcccatgccaaatattttttgaaagttggcatactagtatctataagaaaatatcaaaatagcccacctgtagtgacaactacttgggaggctgaggcaggaggatcacctgagcccaggaggttgaggctgcaataagccgtgattgtgccactgcactccagcctgggggatagaatgacaccctgtctcaaaaaaaaaagccaaatatctatgtatttgcttaaccccttgaaagtcactttcaagatatttctattaaatattttgtgcatttcctaggaataaatacattctcctacatgaatataatatgattatcctttctgtttaaaaattttttagagggatcggttctgttt

SEQ ID NO: 389 - DNA, 2230 bp, Homo sapiens
cgtgagaatgctgaatgtgtaaagttgcagagggatccctaatttgaagactttgacacagaactaacttcttttgacttaaatgaatttaaaatgagccaaaggaccctgaaaagaagacatgttgatttcccactcctagatgctaaagagacttggcaccagctttgttcaaactgtaaaaatagcaatttgcccctactcgctcagagtgggacagtagtgaacagagctgggattccatgcgacagcttgaatgctgaccttcagacatgagacatagggatttggaggccccttagaatgggtagatggtgttatgttccctttctggcatagcattcacttggtgctttggagattaggtgagggccctataggtagttggcctgttggcagaatttatttaggaacagcccttttgaaagtgtcccagtaacaacgcacccagctgcagcaaggaggtggggaaggagggcaccccaaaggacagcgccttcttctcttccacccatgcacggccttgggtgatggaggcgggttccctgtggctgcgtggatcccataggatcaagcccttctttgcatgaagcagtgttgtgactcttctctctccccttcctctgcacttcctttctgtaatccctactgttcttcttagtcccagcttctgcccagggaggcttctacccagacttcttttgcaatttgtccctgggaagagggggtctcccagtgcccccagcttcatcccagcagaaccagcaggatcctcctggtctctcactggccttcctccacacttggtttctatcctcaggggtagaagctcagagctttttatggcccaggagaaaatgtagaccctgagaaacctgtccctgcagaaaggttcccttgggccatgctttgggccctctgctctttatatgtttattctattctccatttttccaccccgtccttaccctaggcctaaacacaggtacagatatgtgcatgctcagggcagctcctaggcctggactgagctctcaggggggaattagataaatattccaacatcctcatgcctggcccatttagtttcatcctttagttacccaggccagtagctttgggttatcccttcctgtagctccaaacccagcacttggagcagcaaaatagggcactgacaggagatgaaactctctcctatctcagaatttgccaacttctgggctgggctcctaggaggtagttttcttgaaggggactgcatcctagttgacctgaattttccagaccaggagggactgctgtgctctcccttctcgccatcatactgtttggctagattcattcagcagtagaagctgtttgatctgttgaccccagcatactgctgtttcttcaccagcttcattgtgtcacagtagcttcctttgggaggatgatgtgatagaacactcagagagagggagggagaagagagatagtgggtatgcttctctagctccccatcttccaggtccacctcttgacttcctgttcccctaaacctgagcacatcacgccaggcctctttgctgccaggacagcatcagctcactcctcagcaataatctagggtatgtgggaaggtcagggctgtggtaaggaatagaatcaaagaggggagtgatacggggtgggggcacttggccgcctgctaaacttggacattaattttatatcatgacccccttttaagccagtgagctgggcttcagtttttcccaggccatgcacatttaatttatttcagagaaactctaattgtattttcactgcagtatcttgtattttttatttgtgatttaagaaatgtgaagagaaaatacacagacacaataatggctaacattgtttctttcattccttgttctagagctaaccactctaaaattgtttggtaatgtcacttagtgtaattaattgtaacatattcttttaaataaattgatttattgatcaaacacttctttggtttcctagactacaaatcctttgggttgtgtgggaagaagtgaactgggacctttgagatttgagtcagagtggtcagtctgaaaagaagaaacatctaaccagttttcccaggtaactagtgtggcagttttttgagtgcagggaatggagaagggtgaggaaagaagccacaggaggcccttggtttgcagttctcttcccagtggctcctttgaaa

SEQ ID NO: 390 - DNA, 1400 bp, Homo sapiens
tcgtgtgctctttagtcatcagtgataaggcctttttatttatttttggcttgggccttgccacttatagaaatgatgtcactattgtgatttgctcattttacgtattgttctttgtagattctcgggattcgaagatggctgcacagtcagcgccgaaagttgtgctaaaaagcaccaccaagatgtctctaaatgagcggtgaggcagccaacagcaacttcaactccttcctaagaaaacattacttaacttggccctggggtccaatgcacaaagccaattttaagctaaataccaacagaaggctacagacctctgttcttagttgcatctcatgtggtacacaaaacaaattgggcggttgtttcaaaaccccttatcagtagacttttatgttaagctgtctgaagtatttatttggtgggatgtattttaaaagactcctaacactcttccttttcacatttttttacgttgatactggggtcgtgcagcacggtagcatggtaccctggctacagtaggcttgctgcccagtccaaggccagcagtgttgtgtctggcctgtaagaggcaggtagcaagccatgaatatgtccaaaggcccttgaatgtcattcttgggccttgtaagaggcactcgctttgctccatttcactttctttccattctgcttttagtttggttttgttttggattcttctacagttaagtgttcttctcttccattccattatacttccttgacagaaataatgagtctcttcacaggctcataaatgatcaaactgatgtaactttgaaaagtaactacttggagtcagaaaaagtgatgattggagactaagaaaagtaaagatattcaaaggcagtttctatctctgacaactttgttcattaagagtgcctttgtttaggcgcggtggctcatgcctgtaatcccagcactttggcaggctgaggcgggcggatcacgaggtcaggagtttgagatcagcctgcccaacatggtgaaaccctgtctctactaaaaatagaaaaattagctgggcgtggtggcgtgtgcctataatcccagctactcaggaggctgaggtaggagaatcacttgaacccgtgaggcgaaggttgcagtgagccaagatcctgccactgcactccagccagggcaacagaggacagagtgaggctccgtttcaaaaaaaagaatgcctttgatcagtgatttcattaagttgactttcgaccactgaaatttacttaatgtctatttttgcctcttctgaggcatatgtgcttctctccttatctctttggctatgataagctaattatttatgtttgcataatatttatgtttgcatgttagtgacatatattttaaaatgtgataca

SEQ ID NO: 391 - DNA, 1236 bp, Homo sapiens
cgtggatgctgttaaacatcctacatccccatcaccccaaagatttgtctagcccaaaatgttattaactgccactgacctgaaaaaccctgctgtagaaagaggatatgagtacaggaggggtcctgttccctgagtcttccaatttttctgcccaggccttggctttctcttataaaagtatatattctattacttacccttgcttcagccttggatatgggacagaaatgagagtgcaaagtagcttagagatacatagaaagtctaggcaaataaattattataacattatgtcattttctgtcaattagtggaagctgttgctgccctggggaacaaagtcgtggaaagcctaagagcacaggatccttctgaaggtttgcatttgttgctgattctgtatttagtagccataggaaccaggtcttgtaattgtaagtacactttcaacaaaatcagatcagaccagatggaagagtaaatgcagagttttatgttgtgggagtttttggcaggggcttcaggtgttcaaggtgttcaagggagatctgtttgatctcccttctaaagctctgtattctaaattctcattctggactttgtgctgttttaaaaaatccacctgttcccccccaccctggatttaactttgatcatctaatggaaatgtgagttatagtttttgtttattctgttttttcagttttaaccatgctgaccaacgaaactggctttgaaatcagttcttctgatgctacagtgaagattctcattacaacagtgccacccaatcttcgaaaactggatccagaactccattgttagttcttttttttccattgctggaaaatttaggggatattcaaaacatggtattgttgctgtttagtttacttagcttgttgctattccacatgcagcttcctgggaattgaagaacttaggtttattctgaactttgctctctccctctgtaatttggaaatagtttatcagcttgctagtggaattttcagatggggtgaccaagaaagcatttggaggacttaaaaaggactgagaaaatatttatggagggggataggcttttgaagaaaacagatcttgcatgtttctagtgatttttagacaagtgatttgctgatatgagaaacacagggtggcttaaagaattgcagagttggtcgggtgcggtggctcacgcctgtaatcccagcactttgggaggctgag

SEQ ID NO: 392 - DNA, 1181 bp, Homo sapiens
tgtcagagaaaccagaagcttgacggtgaatcctcgggttttaaggagagagcaaagtcctgagagggcgacgtattgtccctgctcacctagcccagaatgaacaaacacgcgccagccagggagcagcgagccgagaattcggacgagcctctgcaaccgccatttgccgttctcgcaaagactaccaagaccacaatgcaacggggcgccgagctaattcccagtgagcagcaggcgaggcgccaccgacgcggaagactataagccccagcgggcgacgaccgaacgcccccgggaacaccgggccccgagctcggtcccgcgcccgaggatcctccacggggctagatggctgcgtcgggggcgggagcggaggtgagcgggcgctagggccgcgagcccccgccggcccttcctccagcgccctgcggaccccgcagaaggcgctcgcctccctagcccgcaaaaacatatcgatttttctcgctgtggcaacggggacgtcctgatagatcctctgctccaataggcaactccggccttccctgccctgacctggaacctctgggagggctgcagagtaagtgccgcctctgcgctccgacggaggcacgaggcctgtggagtaggtccctctgttccgacaggtgcgacacttggcgctccatgcttgcgggtgccgggaggcctggcctcccccagggccgccacctctgctggttgctctgtgctttcaccttaaagctctggtaaggaggaggtaaggggagggaaaaggaggtcactggaggacaggatcgttcccggcctcggggctgggggagatcttatccatggacagcgcaggagggggtgccctattttctgggttttgacttttgtcccttcccccaactccgctacagccaagcagaggctcccgtgcaggaagagaagctgtcaggtgggtgattgtctgggaacccgacacgtcccgtcgtttgtttttggttttagtatcttccccatataccaagagcacaggtggaaaaggccggcaccacatggaatgagggcaagcgctgtgccgggaagttggatgggcagagcctgggagaaatgttttctgaatggcctggggctggcatttatctttcctttcagcaagcacctcaaatttgccatgctggctggtggaa

SEQ ID NO: 393 - DNA, 1316 bp, Homo sapiens
cttgcaacctctgcctcctgggttcaagtgattctcttgcctcagcctcccgagtagctgggattacaggcacccgccaccactcccagctaatttttgtatttttagtagagacagggtttcaccatgttggccaggctggtctcgaactcctgacctcaaacaatccacctgcctgggcctcccaaagtgctgggattacaggcgtgagccaccgcgctcagcctcttgtatttctaagctactagatggggttttagtaactagtttacaaaataggacagataggacacaaataactatttgtgactattgctgcatttatggcctgggataagccctgatttctttgattagtcctcattctgtcaatgacctcccctctctgttcttcagggttaaagcacgaattgggagctctcagcgacatcaccagtcagcagccaaagacctaactcagtcccctgaggtctccccaacaaccatccaggtgacatacctcccctccagtcagaagagtaaacgtgccaagcacttccttgaattgaagagctttaaggataactataacacattggagagtactctgtgacggagctgaaggactcttgccgtagattaagccagtcagttgcaatgtgcaagacaggctgcttgccgggccgccctcggaacatctggcccagcaggcccagactgtatccatccaagttcccgttgtatccagagttcttagagcttgtgtctaaagggtaattccccaacccttccttatgagcatttttagaacattggctaagactattttcccccagtagcgcttttttctggatttgcattcaggtgttattcttaatgtttctgtcaaagcttcttaaaaatcttcacttggtttcagccatagttcaccttccctgttccaggtttatttaattccaaaggtgagagttggagtgagatgtcttccatatctatacctttgtgcacagttgaatgggaactgtttgggtttagggcatcttagagttgattgatggaaaaagcagacaggaactggtgggaggtcaagtggggaagttggtgaatgtggaataacttacctttgtgctccacttaaaccagatgtgttgcagctttcctgacatgcaaggatctactttaattccacactctcattaataaattgaataaaagggaatgttttggcacctgatataatctgccaggctatgtgacagtaggaaggaatggtttcccctaacaagcccaatgcactggtctgactttataaattatttaataaaatgaactattat

SEQ ID NO: 394 - DNA, 1477 bp, Homo sapiens
tagcacttcgagaagccgaggcggacggatcacttgaggtcaggagttcgagaccagcctggccaacatgacaaaaccccgtgtctactaaaaacacaaaaattagccaggcatggtggcgcgcgcctgtagtcccagctactctgaggcaagagaattgctttaacccaggagtcggatgttgaagtgggctgagattgcaccattgcattccagcctgggtgacagagcaagactcccatctcaaaaaaaaaaaaaaaaaaaagatgtaatccagtgattgtcacctatagaaatgagattaagccccaaaagagggcctgcttatatgagtttctgatttttacagtcctcattcatggtgctagtgcaggacaatagcatttccttgagattcattagcatctctggcttcatatactgggtttcctcttgcagatttgaagaacccaagtgattcagcagtgcacagcccctttacaaagcgccaggcttttaccccatcttcaaccatgatggaggtgttccttcaggagaagtcacctgcagtggctacctccacagctgcacctccacctccgtcttctcctctgccaagcaaatccacatcggctccacagatgtcgcctggatcttcagacaaccagtcctctagccctcagccggctcagcagaaactgaaacagcagaagaaaaaagcctccttgacttctaaggtacttaaacttttaggtagataccattttatggcaaggggtgtggggcttgagaattgagattaaaagggtaagtttggaaatttaaagggaagggttttttttagtctttagtaaggttgtattaaagccattactttctcttctccttcaactttatagattcctgctctggctgtggagatgcctggctcagcagatatctcagggctaaacctgcagtttggggcattgcagtttgggtcagagcctgtcctttctgattatgagtccacccccaccacgagcgcctcttcaagccaggctccaagtagcctgtataccagcacggccaggtagaggaaacattaaccataagacctctcttattaacctttactacttttttaatctgtgggagatttctagaactctggagaggccaagcccctctgcatggctgagggggaaagtagtcagtcatagcatttttagtgctttaaaatattgttattagggttatctgtaactaaacaggtagaaatatgccccttaggggctgggtgtgatggctgacacttataatcccagcactttgggtggccaaggcaggaggattgcttgaggccaggagttcaagaccagcctgggcaacataatgagtccctgtctctacaaaaaaaatttttttttaaacacagagtttcactctgttgcttaggctggaatgcagtggtgcgatctcggcttactgcaacctctgccacccgggttcaagcgat

SEQ ID NO: 395 - DNA, 1206 bp, Homo sapiens
ttgtcttatttttcctgacctatgatgctgatctcttttcttcttctctcttccactgctcccccttttgaagcacacaagtgtggagagtgaggcgaatctccattcttcctccagcactttttccaccacatccagcacagtctctgcacctcccccagtggtcagtgtctcctccagtctcaatagtggcagtagcctgggcctcagcctaggcagcaactccactgtcacagcctcgactcgaagctcagttgctacgacttcaggtagccttgcataagcagatggcattcctctgggatggaggaggtaagtaattgtgtgatgggataaaaatgtaatttctcttttaggaaaagctcctcccaacctccctcctggggtcccgccgttgttgcctaatccgtatattatggctccagggctgttacatgcctacccggtaagtgggactaaaggatcttcttcaaaaggtgaggatgttgtggctactctttttatagctctggcttcagatggacccctgtgaataccaaaacttgcacatactcaagccctgcagttggctctgtggaatccatgtatatgagttttgcattctgtaaatgtggccgtatttttgatctgtgtgtctggttggaaaaaattcatatataaacagcgtgcagttcaaacctgtgttaagggtcaactgtaattaaaatataaaataaatgagggattgccacatgtaatcaaactggtttttaatctttgcagttttggaaaaaatactaaactgaggccaacccatctattgtgtatctgctttggtttatggtgcacacatgtatgcatgtgtgtgtgtgcgtacaatgtgtatgtatatgtgtgatgagaatatctgccctgtttgaaacacagcttctgggcctcagaagccaaaggccagaatgttcatctggaatcctttttggtttcttagataattatgactattattttattttttgaggcagatcttgctcttttacccaggttggagtacagtggaacgatcatagctagctcactgcagccttgaactcctgggctcaagcaatcctctcacctcagactccccaagtagctaggactacaggtgtgcatccccatgcctggctaagttttaaaaatttttttagagacagggtcttcctatgttgcctaggctggtctcaaaat

SEQ ID NO: 396 - DNA, 1269 bp, Homo sapiens
tattagaatatagggatttgggggagggtttccaacagaagataacttttttttttgagacagagtctttctctgtcgctcaagctggagtgcagtggtgtgatcttggctcattgcaacctccgccgcctgggttaaagcaattgtctgcctcagccttccgagtagctgggattaaaggtgcccaccaccacccccagctaattttttttgtatttttagtagaggcggggtttcaccatcttggccaagctggtcttgaactcctgaccttatgatccacccgcctctgcctccctaagtgctgagcttataggcatgagccgccgcacccagccttttttttttctttttttaaatcagagttgtggcatcttagtaaatacattttaacctattctatagcccagtaaagtactctggagcactcagggtgctttctgtttgtcccagacactttaaattatcgaatgatctgttttctcagtagaataagcttggtataaactgatagggatgacacctagagggttgaaaatattggtcctcgtggactttgatgtattctcaagtgggcatacccgtagaccttgtctgactgtgctcatggccaggcaggggggacagtgtatgcaagagtaatgtggagtttgtgctaactctagccagcttaattagtgactggataaattgcacaactctcacattcttctgttttttcctccgtggaaatagtactcatgctggggaatgagtgacattgaatctctgctcttttttcccctcttttctaggattactacagcatcccatttcccacacccactactccgctgactgggagggatggtagcctggccagcaacccttattctggtaggattgggatgggactaaataaataaaaagggagatagtgttgggattgatggcagacacctgattggtagcaagaagggatgtgataaatcaggattggtagattcaaaatcctgctaaagttgggcatgtcatggcttttcctattcatcccactttgtgttgtctccctgtgatttctagatgatatcttagccaggcatggtagcacacacttgtagtctcagctacttgggaggccaaggtgggagaattgcttgagcccaggagttcaagaccagcctgggcaacatagcaagaccccatctccaaaaaaagtgatatcttgacttagtttcaagccatttgctagctttttccaggaaatacagtggttgaggtggtcttctc

SEQ ID NO: 397 - DNA, 2437 bp, Homo sapiens
agtgtatcactttctccggcagctgggaagtctagaaccagccagactgggttaagggagctgctcaagcaatagcagaggtttcacccggcaggatgacacagaccacttcccagggagcacgggcatgccttggaatattgccaagcttccagctgcctcttctcctaaagcattcctaggaatattttccccgccaatgctgggcgtacaccctagccaacgggacaaatcctagagggtataaaatcatctctgctcagataatcatgacttagcaagaataagggcaaaaaatcctgttggcttaacgtcactgttccacccggtgtaatatctctcatgacagtgacaccaagggaagttgactaagtcacatgtaaattaggagtgttttaaagaatgccatagatgttgattcttaactgctacagataacctgtaattgagcagatttaaaattcaggcatacttttccatttatccaagtgctttcatttttccagatggcttcagaagtaggctcgtgggcagggcgcagacctgatctttatagggttgacatagaaagcagtagttgtgggtgaaagggcaggttgtcttcaaactctgtgaggtagaatcctttgtctatacctccatgaacattgactcgtgtgttcagagcctttggcctctctgtggagtctggctctctggctcctgtgcattctttgaatagtcactcgtaaaaactgtcagtgcttgaaactgtttcctttactcatgttgaagggactttgttggcttttagagtgttggtcatgactccaagagcagagcagggaagagcccaagcatagacttggtgccgtggtgatggctgcagtccagttttgtgatgctgcttttacgtgtccctcgataacagtcagctagacacactcaggaggactactgaggctctgcgaccttcaggagctgagcctgcctctctcctttagatgacagaccttcatctgggaacgtgctgagccagcaccctcagatgatttccctccaaactgctgactaggtcatcctctgtctggtagagacattcacatctttgcttttattctatgctctctgtacttttgaccaaaaattgaccaaagtaagaaaatgcaagttctaaaaatagactaaggatgcctttgcagaacaccaaagcatcccaaggaactggtagggaagtggcgcctgtctcctggagtggaagaggcctgctccctggctctgggtctgctgggggcacagtaaatcagtcttggcacccacatccagggcagagaggtctgtggttctcagcatcagaaggcagcgcagcccctctcctcttcaggctacagggttgtcacctgctgagtcctcaggttgtttggcctctctggtccatcttgggcattaggttctccagcagagctctggccagctgcctcttctttaactgggaacacaggctctcacaagatcagaacccccactcacccccaagatcttatctagcaagcctgtagtattcagtttctgttgtaggaagagagcgaggcatccctgaattccacgcatctgctggaaacgagccgtgtcagatcgcacatccctgcgcccccatgcccctctgagtcacacaggacagaggaggcagagcttctgcccactgttatcttcactttctttgtccagtcttttgtttttaataagcagtgaccctccctactcttctttttaatgatttttgtagttgatttgtctgaactgtggctactgtgcattccttgaataatcacttgtaaaaattgtcagtgcttgaagctgtttcctttactcacattgaagggacttcgttggttttttggagtcttggttgtgactccaagagcagagtgaggaagacccccaagcatagactcgggtactgtgatgatggctgcagtccagttttatgattctgcttttatgtgtcccttgataacagtgacttaacaatatacattcctcataaataaaaaaaaaacaagaatctgaattcttagaaagttttaagtcctggtttcttgggggaggtgaaaatgggaacaaagggacctgtggccctggggtttctgataacagcaccagtggcatctgacatgaacctgtgggggacagggctgtccctcagcctttggaaaggagccatttcaaagaacctccctttgtgggtaaatttgcgtctgggtggggtggggttcatcaggcaccttttgattacgtacccagcagggcccttccccagcagagcccacgattgattgattgattgattgattgattgattgatttagagatggagtatcactctgtctctcaagctggagtgcagtggcgcgatctcggctcactgcaagctccgcctcccgggttcacgccattc

SEQ ID NO: 398 - DNA, 1199 bp, Homo sapiens
gcaagtggacatcaggggtgtccccaggggcgtgcatctcagaagtcaggggctccagagagggttccagcatccttcaccacgtggcaggagtctgccacagagaggtgttgattgcctttcctcacatttccaggaactgagtatctaccaagatcaggaacaaaggatcttaaagttcctggaagagcttggggaagggaaggccaccacagcacatgatctgtctgggaaacttgggactccgaagaaagaaatcaatcgagttttatactccctggcaaagaagggcaagctacagaaagaggcaggaacaccccctttgtggaaaatcgcggtctccactcaggcttggaaccagcacagcggagtggtaagaccagacggtcatagccaaggagccccaaactcagacccgagtttggaaccggaagacagaaactccacatctgtctcagaagatcttcttgagccttttattgcagtctcagctcaggcttggaaccagcacagcggagtggtaagaccagacagtcatagccaaggatccccaaactcagacccaggtttggaacctgaagacagcaactccacatctgccttggaagatcctcttgagtttttagacatggccgagatcaaggagaaaatctgcgactatctcttcaatgtgtctgactcctctgccctgaatttggctaaaaatattggccttaccaaggcccgagatataaatgctgtgctaattgacatggaaaggcagggggatgtctatagacaagggacaacccctcccatatggcatttgacagacaagaagcgagagaggatgcaaatcaagagaaatacgaacagtgttcctgaaaccgctccagctgcaatccctgagaccaaaagaaacgcagagttcctcacctgtaatatacccacatcaaatgcctcaaataacatggtaaccacagaaaaagtggagaatgggcaggaacctgtcataaagttagaaaacaggcaagaggccagaccagaaccagcaagactgaaaccacctgttcattacaatggcccctcaaaagcagggtatgttgactttgaaaatggccagtgggccacagatgacatcccagatgacttgaatagtatccgcgcagcaccaggtgagtttcgagccatcatggagatgccctccttctacagtcatg

SEQ ID NO: 399 - DNA, 1178 bp, Homo sapiens
tttggaaattccgagcgttttgggaactgtgcctaaaccaggataaagaccaagtacattatttcttattataaatcactatatctcaggcagcgatttgcagaggaggaaagtgaggccaagagagtcaaagtgtcttagccagggcttcccaggtagactgaatccagctctccctactccacatacagggctcttgccacatagcaaggcccctaaagagcatgctgaggtggtcaggctgacctgagcccagcagcctgccccagcctgccccacctgtcctgcctggaccctgctgtgggcttcctggtcctggccacactaatggactttctgctcccaccagctcttcgtgatcgacaatggcgcggatgactggcggatagccatgacctacgagcgcatcctgtacatcagcctggagatgctggtgtgcgccatccaccccattcctggcgagtacaagttcttctggacggcacgcctggccttctcctacacaccctcccgggcggaggccgatgtggacatcatcctgtctatccccatgttcctgcgcctgtacctgatcgcccgagtcatgctgctgcacagcaagctcttcaccgatgcctcgtcccgcagcatcggggccctcaacaagatcaacttcaacacccgctttgtcatgaagacgctcatgaccatctgccctggcactgtgctgctcgtgttcagcatctctctgtggatcattgctgcctggaccgtccgtgtctgtgaaaggtattccacatggggctttctgagtacagagcctgtgctgggacagggaagggaggaggagtaggggtgccaggaagtatgtggtctgatggaggagacaggcatgtacccagacacctgaaaggagacaatgggaaagaggggagtgctgagttggggttcagtatgagctagaattgcagcattggaaccaaagtaaggtgggaaaaaggcacagaattttcctgattttctgttccttctttgcaaaccaatatatcaaagcattctggttacatcagtaactcacatataacacattgcaacttactcctcttgggtattaataatgcttattagcattttaaaggctctgagaagtcctgaagtaatgaaaccatttatttttgtttggttcagcctttcttaat

SEQ ID NO: 400 - DNA, 1199 bp, Homo sapiens
gccagtccctcacccagctttcccaccctggatgccaaagttgaggagctggaaaggacagatttctccccagccaaaatcacaaggaagggattcctggccctatgtctctttgctcttctcccctgcctgaagcattgcagtctaggagaaacccttcccatgagcctcagagttcacaagcaacaattgttctgagcttctcaccttcctgagctccagaccctcacctccaaccgcccctgggactcctcattctagaagttccactggtttctcaaatgcaacatgtctgcagcagatactattcactgcttacccaaaagccatgtaatccctgcttctaggctgatagaactccagtgtctttgggaagcagaacagattcaggggtggataggtccctgccccagccccagtcagagcactcccttctcctttgtagatatgggtgtagcaacggacatgtggacacacgaactggttctgttccttgtctgggaagttgctagaaaagattttcttcccagataaaaagagagccttgggctggtcccagataaaaagagagccttgggctggtcagaaggtagtgagttatctcaattgttcacagtcagttacagattgaactccctgctctactcttttctcccttctcacagctgcatttgactaggctttaaaaagggagaggggttccgggcgccgtggctcacgcctgtaatcccagtactttgggaggccaaggtgggcggatcacgagatcaggagttcgagaccagcctgaccaacacagtgaaacccagtctctattaaaaacacaaaaaaattacctgggcttggtagcgtgcgcctgtaatcccagctactcaggaggctgaggcgggagaattgcttgaacccaggagttggaggttgcagtgagccgagatcacgccactgcactccagcctcggcaacagggcaagactccgactcaaaaaaaaaaaagagagagggagagcaccatgggaggataggaccgctttgctcccactccttcttcttggggctcctgtagcttgaatggagctctctggctgaagcagccatcttgtgaccatggtcctgaggacagcagggcgtggggaagcactggaacttcggtgacactgttgagttcctgtctcacttccagactgcttgttatgggggga

SEQ ID NO: 401 - DNA, 1244 bp, Homo sapiens
ctgcacctgcccactccctgggggacctaaagggcagctggccaggtcggggcctggtcactcgtttcctccagatatccaggaaagccccagaccccagtgggactggagctcatggacataagcaggtaggaattcggggagccaggaaagatgtttgggaaagcgtggagcttcagattgagccttattgatgatgccctttcttgtgtccctgtccaggtgccccggagcctgtggggccggcctggccgagagagcctccaccttcgcagctgcggagatctgagctctagctcttccctgcggcgtctcctgtctggccgcaggctggagcgtggtacccgcccccacagcctcagcctcaacgggggcagccgggagactgggctctgacctaggcttcttgtcacactgaacacatccagccacaggcaccagctggttgggaccagcagcccccagcatcctcttgcactggctggcacaaaaagaaacctgctgtataccccccaaagtgtccctttccctcctacctctggggtctcttgctgcttgcctctgctgctctggactgggagagcttctgtcctgtgctgcatgggtatttagactgtgggggagatgccccttcttatagcactggaggaggaaaacaaattcttgtccccctcagaatgagagtggctctttctgatttgcaagggcactatggtcagggcaaaggcatggcccaggtgtttaagtacagggtgacgtgtgcctatgcaatggggtggtaaggcaggcacgaagagtccaaaaaatctaggtggcctctcagctctgccacctctagctgcatgaccttgggcaagctatgtaaccccaattgcctgctccattaaagactgtgaaggtagaatgtttgtaaagctcttaacagtatgtaagccttcaataaatttcagttttccccttgttttcttgatcattctctgtcaccagtgaaatttgttctagtgtctctcatatttaagaaaactctttcaggactgggtatggtggctcacacctataatcctagcactttgggaggccgaagcaagaggatcgcctgagcctaggaattcaagaccagcctgggcaacatagtgagaccctgtctctacaaaaaacaaaaaattagccaggcatggtgggacacgcctgtagtcccaactactcaggtggctaaggtgagaggatcacttgagcttgggaag

SEQ ID NO: 402 - DNA, 1189 bp, Homo sapiens
gggactctgtccgtggcagaggagtactcatgagggtcccagccctgagtctgcaccctgttttccccagatctccttcttctccttgctttcggtgctctgtgtcatgcttagcatggctggctctgttctctcctgtaagaatgctcaactggcccgagacttccaacagtgctctctggtgagatttgaggagggagagctggaaagaactggctgggggaggtgtgcaggacacctcagtttgtcctgactcaggctgcctcaccctccctgctccactcaggaaggaaaggtctgtgtgtgctgtccctctgttcccctcctccggccctgtccagagtcggggcaggaactgaaagttgcccctaactccacctgtgatgaagcccgaggggccctcaaggtgagcttgcaccctgcaaacatcctcctggttctcactcttgcctcccctgctggggtactcacaggcccataatgtgtggaacttagccgtctcctgactcctctcctcctttcccttccccagaacctgctcttcagcgtctgtgggctcaccatttgtgccgctataatctgtacactctctgctattgtctgctgcatccaaatcttctccctggacctcgtgcatacggtgagaagggagcaggggccagggcacgcaggtatggtgggggcaggggtgtgtgtgctgagacttgcctgagggaacaatggctacagatctggcttttgagcaccaggggctatgggttatctattatcctcatctattggaggaatggatgtttagtggggaggatgagaaggggagatggcagggagtgagttaagtatgtgatgctggtctgggaccaggagagggtgctttagagaatgggactggatggtggggtagagtcaagaaggtcctatgctgggcacggtggctcattcctgtaatcccagcactttgagaggcccaggcaggcggatcacctgaggccaggagttcaagacccacctggccaacatggcgaaaccctgtctctattaaaaatacaaaaatcgggccgggcgcagtggctcgtgcctataatcccagcactttgggaggctgaggagggcagatcacctgagatcaggagatcgagactatcctggctaacatggtgaaaccccatctctactaaacatacaaaaa

SEQ ID NO: 403 - DNA, 1181 bp, Homo sapiens
cttctctggtcccttggtcctctcagtgactcaacaagtgtctgagaacagttttctagcattactctttgtcctcactaaggcaggaccttgtcacagggtatggtagggaatgtgatctgaacagatacacctcattggtatttgttatccaacagcagttatgatgatcgttcgtccgaccggagggtgtatgaccggcgatactgtggcagctacagacgcaacgattatagccgggatcggggagatgcctactatgacacagactatcggcattcctatgaatatcagcgggagaacagcagttaccgcagccagcgcagcagccggaggaagcacagacggcggaggaggcgcagccggacatttagccgctcatcttcggtgagtgccagcccaggcccttcctctccccactcttctgcaggccctctaggactctggtaagtgagcagtatccttgttctcagctgaacattggggcatgaacactgaggtgggcactgagtttgcctactttcttggaagctctccgactcttgaagggccctggatctgctttggagatggatgggcacggagcatttgtgacccccagtgctctccctggcatgttgggcttattgtgttgggagcagcttctccgccccagcggcctccactctttaatggggaccttgcttgtgaactgcctttttcccccaagccctgggctctgtagcccccttggcaggcgggcttgggtgggggcaaggggagatctgtgtctgcccggaagggcattgtgtagagcatggggttgtgggtgacattggcaacaacaccacttctctgctctgcccatgcctctccctgttcctgttttgggtttggggacttgggattatgcgccgctctctcttctcacaccgatccaccttactgcatctgacgtgttcccttccactgtcccccatcatcgtctgtcccccctggctgggcgcctgtgaccggtgacccctctaccacccaccccgcctccctccggcccccgctccgacacctggcttgctccgaccccccctgccccccgacagcagcacagcagccggagagccaagagtgtagaggacgacgctgagggccacctcatctaccacgtcggggactggctacaagagcgatgtacaagccaaatc

SEQ ID NO: 404 - DNA, 2148 bp, Homo sapiens
tactagggtagaccatgcagaaagaatgtgcctgggtactgggacctcttctagctttgctccagaaatttggggaaggagtaaagacagtagcaattccagaggctccttgaagaggagttggggttggggaggataaagttaggtggtggttggaaatgggagagagcaaggagaaaactcacagtagctgctgtatggaccctgataccctgtacctctttccttgccctccaggtcctggagtacaatgccattggaggcaagtataaccggggtttgacggtggtagtagcattccgggagctggtggagccaaggaaacaggatgctgatagtctccagcgggcctggactgtgggctggtgtgtggaactggtgagaggggtagggcaagggagaagaagtttcctgcaatggtggtgacttgggtgggaaggggagggatgggcctgaaacttatttctgggttgtgtttgtgtttctttgtctctagtgtgctacggccaaatttagagtgaatcactccaagggttaactaatgtggggagcctcttttggcattaggtatgaagatggctgtagatagttgtagacagtgtggactggggcctcgagactgggcagagaggtgtcagctctttcctctgagcagaggatggctataaaagtgacagaggaggccgggcatggtggctgacacctgcaatcccagcactttgggaggccaagggggaggatcatctgagttctggagttcgagaccagcctgaccaacatggagaaaccccatctctactcaaaatacaaagttagctggatgtggtggcacatgcctgtaatcccagctactcgggaggctgaggcaggagaatcgcttgaacctgggaggcagaggttgcgatgagctgagattgcaccattgcactccagcctgggcaacaacagcgaaactccatctcaaaaaaaaaaaaaaaaaaaaaggtgacagaggtcttccaaaggctattcagaagcagaaattgaaaactggcagctcactgacagtattttgaaaatgttttacaattaagtctcctaaatttaacaaagagatttcacactaaaacctagatttctagcatggcttgggaaattgtaagatttgggtccatgttcccgcatagcaacaattggctgaagctgagtggatgcaacttctgcaagacggcatgtgttctcctgtgtgctttctctagtttgctccaatccccacatccccttgtcttctataccagttcgtcttggtcttgaaggtgtctagtttgctggcatggcctaaagctttcattagtggcagggggactgggttctgggaggggtgccatgcccgaggagggtggcagtgagcccaaaagggaagagcattcagaacttggtgagtgacgatgatgctgagtgcctggcctgagaggagcagctggctcaagggaagacgtgctgagcacagtcagcccgggtacgttcttggtatgggtggagcaggtggatctgcctgtcctgtgggcggtggaaattccagtctggaacttgtcggggagatgggtctggagaatagagatttgcttccaaggaggtaataggcccatggcatccagggagagggccctggatgacagggatgctgaggggctgaggggttcaaaatatggagatgacaggcaaggaaggaagggaaggaggatgagggcagagcagaggagtaaagctatgggggccaagggaagcaagaccttgaggggccagtggttaactggtagaatcagttcattttttttttgagatggagtctctctctgttgcccaggctggagtgcagtggcaccatcttggctcactgcaacctctgcctcccaggttcaagcaattctcctgcctcagtctcctaagtagctgggattataggcacatgccaccatccctggctaatttttgtatttttagtagagacggggtttcaccatattggtcaggctggtctggaactcctgaccttgtgatccatctgcctcgccctcctaaagcgctgggattacaggcgttacaggtgtgagccactgcacctggcctagaatcagttcttaaccctagcagcaccctagtttcacc

SEQ ID NO: 405 - DNA, 1198 bp, Homo sapiens
tttataacgtgtgttttctctttagctgctgcttttttgtttaattaattaatttatttatttatttgccctcccaggctggagtgcagtggtgcgatctcagctcactgcaagctctcgggttcacaccattctcctgcctcagcctcccgagtagctgggactacaggcacccaccaccacgcctggctaatttcttttttatttttagtagagtcggggtttcgccgtgttagccaggatggtcacaatctcctgacctcgtgatccacccacctcggcctcccaaagtgctgggattacaggcgtgagccactgcgcccagcctctttagcttcttttgttttcttcatcagtagtttttaacaagtttattacgatatactggaccttgttttatttatcctgcctatggtttgcttactttcttctaactctgaggttatgctttttatcattttgggaaactttttagccataattctcaatttttttcattgtgaattttttattttgtgaatgttacatcattgtatatctggtttttgttgttttcctttacaagtgtccaattgttttagtagtaagttttctcctttcccgggattctaagattctgttagtattatattctttacataatttattcttttctttaatctctatcagtttgtgttgtttctattgctgtcttcaagttcactgatctccagtgccttatttgctgttaagtactctccagtttttcatttcagatttcgtatttatcaattctcaatattccttttgttgttgttgttaagtcttctcttcctctcctcattatctttgtattttcttctaaattcctgatttatgcttgtagagtagtattttaaagttattttcttttctatctttgtgatttctatttctgttgctgtttctactgaatgattttttcccctgggtcacattttcctgcattttggcatatgtaggaatttattattggatgcaagacattgtgatgtcgcattattgtatgtctggtttttgttggtttcctttacaaatattcaattttattttggtaggcagttaagttacttatggatcagtttggattctcatattgtttttaaacttagctaaggctagtcttttttttttttttgagacggagttttgctcttgtcacccaggctggagtgcaatg

SEQ ID NO: 406 - DNA, 1203 bp, Homo sapiens
gttttgtttttgagacagagtcttgctctgtcgccaggctggagtgcggtggcacgatcttggctcactgcaacctctgcctcccgggttccagcaattccccgacgtcagcctcccgagtagctgggactaccaccgcacccggctaattttttgcattttagtagagacggggtttcaccatgttggccaggatggtcacaatctcctgaactcgtgatctgcctgcctcggcctcccaacgtgctgggattacaggtgtgagccaccatgcctggccgaaaatgcagtttttatgtggatgcaggattgccttaaaaaagcatacatgtccaggcgtggtggctcacgcctgtaatcccaacactttgggaggccgaggtgggtagatcacctgaggtcaggagattgtgatcagcctggccagcatgacgaaacactgtctctactaaaaatgcaaaaattagctgggcatggtggtaggtacctgtaatcccagctactcggaaggctaaggcagggagagttgcttgagcctgggaggcagagcttacagagagccgagatcgcaccactgcactccagcctgggcaacaaagcgagactccgtctgaaaaaaaaaaaaaagaaaggccagctcaatggctcacgcctgtaatcccagcactttgggaggccgaggcaggcgatcatttgaagtcagtagttcaagaccagcctggtcaacatggtgaaacctgtctctattaaaaacacaaaaaaatagccaggcgtggtagcgggtgcctgtagtctcagctcttcaggaagctgaggcaggagaaatcgcttgaacccaggaggtggaggctgcagtgagccgagatcacgccactgcactccagcctcagcggcagagtaaaactcagtctcaaaaaaaaaaaaacagaaagaaaaagaaaaaatcaaggtaaaaggagaagcttctgccaaccaagaggcagtagacaagttcccagatgctattaagaaaatcattagcagccggacgcagtggctcatgcctgtaatcccaggcatgcctcccactttgggaggcagaggcatgtaaatcatctgaggtcaggagttcaagagcagcctggcaaacatggtgaaaccccgcttctactaaaaatacaaaaattagcagaccctggtggcccggaggttgcagtgaggcga

SEQ ID NO: 407 - DNA, 1177 bp, Homo sapiens
gtgagccttggcggtggctgtaacatgatccagcctgtcaatgcggctgtggcccagagtccccagactattcccatcgccaccctcttggttaaccctacttccttcccctgtccattgaaccagccccttgtggcctcctctgtctcacccttaattgtttctggcaattctgtgaatcttcctataccatccacccctgaagataaggcccacatgaatgtggacattgcttgtgctgtggctgatggggaaaatgcctttcagggcctagaacccaaattagagccccaggaactatctcctctctctgctactgttttccccaaagtggaacatagcccagggcctccaccagtcgataaacagtgccaagaaggattgtcagagaacagtgcctatcgctggaccgttgtgaaaacagaggagggaaggcaagctctggagccgctccctcagggcatccaggagtctctaaacaactcttcccctggggatttagaggaagttgtcaagatggaacctgaagatgctacagaggaaatcagtggatttctttgagctaggagaataagagtctggagactgggagccttcacttcggcctccgattggtggcgcatagggtgtaaccaataggaaacccctaaagggtacttaaaccccagattttgcaactggggctcttgagcagcttgctttagcctgctcccactctgtggaatatacttttgcttcaataaatctgtgcttttattgcttcattgtttcattgatttgtgcaatttgttcagttcttcattcaacattccaagaacctggacaaattgtagtcaagaccctccgacagtaacatattttggcaagccagcctggaggtaagtccaaattgcggtgcaggggaagggggcggttatttttcttttcttctttcctttttctttccctgtcaagccttcatttttcggcatgggctggagctatatctctgtgcagggctccactccatacaggggaaccttttcctctctctctttcccttttccaacttgagactcagcagatagcatgtgaacatggaggcaactgcaggtctctggccagggccactctccagtgagactgaagggtatccacgtggaagcacctgatcaccatcacccagtttgggtgacag

SEQ ID NO: 408 - DNA, 1120 bp, Homo sapiens
gagccaaggggaaagggatgattgctcctgctgtcaccacttaaagagaaggaagagaacacgttataggacattttctcagcactgacccaacccctcacaaagcttcatacctttttcccacagaagctcagcatgtcagccagatgaaccatggaaactggagaggaacacaggcgataaggaacagtgactgtgtccagggctgtagccaggatggcactgcagtggaagggcagaatggcctgtaagaagacaccaagaggggcacttggcctcgggcctggaaaagaatgtgtggaggcagaatgttaacaccagagagacccaggggatgaatcaggggtatgtttgaccccaggctggacaagcataggacagtgtgatctgagaggccacatcacagctgagttcaagctcgggcctcaggaacagagccagtacagacagcgactgactgggagcatgaggaggccctgtagcctgccgcagtcagaacaagagcaccgagacttacatcataatgcaggtaagggaagttgacaggtggctcaggtcgcaggcccaggctcccacccaaggacaaggggcagacgagagctgtgagcagtcaggtgcacgagaccaaaagctgtgtttaatagacgatagatgtttctctgggcctcctcgtaaagaaaaaaaccagtttgcattaagccactctcccaatgggattcgaatgtttactcctccaagttccactcaccccacgatggtagggaccaggtagcaggccccaagttattattccccgccctgaatattcatcttgtagcagctctgccgccttcgcgcctaccccagagaagccatcgtgcaggtcacacaggatctggaagccctgggcgggggtgagtgacgaaagatagttagcaggatgagaagagcttccaccctggagtgcacattgccacgccactacctgcaagtagtcacattcctccacgtagaaatgcagcctgtcctccagctcttcctggtacttgggttcctttaggacactttccccttggccaaaagcctccagccgacctgcttccctgccacaagtaaacacgatccaagacttacatctctt

SEQ ID NO: 409 - DNA, 1341 bp, Homo sapiens
gactttgctctcttctgcccctgtgcccaaggtaatgctgccctcccttgccccttctaagtttcgaaagccatatgtgagacggagaccctcaaagagaagaggagtcaaggcctctccctgtatgaaacctgcccctgttatccaccaccctgcatctgttatcttcactgttcctgctaccactgtgaagattgtgagccttggcggtggctgtaacatgatccagcctgtcaatgcggctgtggcccagagtccccagactattcccatcactaccctcttggttaaccctacttccttcccctgtccattgaaccagtcccttgtggcctcctctgtctcacccttaattgtttctggcaattctgtgaatcttcctataccatccacccctgaagataaggcccacgtgaatgtggacattgcttgtgctgtggctgatggggaaaatgcctttcagggcctagaacccaaattagagccccaggaactatctcctctctctgctactgttttcccgaaagtggaacatagcccagggcctccactagcagatgcagagtgccaagaaggattgtcagagaatagtgcctgtcgctggaccgttgtgaaaacagaggaggggaggcaagctctggagccgctccctcagggcatccaggagtctctaaacaaccctacccctggggatttagaggaaattgtcaagatggaacctgaagaagctagagaggaaatcagtggatcccctgagcgtgatatttgtgatgacatcaaagtggaacatgctgtggaattggacactggtgccccaagcgaggagttgagcagtgctggagaagtaacgaaacagacagtcttacagaaggaagaggagaggagtcagccaactaaaaccccttcatcttctcaagagccccctgatgaaggaacctcagggacagatgtgaacaaaggatcatcaaagaatgctttgtcctcaatggatcctgaagtgaggcttagtagccccccagggaagccagaagattcatccagtgttgatggtcagtcagtggggactccagttgggccagaaactggaggagagaagaatgggccagaagaagaggaagaagaggactttgatgacctcacccaagatgaggaagatgaaatgtcatcagcttctgaggaatctgtgctttctgtcccagaactccaggtgagagctggagaatattctcaagtatttcgtggactcagtaatatgtatcacttattgatatgccacctgcttgcttgctgcactatggatagtcctaaaatcatttgtatttgatttgtgaatgcattatg

SEQ ID NO: 410 - DNA, 1266 bp, Homo sapiens
tgcactccagcctcagtgacagagtgagactgtctcaaaaaaaattttaaaaagcaacattatgtaagagatatataaacttttcaaatgtaaggattataaatgctggtatgtttcttttataacttaagaaatgtatacttaaaaaaattttttttttgagacagagtctcgctctgttgcccaggctggagtgcagtggcgcatctcagctcactgcaagctccgcctcccaggttcacgccattctcctgcctcagcctcccaagtagctgggactacaggcacccaccaccacgcctggctaatttttttgtatttttagtagagacggggtttcactgttagccaggatgatctcgatctcctgacctcatgatccaactgcctctgcctccccaagtcctgggattacaggtgtgagccaccgcacctggccacaatttcttaaatcatgaaagtagaattttaggaaaagagtagatgtctggataataatctggatggattatatatactggtcttggaggcaggggagagacttaatgagagcatggtaatggatttatggtgggtccttctctgtgggcctctcatagtgtacccatgccatagcaaatggcagcctcgaaccattgcccagtccccttacctgtgggctgtgagcactgaagggggttgcacagtgtgtaacaaaaaagctatgaactaaattttatttgtggtctctagtcaaatttattttattttatttatttattttatttttgtttattattattttttgagacagaatctcattctgtcacccaggctagagtgcagtggcaccatcttggctcactgcaagctccgcctcccaggttcacgcgattctcctgcctcagcctcccgagtagctgggactacaagcgcctgccaccatgcctggctaattgttttgtatttttagtggagatggggtttcaccttgttagccaggatggtcttgatctcctaacctcgtgatccgcccacctcagactcccaaagtactgggattacaggcgtgagccaccgcgcccggcctaatgtttgtatttttaatagagatggggtttcaccattttggccaggctggtcacaaactcctgacctcaggtgatccgcagcctcggacttccaaaatgctaggattatggtgcaaggattacaggcataagccaccgtgcccagccaaaattattttaatttttatatttagacagctctgtaggtctctacttt

SEQ ID NO: 411 - DNA, 1232 bp, Homo sapiens
tataaaaatgatatgtgctggccaggcacagtggctcattcctgtaatcccagcactttgggaggccaaggtgggtggatcatttgaggtcaggaatttggaccagcctgaccaacgtggtgaaaccccgtcacgaacattacccgggcatggtggcaggcacctgtaaccccagctacttgggaggctgaggcaggagaattgcttgaagccgggaggtggaggttgcagggagctgagaccatgccactgcactccagcctgggccacagagcaagactccatctcaaaaaaaaaaaaaaaaaaaaaagtgccaagtaatacatacaaagaaaaaaaaatcgtgaaattccaaattccaatcccgaaagttacctgccataggtattctgtttgtgtgttatccagctctccacggtataatgaacacctgatcacacatttcttcatattgatatattctagaaaggagattgatagagcagaaggtatacatgttgtacattttgaagttagtggttttaatttgtatttgtaaacttgatgacaactggaggactaagaaggctgagtctgatgaagtaagactttgctgatacattcctcctagaaaaaagggttggagagagcagccttcactgaagagtatcacagggctgactgtactacccaacactctaccccagttttacaggagactgtctttgctataatttcttattgacttatttcaaagattgaggatttaattatatattctgtttaatctgaagtattctgttcttcctacagatgcattatgttcaagataaattatttgtgggtctagaacatgctgtacccacttttaatgtcaaggagaaggtggaaggtccaggctgctcctatttgcagcacattcagattgaaacaggtgccaaagtcttcctgcggggcaaaggttcaggctgcattgagccagcatctggccgagaagcttttgaacctatgtatatttacatcaggtatggatggatagggcaggggacatgtgaattcttgtcaacttgttggtacagtcaggagtgattcagaaggagcaagagaaaactgggtgtaattaatagtaatgagggatttagataaatgctaggagtaattactttataattagttaaagaaattgtagaattggggcacggtggctcatgcctgtaatcccaacacttctggaggccaaggcgtaggaccac

SEQ ID NO: 412 - DNA, 1232 bp, Homo sapiens; identical to SEQ ID NO: 411

SEQ ID NO: 413 - DNA, 1358 bp, Homo sapiens
ctctactaaagatacaaaaattagccaggtgtggtggcatgcgcctgtaatcccagctactggggaggctgaggcaggaaaatcatttgaaccctggaggcggaggttgcagtgagctgagaatgtgccactgcataccagcctaggtgacagggcgagactccgtctcaaaaaaaaaaactaagactttgtatcaaaaataaataaatttgggctagactgctccctttctcattggactcatattttccctggcttctcctgtgccctaatccagacttctaagcaaggtctttgttttcctttacagctggactgggcagcctttggggtcatgacccttccctccatcggcatccccctgctattgtggtactccagcaagaggaaatatgacactcccaaaacgaagaagaactgattggggcttccacagccctcctctcccaagaaatccaggctcctctcccaagaaatccaggtgctttccagactccaaagggtatcttaaatgcaatctcttctctcttagcccttggccactttctcctggatcctgccctgctctcagccatagtgaaggaccagccctaggagtctgcgagagcctccttggttccatcgtgaagccataaacaggaatgcctttggcaatagccttgagcctagagggccctctgatgccccactgaggtgctgttggtttattgctggcaacgtgaattctctcaggggtctaggaggggcattttggagactgcctgacaccacccctatcccctgcctccccctctcagaagagggtggaagatgaaatgaaagctatgggactcttggaggatacccagtgtctattctgggttagagaagtgcttactaaggggttttctaataaaaacaaatgccacattgacttgtctgttttcttagcccccgggtgaacacaggtgattattggaactcagtctttgcccagacccctgggcaagcgagctgggttctggccttgctgcaggggttgtgggcgggtcctgttcccatggagatatctgcccttttgaatcttttgcttccatcccttattttcctctgattgttgttctcatcagtcaccacctattgccgtacaccttccttgccaggcagctcctcttcacagctggagaatgtaggatggggaaagatggtctgcagaggaacagctattgtcatccccttagatctcatctgatttattgactcagtatttgttttttttgtgggttttttttttttttttgagatggaatctcgctctgtcacctagtggtgaacaccggtgcctggcacctgagtgttcttgaaaagctatctctcat

SEQ ID NO: 414 - DNA, 1317 bp, Homo sapiens
tacctccttgccccacaccacttttgcaatctttaaactttcagtggctgtgcagagtcgagggaggaaccagctctctggtttactggaacatagtcttccatctataccactagggttttgtcttatgtttacttttggtaactctcttccttctttttctccctaccccccaacccctagcccaaccaatgctagaatttcttgctctgaaggaggagcaggtgaaacaggtggtaattttccttctcggcccctattctggttcattcagcactttttggtgggaactgttggaaattccagggtaaggaggaagatgcctgttctccctgtctgaagagggagatgagacagctctctggacaggaattaacaaacgctggagcagcccagaggaaattcgtgtgaaagaggagggaatgagattattcggaggaagggaatgggggagacagcctgagtaaaaggcttggaagttggaattaacagtggggagcagaagcactcatagctcttttaggcagaagaatccaggcccgagctggcagaagagacttagagatgctaatggaatttaaactgaaaaaaggagcccaatgaagctaagcgccacgccccacaaggggtcatattggctttagttcctcaagcatatgtgcttatatgcacacacacacacatttccatggacccaggtcttgcttgtgtccccaggcaccagtagtttgagcccccctcaaaagacatgaagggggttggggtctgtgtgagtagtggggaggtgcatgtgtatccacatgtgtgcatacactcttaagttgggtgggaagtggattccttgttggtttctggttcagagtgctctcccaccaccagagacaagtgggtaaaaaggtcagtccattgcaggaatatatatccgggagagctaggtcccttggggctctggatgctgggtaacccagaggtaatgtgggtaccctttctgaagctgtcagggctgtgactagcacccttatcacccctcactgccttgtgggaatagtagagggtttttttcctccagagcccctggcctttcagttcttaactatttccctccaggccagaaagttttctttgaggaaggagaggagagggtggcaatgatgcctttgatctggaattggacatttctctgtcagagcacagaggaggctcatatcacctcttccctctcctacttggcccagctgcttggaggaccgaccccatggctgagaatatgacggcaagaggaacagagtttgctccaagtgggaaagggtcccaagc

SEQ ID NO: 415 - DNA, 1241 bp, Homo sapiens
gcgacgggaggacgtggccacagcccggcgggaaatcatctcagcagcggagcacttctccatgatccgtgcctcccgcaacaagtcaggcgccgcctttggtgtggctcctgctctgcccggccaggtgaccatccgtgtgcgggtgccctaccgcgtggtggggctggtggtgggccccaaaggggcaaccatcaagcgcatccagcagcaaaccaacacatacattatcacaccaagccgtgaccgcgaccccgtgttcgagatcacgggtgccccaggcaacgtggagcgtgcgcgcgaggagatcgagacgcacatcgcggtgcgcactggcaagatcctcgagtacaacaatgaaaacgacttcctggcggggagccccgacgcagcaatcgatagccgctactccgacgcctggcgggtgcaccagcccggctgcaagcccctctccaccttccggcagaacagcctgggctgcatcggcgagtgcggagtggactctggctttgaggccccacgcctgggtgagcagggcggggactttggctacggcgggtacctctttccgggctatggcgtgggcaagcaggatgtgtactacggcgtggccgagactagccccccgctgtgggcgggccaggagaacgccacgcccacctccgtgctcttctcctctgcctcctcctcctcctcctcttccgccaaggcccgcgctgggcccccgggcgcacaccgctcccctgccacttccgcgggacccgagctggccggactcccgaggcgccccccgggagagccgctccagggcttctctaaacttggtgggggcggcctgcggagccccggcggcgggcgggattgcatggtctgctttgagagcgaagtgactgccgcccttgtgccctgcggacacaacctgttctgcatggagtgtgcagtacgcatctgcgagaggacggacccagagtgtcccgtctgccacatcacagccacgcaagccatccgaatattctcctaagccccgtgccccatgcctccggggcccactccactgggcccaccctggacctgttttccactaaagccttttggaaagcggtgatttgaggggcaaggtgcttagagatactcgctcgctggggaaggggggagggaggcagtggtggctggagggtgcgccactttcagagcctctggtcaccctgtcctggaaagattgggagggggccagactgaaa

SEQ ID NO: 416 - DNA, 1186 bp, Homo sapiens
ggacggttctccagatccttcctcccccaggactctgcctttagacaaagaaatatcctcgcactggaagagggaaaggggaggggatcggtctcccaatccagggaggctgtcctgagggggtgtccactcctaaccagaaaaactgacggaatgtgcaaagagttactcagaagcctgtactctggtatctgctcctaggctggggagggggcatccctggggcccccagccgcctggagttacagactttgggggagacctggccctcgaagccagactgagtatctgtctctttgttgggctgagtgtaggaatggaagggggtgtggcccaggggagggtcccagcctggggaagaggcggtgaggggggctgctgagaggagggggtcctgtggtcacccacaccccaaagttggattgtctctggggttttggaaggggtgtctccaaggaagtgctacgtcctggcttggacctctcctcttccctctctggcttttgttctgggctggccacggccttgggccagaggcctagagaggggtctctggtagtgaaagagtaggacagggtaggagggggaatgctggggggtaagaaaccttcacctggaaatttggtggagggcgtgtgtctgggtgtgttgggagggggtgcagaattaatccagcgtagtatgtctggtaccacaccctctgctgctccagcatccctgggtgggtgagtgggggtgttggtgaaggtccaaattgagcagacgggatcttggggacccttccctctcctggcttctcaaaggagagtgtggggggcaggatttggaaattgcaaagaggctgggctggggaggtgtggggtgggggaggagctgtcccacagtggggaacaatagaggagctgcattccggctgggagtgcgggaggaggccagcttctggcagaggaaaaggggaggcgggccaggggggcccctactccacatcccaccttatccactgggagtgctgggggttagggggatttcacggagagatccagaatggaggaggggaagatgccactcccctgcacagccctcatccccctggggcactccatctcttgagatttctgatttagaaagttggatttcctcttgtcagaaactggggatccaaagccctggaattgggtggggacgg

SEQ ID NO: 417 - DNA, 1231 bp, Homo sapiens
cagctctgaatgggctgcccacgtgtggaggggggttggggtgactcactattactactgggaggacagggggagccagtggtggaagaagggtgagtcacactgatgggcaccagcctcagccctccccccactttcctggctcccagccctgcctacctgaccctctcccttgctttgcgcccacttccctctctttctccccgacccttttgcccacccactctccctccttggctctgccctctagcccagaaggtctgaggcaatgggggcaagcttggagccgacagtgctgagcaggcaggagccaagagaggggaagcttgagcctcacgcagttaggggtgcgctggagagggtggggcccgactccgccacaccccaacggtccttccccctcctcaccactcccgcccccacccccaatggatctgggactgcccctttaagagtagtggcccctcctcccttcagaggaggacctattagagcctttgccccggcgtcggtgactcagtgttcgcgggagcgccgcacctacaccagccaacccagatcccgaggtccgacagcgcccggcccagatccccacgcctgccaggagcaagccgagagccagccggccggcgcactccgactccgagcagtctctgtccttcgacccgagccccgcgccctttccgggacccctgccccgcgggcagcgctgccaacctgccggccatggagaccccgtcccagcggcgcgccacccgcagcggggcgcaggccagctccactccgctgtcgcccacccgcatcacccggctgcaggagaaggaggacctgcaggagctcaatgatcgcttggcggtctacatcgaccgtgtgcgctcgctggaaacggagaacgcagggctgcgccttcgcatcaccgagtctgaagaggtggtcagccgcgaggtgtccggcatcaaggccgcctacgaggccgagctcggggatgcccgcaagacccttgactcagtagccaaggagcgcgcccgcctgcagctggagctgagcaaagtgcgtgaggagtttaaggagctgaaagcgcggtgagttcgcccaggtggctgcgtgcctggcggggagtggagagggcggcgggccggcgcccctggccggccgcaggaagggagtgagagggcctggaggccgataactttgccatagtctcctccctccccggaactgcccccagcgg

SEQ ID NO: 418 - DNA, 1819 bp, Homo sapiens
aaccctccctcacagcctgtagccaccaatgtttcaagaggagcccccaccctgttcctgctgctgtctgggtgctactggggaaactggccatggcctgcaaactgggaacccctttcccaccccaacctgctctcctcttctactcacttttcccactccaagcccagcccatggagattgacctggatggggcaggccacctggctctcacctctaggtccccatactcctatgatctgagtcagagccatgtcttctccctggaatgagttgaggccactgtgttccttccgcttggagctattttccaggcttctgctggggcctgggacaactgctcccacctcctgacacccttctcccactctcctaggcattctggacctctgggttgggatcaggggtaggaatggaaaggatggagcatcaacagcagggtgggcttgtggggcctgggaggggcaatcctcaaatgcggggtgggggcagcacaggagggcggcctccttctgagctcctgtcccctgctacacctattatcccagctgcctagattcagggaaagtgggacagcttgtaggggaggggctcctttccataaatccttgatgattgacaacacccatttttccttttgccgaccccaagagttttgggagttgtagttaatcatcaagagaatttggggcttccaagttgttcgggccaaggacctgagacctgaagggttgactttacccatttgggtgggagtgttgagcatctgtccccctttagatctctgaagccacaaataggatgcttgggaagactcctagctgtcctttttcctctccacacagtgctcaaggccagcttatagtcatatatatcacccagacataaaggaaaagacacattttttaggaaatgtttttaataaaagaaaattacaaaaaaaaattttaaagacccctaaccctttgtgtgctctccattctgctccttccccatcgttgcccccatttctgaggtgcactgggaggctccccttctatttggggcttgatgactttctttttgtagctggggctttgatgttccttccagtgtcatttctcatccacataccctgacctggccccctcagtgttgtcaccagatctgatttgtaacccactgagaggacagagagaaataagtgccctctcccaccctcttcctactggtctctctatgcctctctacagtctcgtctcttttaccctggcccctctcccttgggctctgatgaaaaattgctgactgtagctttggaagtttagctctgagaaccgtagatgatttcagttctaggaaaataaaacccgttgattactatattggattctgactgattctttgggggtgtattggttaactgaagacagaaagtggggtaatggaatgcaaatgatttccaggtcatctcagatttaggtagagggtgtcaacctcctccatttttaggcatttggaaatccaaacttcttgtgggcagagtcgtagaataaaccacaccattcattctactcctgcccagccactgtttaacgcacctgggaaagttttttttaaaaaagggtttgcacaagaagtggggtgtgggaggatgcgagtatcggccacagcccaagatggccatgaagtgggagtttggaggctggttgtataaacaatttgaccccaaagtgcaagtcaaataataggataaccctttctccttgctaatgctaggggtacctgccacccttagctggtgatggggtggtagggggagggggttggtagggtgaaa

SEQ ID NO: 419 - DNA, 1199 bp, Homo sapiens
atccatgaaggattggttccaggacctcccacagatactaaaatctgcagatgcacaagtccttgatatcaaatggagtggcatttgcatataacctatgcacattctcctgtatacttcgttatctctagattacttataataccatatacaatctaaatgctatgtaaatagttgttttactgtattgtttaggcaataacgacaggggaaaatgtctatacaagtttagtactggcacagcttttaaaaatattttcaatctgcaattgattgaatctatggaggtggaacccatgtatatgcaggattgactgtatacactataagtgtggaatgtaaaatgaatcctacccagtttataaacatgtacctcttaatagcactctgagcatgacaaccaactctaactttcctgtcatggtgcttttttacccttttccctcaaccttagcaaagacaatacataacaatgggttatcagaatagataatggaggaatccagtaaatgagaggcatagaaagcaagtatcaagtgtacatccataccgtcctgaacgcaccggctcttgtctgatctcggaagctaagcagggttaggcctggttagtacatgtataggagaaaacaaatatcaaaatcttgacttaacttccccacctttataaccaccttgtacaaaactaaatggctttaaatataaccatcttctcccagagcacaggtccttggccatatctcagtagatgcatctttaaactctactctgctatgctttaagggtaccttccaataagctgatgatatcaaacggcgtagggagctgagagtgctcagcccgtcagtcttagattagccagcctgttcttcacatcgcatcagaactacacaagcttctcatcccctaaatgctgattttcccatgtcaatttatggataagagttaatataatagttaatacttatgagtgacctacagcagagtctagttggagaggcaggcttccaggatgaatttccaggactcctctttcatttcttcatttgaaacaaggagaaacttcattcctcaaggacaggtaatgagagtgatttatctctatgagcgaggcttcagcaagacagaattagggttatagtaacagctggagtgtctcccatctactcatcttcctaagccccctgttctcatgaagag

SEQ ID NO: 420 - DNA, 1263 bp, Homo sapiens
aaatgactgtccctttggacagatgaggaggtggcttcagagagcttatggctctcgagggcagagctggcaccagcccttgagccaacagcaaagcctgtgctctgtccaaggaagggatttactagggcagcctgtgatctcctctaaccaccactcccttgtcacccaggaaatccaaggagaatcctcggaacttctcggataaccagctgcaagagggcaagaacgtgatcgggttacagatgggcaccaaccgcggggcgtctcaggcaggcatgactggctacgggatgccacgccagatcctctgatcccaccccaggccttgcccctgccctcccacgaatggttaatatatatgtagatatatattttagcagtgacattcccagagagccccagagctctcaagctcctttctgtcagggtggggggttcagcctgtcctgtcacctctgaggtgcctgctggcatcctctcccccatgcttactaatacattcccttccccatagccatcaaaactggaccaactggcctcttcctttcccctgggaccaaaatttaggggcctcagtccctcaccgccatgccctggcctattctgtctctccttcttccccctggcctgttctgtctctgagctctgtgtcctccgttcattccatggctgggagtcactgatgctgcctctgccttctgatgctggactggccttgcttctacaagtatgcttctcccacagctgtggctgcaggaacttaatttatagggaggagcctgtggcagctgctgccccagccacagctgcactgactgtgctcaccacacatctggggcagccttccctggcaggggccctcgtggcttctcattttccattcccttcactgtggctaaggggtggggtgaggggatggagagggagggctgcctaccatggtctggggcttgaggaagatgagtttgttgatttaaataaagaatttgtcatttttgaatggactctggctgtgtctggggccactgtgccactgtggggaagggaggaatactgggcaaagtgcagtgagtgatacaggaaggagggcagagatgagaggttgcagtgctaacccctgtcttgagtttcctccccatcctcattctcacttgctttggggggtggtgtaggttggaattgagaggggacaggacctcacagctgaatgcagactatgtaggcagtgtccacagggaagtaaggccctttctagtcaat

SEQ ID NO: 421 - DNA, 1385 bp, Homo sapiens
gtctgatcatgtgaaacacaacacgttttcctctctgagtcccagctatggggaacatctggagtcagcagaaccattgggacctgaggcaggagtgtcacctgcgggagaagtctgcccgctgccctctgtcatcccattcaagattgtgccataccagctgaggtttttcctctgtctctctaggaatagggtctgtttcacaggccatttctgtgaaccctactccattgtggtttctgccactatcaaagttccagctacctgcaaggtgaaggaaggcatcccttttggggcatgcactttctttcctttctcaaaataatgttatatgtggccacactgatgttcacctttacgtccagggtctttgtgccttgtctctactccctctcttggatctggggaggaggggcagagacctgggactctgtatttctatagttctcctggcagagcctttgagaatggggagaaacagcctgggctggggctacaggtctgtcactatgctctcttgccttcagacagaccattctgaattctctaaagggaaagggcttttgcatctaatcacaatagagttgaaagagaggccttaggattctcctctctctaggtgctgagccctcacctccctgttccaggctgagaactcaaatggttaccctgcttcttcctacaatgctgtgtgatatgggtgaacccagcccctgaccttcctctatcccctgcccatcctcccttttacctcctctcttttttaaacacctgtttatcccaacctttttgagctcaagctgtgataaagaagggcccatcctatttcccctcatctagtccatttacgattctcactgactccccgtcttcctggcagacacaaataaacccagtgtcaggtctaggaaattaatggctattcttccccagatacattctggcttatttgagatacatgattctcttagaatcctgtcccttggttcaggaaagtagcttggaaaaggagtaggggtatagcttgggtcccttttcctgcaaggccccatggggcagaatataataaatattctgagtgaggagtgtggtctttttctgatcttcctcagcttccgtaagttgcagagtgaggtatattaggagactagttctacacaatattgtaatgctgggttccatcaacacccaccttccacaactcagtctgcacctcagttggcaaaggagactggatggccatctttcctcatgttcccttgagtatttcaatgtagaaagcccttcaagtggtattatattttaaccttttacattattgttattaatgttagtaatatattgttatgttttctaaattatttttctttaagctgacgtggctt

SEQ ID NO: 422 - DNA, 1200 bp, Homo sapiens
cctgcttttttccaggtggtcctctttctgcaattccagccttcagcatcatccctgctctggactcctgtagcatttaaagaattggttatctgtttggcattcagcacgcagttttctattattatttgctcccttcaattctgcacaataaataataagtgaagcatccactgaggataaagcagagtcttgaagacagtagaatttacttataaatatgaaaaaaaaggtctcttctttatgccccaattttctaactctaaaaagaatggtggaagctacaggaaattcagagagccttggtcccaaaaggcttgagggataaaggtctactagagatagggtagctccccaagcagggaacttgaagtatagagcatttcaggcctaaaagagacctcctgcttcccatcccccagcctcccatcagttaatctccctcgtaccccccaggtggaggatctcctggccacattggagaagagtggtgctggtgtccctgctgtcatcctcaggaggccaaatcagtcccagcctctcccaccatcttccctgcagcgatttcttcgagctcgaaacatctctggcgttgttctggctgaccactctggtgccttccataacaagtaagaatcacttggccctgcaccctcttcattcttgaagagagtctattctgcagtctgggaggaaggtcactgccctccgctttcccacactaccccctccagaacttcaggtccatctgtattctttgctcagtggcgttttcacatctgaactgaaacccttatttgtttgactggatattcatcttagaaactcatcctcacccttagccctttactgtcaacaatccttggttatggttccactgctccctagctctccagggtcctgagttcctcagggttgccagcagagggcatcatctcaaacacaagcatgggaaggatggtgggggccctttggctagaagacagaaagcagtccttctctggaactcacccagaggtgccagaaacagtattcatactctgtgaaatgtaccatgttcttgccatgtggtagatggccatggttcagtgcgagggtaaaagtgcctcctatagctgatggggctccagagatacaaagggtaactctgggttaccctttaactgctcctaacttgaggccttggataacaggggactt

SEQ ID NO: 423 - DNA, 1195 bp, Homo sapiens
aggtgaatggttccttattgtctaggccacttgtgaagaatatgagtcagttattgccagccttggaatttacttctctagcttacaatggaccttttgaactggaaaacaccttgtctgcattcactttaaaatgtcaaaactaatttttataataaatgtttattttcacattgagtttgtttaaatcctgaagttcttaccttaagagaattgggactcctagagtgattggacattcaaaatattcctgatagtcttgttaattaagagattaggatatctttccattaccttgataattacgttttaatttagcttttttcattggcctgtgtttaaatgcaaataaccccacaatggacatttcctatgttaaagtgacatttaggggataaaaaatgagagcagttccatggattttggtgtttcccctgagacatgaactcagcataatctgggataaaatgattgagtgttaaggatgtgtttgttgttcctgtcgtttttttattttcttcaaagtatacaacatggtttgatatgcacatacatttgtgtaatgattgccatggtcaattaacacatcaccatttttgtgtgtgtgtgtgtgtgtgtgtgtgagggagtcttgctccgttgccaggctggagtgcaatggtacaaccttggctcactgcaacctccacctcctgggttcaagcaattctcttgcctcagcctcctaagtagctgggactataggcgtgtgccaccatgcccagctaatttttgtatttttagtagagacggggtttcaccatgttggccaggatgatctcgatcccttgacctcatgatccgcccacctcggcctcccaaagtgctgggattacaggcgtgagtcactgcacccggccacatcacctcccatgttctatcttacgtattcagaacttgttcatcttgtaactgaaagcgtgtaccctttgaccaacactgtttttcctgtcttaacaggatctacagatcaaggacaggggaggggatagtggaggaaaacggagttagtctgtttctaaatgaggggacagtatgtttcttggggcctgaggacagcttaataaagtagacaaatgaagaaaaacaacaatttgcattaaaaaatatccaattctttagcttttccagcttattaccccttctctggtactag

SEQ ID NO: 424 - DNA, 1206 bp, Homo sapiens
tagaggctagagcggctgaaatggttgtttggtgatgacactggggtccttccatctctggggcccactctcttctgtcttcccatgggaagtgccactgggatccctctgccctgtcctcctgaatacaagctgactgacattgactgtgtctgtggaaaatgggagctcttgttgtggagagcatagtaaattttcagagaacttgaagccaaaaggatttaaaaccgctgctctaaagaaaagaaaactggaggctgggcgcagtggctcacgcctataatcccagaggctgaggcaggcggatcacctgaggtcaggagttcaagatcagcctgaccaacatggagaaaccctactaaaaatacaaagttagccaggcatagtggtgcatgcctgtaatcccagctgctcaggagcctggcaacaagagcaaaactccagctcaaaaaaaaaaagaaagaaaagaaagctggagctggtggcttaggccatcacccttcccttggctggaactactggacagacccttttgagatgtgcctgtggtgctgtggagatgtgtgtagtggtcttagctctttgttgagcttgtgtgtgtgttgtgtagtcttagctgtatgctgaaattgggcgtgtgttggagggcttcttagctctttggtgagattgtatttctatgtgtttgtatcagctgaatgttgctggaaataaaaccttggtttgtcaaggctcttttttgtgggaagtaagtaggggaaaaggtctttgagggttcctaggctcctttgtacaacaggaaaatgcctcaaagccttgcttcccagcaacctggggctggttcccagtgcctggtcctgccccttcctggttcttatctcaaggcagagcttctgaatttcaggccttcattccagagccctcttgtggccaggccttcctttgctggaggaaggtacacagggtgaagctgatgctgtacttgggggatctccttggcctgttccaccaagtgagagaaggtacttactcttgtacctcctgttcagccaggtgcattaacagacctccctacagctgtaggaactactgtcccagagctgaggcaaggggatttctcaggtcatttggagaacaagtgctttagtagtagtttaaagtagtaactgctactgtatttagtggggtggaattcagaagaaattt

SEQ ID NO: 425 - DNA, 1177 bp, Homo sapiens
gcaatgaggaaaatccccacaggtaggaagaaggaaggactgcctgggaattgttactggatcctcagggttctgtacccctagccaggaaaatcctaaaggtccctagatttctggctgttcctttctgggtcttagtctccaacctctaaccctcagatttgacctcctggtccgtacccagaattcctggacgcaagatgggatgaactcactgacataccagttgctggctcgagagctggggcctctttataccaacatcacagcagacattgggactgaccctcggggtcctcgggctccttctgggccacgttacccacctggttcctcccaagccttccgtcaagagatgctgcaacgccggcccccagccaggcctgggcctctatctactgccaaccacacagccctccgaggttcacactgactcctccttcctgtctaccttaatcatgaaaccgaattcatggggttgtattctccccaccctcagctcctcactgttctcagagggatgtgagggaactgaactctggtgccgtgctagggggtaggggcctctccctcactgctggactggagctgggctcctgtagacctgaggggtccctctctctagggtctcctgtagggcttatgactgtgaatccttgatgtcatgattttatgtgacgattcctaggagtccctgcccctagagtaggagcagggctggaccccaagcccctccctcttccatggagagaagagtgatctggcttctcctcggacctctgtgaatatttattctatttatggttcccgggaagttgtttggtgaaggaagcccctccctgggcattttctgcctatgctggaatagctccctcttctggtcctggctcagggggctgggattttgatatattttctaataaaggactttgtctcgcatctgctcctgctttctgcatcccaggcacactttgcctctttgctgccccgcattcttatgcctataggtgatagaacagccagaccaagccaagctccagcaatttttattttcatgaatgagagttggggatcagctgttaggttctgtgcccaggacactgactgctgcctggcgcccactctctatacagtcattaacagcaactccctcataggaggctccagccagagtcag

SEQ ID NO: 426 - DNA, 1316 bp, Homo sapiens
tagtgatctaaagccttccacttaagtctaaggggccaccaatcaagtcctgcccgcctctgcagctccagggttgaagctcttgggccgtcagacctgccactcattttcttcctcccttcccattggcccatggtaaatagcgaggcttttttttttttttttttttttcattgattgggcggggcccaatcagggttgggttgggtctttgacagctttctttgccagattcaaagatggcgcttacggccacgctaagaatgcagcgtgaagctgcagttctgccatcactcaagatggctgcccccatcaagatgaccggggtgtgccggggggaaaggggcagcatgatggtctgagatggtaagggatactgcaccattgcgggcctggtcttggggcctgggaatgaagaatagagaggctagggagctaggtgaagtctgtggtgggggctaggatcagagaaagggagagaggacaagggtgacaagtgggggtgagagatcaaagatggggcgggagtgtgcctagggttgtctctccatgagtgctctccttccctactcttcctgttccaggtgtagcgtcggaccatgtggaagtttctgaggctggggagccggataatggggggtggggcccgttggggggtaaaggggcaatagcgtcctttcacaggctaacctcggctcttcccagtcctctggactaaaatggggaacacattgggcctggcaccaatggggactttgccccgccggagcccccgccgagaggaacccctgcccaaccctgggagcttcgatgagctgcaccgtctatgcaaaggtgagaacttggcacttgggtgtctcaggatgaaggggcagaggagtggagggtcttgaatgccggatgtccggcgatgggagcaggaaaggggagatcatagctgggtcatgcagcctcagggaggatcaggtgcccaaatgaagtggagcatttcattgcaggacttgaaaggaggttaattcctccaaagtgttccctatgggattgaaaggggagactatcttttggggtaggggttctttgtctgtgcttattccttcccttcccctacccccttcagatgtattcccagcacagatggagggagtgaagctcgttgtcaacaaggttctgagcagccatttccaggtgctcccacttctctggcccctccttactattccccctttcctgtccctggatcatcttctcctttcctttgtactccagccctagccagtctatgtgggacaaatgagggaggatgtggggttctcttt

SEQ ID NO: 427 - DNA, 1237 bp, Homo sapiens
ttttttttttgagacagagtctcaccctgtcgcccaggctggagtgcagtggcgcaatctcagctcactgtaacctctgcctcctgggttcaagcgattctcctggctcagcctcccaagcagctaggactacaggcgtgtgccaccatgccaggctaattttgtatttttagtagagacggggtttcaccatgttgatcaggctggtcttgaactcctgacctcaggtgatccacctgagccaggcatcagccaccgagccaggcataagccaccacgccgggccaatgtaacaacataataacataataataacaattgtggctgggcatggtggctcatgcctgtaatcccagcactttgggaggctgaggctgtcagatcacaaggtcaggagatcaagaccatcctggccaacatgatgaaaccccatctctactaaaaatacaaaaattagccgggtgtgatggtgcgcgcctgtcgtcccagctactcgggaggctaaggcaggagaatcgtttgaacctgggaggcggaggttgcagtgagctgagatcatgccactgcactgcagcctgggcaacagagcaagactccatctcaaaaaaaaaaaaattgtactgtgttatacaatagatctcttgaacttattcctcccttctaactgacattttgtatcctttgaccaacttcttccccttccccctcccccgcatataaacatgtttatgcttggctaattaagaattattagttatcagagtattgtattgtcatggcttttgaatatatgctctctattttgtatgttctctaaacagttcagggaccagctagagatgaacaaccagctaagtaacacaaaccattggcactcagtcaaggaatgacttgccaaggccaaggagttagagaactaagctaaggacagctaggcttctatgtaataatgttcatgctccttaaacacaaagtcaccaagagtcattaactatctggccagtactcattgtattaaatgccgtatgtgaaatgcccctaaatattaaggtttaactctcaatttatgaaactgctttttaaaataagcatattcattcacaaacctttttattttgttatttttattttttttaacctttttctttgtgtcagacattattataggtactgtggatccaaggccaggtgcagtggctcatgcctgtaatgccagcactttgggaggccgaggcgg

SEQ ID NO: 428 - DNA, 2153 bp, Homo sapiens
tgctgggattacacgcatgagccaccgcacctggccaattgttaaaaatattttgatgtagagtgttgctctgttgcccagggtggagtgccatgatgcaatcacagctcactgcagcttctacctccctgggctcagaagatcctcccacctcagcctcccgagtaactgggactgcaagctcggaccatcatgcttggctaaattttctttgcattttttgtggaaacagggttttgccatgttgcccaggctggtctcaaacttctgggctcaagccgtctgcccaccttagcctcccaaagtgccgggattataggcgtgagccaccatgtctggcctaagttttccttatatagggatcttgtctatgtaaggactaaactaagctgtgcctacatgcgggggaccagacagcatgacagaatttattattctattgatttaaagaaaactgtccttgacattttagtgtgtaagtacatcaaagcataactataattattttgaaagcatatgttgttatgggtattgggacatctggactttctgttgttggagtttgtccttgcaggtattaccaagctgcttccttagctgtaaacatgttagaaccgtgggttgtcactggcaaggaatgtgccttgctagttttaagatggagtttatttatttattttatttatttttttgagacggagtcttgctctgtctcccaagctggagtgcaatggtgtgatcttggctcactgtaacctctgcctcccgggttcaagtgattctcctgcctcaccctcctaggtaggtgggattacagtcgtgcgccaacacacccggctaatttttttctatttttagtagagatggggtttcaccgtgttggccaggctggtcttgaactcctgacttcatgatccacccacctcgatctcccaaagtgctgggattacaggcttgagccactgtgcgtggcctattattttattttatttttatttttatttttattttctgttttctgttgctataacaagatggagtcgattttaaaatagtgtcactctggctctcctaggctcctgcttccctaacaaaaccttttctaaaaagatactgcaaatttttttttttttttttgagagagaatttcttgttgcccaggcttgagtgcgatggcgcaatcttggctcaccgcaacctctgcctcctgggttcaagtgattctactgcctcagtctcccgagtagctgggattacaggcgcccgccaccacatctggctaatttgtatttttagtagagacgaggtttctccatgttggtcaggctggtctcgaacttgtgacctcaggtgatccgcccgcctcggcctcccaaagagctgagattacaggcctgagcaaccatgcctggcttggtattgcaaaatattgacttaataaaacgttatgcaaaatattaaaccaagtttacttttagttattttcaaacggtctggttttattttagtgctgttcctttgggaaccacggccaaagaagagatggagcggttctggaataagaatataggttcaaaccgtcctctgtctccccacattactatctacaggtaaggaaggattctggagccagagaatctagaggtagtgggtgaaagttctgaaggttgatctttagcctacttgatacttccctcacttttactcaaccaaaatactgctatgtagatgaggtgaacccttcagggtagagggagatgacataaggattatcttacaccttttttatgtggagatgactaaattctatcttgtcattacaagggtaatctattttgcaaaactaccatttagaaaattctggtaagtcaaaatataattcccattaattaaaacatttttgaaacaatttcaaatttacataaacgttgcagaaataacatacagagttcccatatacctttatatggaaggtatatagtatatatgctaagttatatagaagttgcaactttgcaaattcttcttcttttttttctgagacagagtcttgctctgttgccaggctggagtgtagtggcgcgatctcagctcactgcatcctctgcctcccgggttcaagcgattctcctgcctcagcctcccgagtagct

SEQ ID NO: 429 - DNA, 1223 bp, Homo sapiens
gcctcggacccagcctgtgggccctccttctccttcctccgccctccagctagtcgcagggtgccatctcgggcctggcctgcctggccctttggccttctgggcctccttggcctcctgtcttttcttctcgtccgcggcttggtagcggcagccgggaggcctcctctggccctgcacggcgcccaacgagctgccggctcaaagtggttgtcggaagaggctttctgcgacacacggggccctgcgcccggtgggaagcgtaggagtggggaccctgccggcgccggccgtttcccccccgggcacctgttggggaagggctctgggggcccgaggcggcgagtgagcgagagcgcccccagaggcaggcgggcgtaacgggtcagccgcgctggccttgcaccggtggggcgcggggcggcctttggagaggccgcggcagcgcggagctgcgggcgggcggacggaccgggcgtcggggccggcctgccccgggcgtcggcggcgcgctggtgggagccccgggccggcgcggcggggctgcccgcgccgtgcggcgttggtggtatagtggtgagcatagttgccttccaagcagttgacccgggctcgattcccgcccaacgcatcgggcggaccttttgcggagatcccgcgcgcggagctcgcgtcgcagcttggcctgtggctgcgtgcctgtgcgccggggaaggaggcttgcggtgtttggagggtgtgctacctacctccacccatctgtccttttggcctggctgacgccaccttcgcaacatcggctttgcagctcttccttgtcatgtgctcacctcgctgccactgtttctcagcggccaagcccactggccaggtcaggctttctcctcggattgtcgccaggtgacccaccaccaccaccagcagcaccctcgcactctcttctggccacggaatgctccagtagtgtggagcagagcggcttccgccagtccaagccgggtggctgaggggccacttctctctcggctgagggggatctacgcctaatgattgggccacccgccagagccactcatgccagcaagctcactggcttttccaaggcatgccagaccctgagcgcgggatccctgattgggctccacgggtgtcagcggctttggtagaaatggcagcagaacttgaggagccgagaccacgggctatggcgctggggagggaga

SEQ ID NO: 430 - DNA, 1303 bp, Homo sapiens
actctctctagaccttgtcgcaaagcgggaaaaatgaaacaggctccgacagctctttcctctttcctcactacccaaactaatccttaaggctccattttccctggcgactcttcgagcgcccctctgcttctgtagaggggtcgagccatgtcaaggtagaccctgtgtcggcccgtctccctcggatcctccgcaccaatcactgttgctgaatccgacacccggcggatccagtgcggagtctcgaacagctgcggagctgggagctacgggacatgaagagagcggggtggaagagaagacggcggaggaaaatcccccggcgatgctcaactgcggctttctctctcggctgtgagccggctccgccctccagcttccagagccggtggcttctgcgttcaccgccccgcgccgtttgcggggcggggctgattcataagaatcggttctcaccaatggagggcttagcttgtttaacctcaggatcataaacaaaagacactgctagaacggtcgggaaagtcatacgctttgcttatcttatatatagatatctaaaactccaaaccgggtacgcgttggtggtatagtggtgagcatagctgccttccaagcagttgacccgggttcgattcccggccaacgcaagggtttttgtctttccttctacgaaaaacctttctcagtcagaacctataacgcgctgtgtatccgttttacgcctcaacgaagtatccgttttacgcttcaacgaaactgcagcaatacctcactttccgtactcgcttcctgtctttcccctggcctctttctaaacccaggcgttttttgaagggattaaattctgatggttctttcctcccttccttcctttgtaaacttccaactcttgaggaatctttgggatcatttcaatcctgggatgagtcttagcttcagaaaggggctcttgtgtcttcacttgcgaggttcattcgctagccacgcactattgagcacgtgaacttggctagtttctctaagaaactgcattttcaaatttagtcttagtaaataaatcaattgaaataaaattaataagtgaaaattttaaaatggatacttaataactcaaccattggagaaggtttcagtgcatttgaaacaacgtggctattgaatctactttttcaattgtaaattttatgaaatctaaatacggatttttttccgaagaaaatttcctttccgagttgaaatgtgccgtctttaagtgtaaaatacatagcgatttttgaagactagctaagaaaaaaaa

SEQ ID NO: 431 - DNA, 1214 bp, Homo sapiens
gtaactctctctagaccttgtcgcaaagcgggaaaaatgaaacagcctccgacagctctttcctctttcctcactacccaaactaaaccttaaggctccattttccctggcgactcttcgagcgcccctctgcttctgtagaggggtcgagccatgtcaaggtagaccctgtgtcggcccgtctccctcggatcctccgcaccaatcactgttgctgaatccgacacccggcggatccagtgcggagtctcgaacagctgcggagctgggagctacgggacatgaggagtgcgggggggaagagaagacggcggaggaaaatcccccggcggtgctcaactgcggctttctctctcggctgtgagccggctccgccctccggcttccagagcaagtggcttctgcgttcaccgccccccgccgtttgtggggcggggccgattcataagaatcggttctcaccaatggagggcttagcatgtttaacctcaggatcataaacaaaagacactgctagaacggtcgggaaagtcatacgctttgcttatcttatatatagatttctaaaattccaaaccggggacgcgttggtggtgtagtggtgagcacagctgcctttcaagcagttaacgcgggttcgattcccgggtaacgaaacgtttttgtctttccttctacgaaaaacttttctgagccggagcctccagcgcgctgtgtattcgttttacgcctcaacgaaactgcagcaatacctcactttccgtactcgcttcctgtctttcccctggcctctttctaaacccaggctttttttgaagggattaaattctgatggttctttcctcccttccttcctttgtaaacttccaactcttgaggaatctttgggatcatttcaatcctgggatgagtcttagcttcagaaaggggctcttgtgtcttcacttgcgaggttcattcgctagcctctacaaatcatcacttaagcccctaattattcccggccgaggtcctaggctaaggtcccgggccaagctttctaattagtcccaggccaaggtcccaggccaacctaaatcacgcattctccaaaacagccggcaaactaagcacattccttcccgtttccagtccataaacccccccccccaagtggcctcatagtaagcaactcattcgggccccctctctgctggcaaaaagctcagatgtac

SEQ ID NO: 432 - DNA, 1271 bp, Homo sapiens
ataccattaattggaatgttacaggctttttaagctccgtgttctgtctgcatggctaatatgcccgtagaaacctttcaaaacagcgtgggttgaagactaattttgtaacacaaaactcacttacttagatatcacattttgctggacgtgattggacctgaaagaaaatatttttaatgctcacgacaataacctttttatgagtcagcactaaacgtgtgcacatgcatacataagttgtctacatcagcaaaaaaagcttatcgtcgtatttctctgaccaaaatcaacggaacccccgaaatcacagagagcatccattttggattccccgaagacccttcgttcctgcatcctcttctgctctccctttctcagcctcttctgctggaagctgagtcctgctccagatctaggcaagtgctagcgcggaaaaaagacctgcctcgctcagggctgtgagccgcgccctgaagcacggaaagctaattgtgtcactggtttcaaatcaacttcaaattttttggagacgtaagagtgctgagcattttttcttcagtgaagtgacttggcagcccaggtcgccaacgcccgtttctgtagcgcgatcggttagcgccttcggctgttaaacgaaaggttggtggttcgttcccaccccgggacagaagtcccacttttgtgaaccttgagtttttgaaactttcactgaaaaaaaccgcgtgcgatgctatccgccgggagcgctggagccttggctctcaaaaccagccgcggtgctaaccgccgggatccctggcagctgacctccgcgttgtgtggttcccaatgtcctcttctgccttagtgctgtacgggtaattttgaggtatttggtttttccgactagggttgtagtgataactcttagctgcttaaccactgcaattacgttatggaaactgacactttaagaaaatttactgaccaaaggaagtaagtactaataataccaaaacaaattgtttgtctttccaccaaacctgtacctgccttgcctttctatttcctaactcagaaaacgggcactatgtgtggaacctggtccttagtcatgccatgtactgccggctgccaattcttggagagtcggcctcctaaataccttgttgattaagcaccttcctctccagcctcaccgccagttacttcctcattgctccctttgggttattgcatcctgccttgcatgccctatctggtttccggtcttcagctctcctgtcccg

SEQ ID NO: 433 - DNA, 1221 bp, Homo sapiens
tattaaaagtacttaacctacatagaatggttttttaaattttatgcgtgtttggctaattgctgagttactattcctggtctcttcagtgttggggctgtatctcgtggcagaatgcatatgatagttctgccaaatcctcttttctccatggtttatcatttctttgcagtgtccttattatcagcagtgcctaataggtaagagacaatccaaagaagacttctttatgagcgctatatggaaatgtacagcttgcctctgagaactgcccagttaatgaaccaaagaattatggtaatcaaggactaaaaatttttagcatttagcttggcagtgggtttactgcactcttagggaagtaaattcactgtagagatggatagaaagggagcagcttttttattggttgtaatatttactcatcttttttaggatgtaaagtatattcagacagacgggtatcgggctccagaagcagaattgcaaaattgcttggcccaggctggcctgcagagtgatacagaatgtacctcagctgttgatctgtggagcctaggaatcattttactggaaatgttctcaggaatgaaactgaaacatacagtcagatctcaggaatggaaggtaaacttcaccagtgctttgctttggggtccttactttcaacttaagagtattcaatttatgatgatttttttttttcttttgagatggagtttcactctttcacccaggctggagtgcagtggcgcaatctcagctcactgcaacctccaccttccggtttcaaccaattctcctgcctcagcctcctgagtagctgggattacaggcgccagccaccgtacccggctaatttttgtatttttagtagacacggagtttcaccatgttggccaggctggtctcaaactcctgacctcatgatgcacccgcctgggcctccccaagtgctgggattacaggcatgagccaccgcacctggccaatttatgatgattcttttagagaactcttgattgctgtctgttgtccatactcctctttttctattgatgatacttgaatgccactaccaactcctatggctatcaatctgctagtgagtattgcattcttattgttcctagcctgtggcttggcatatagtaagtgcttgataaaatgtttgaatgaatgcattttcctgaagaaacaaaagtggtttcttttgtttac

SEQ ID NO: 434 - DNA, 1230 bp, Homo sapiens
agagctggctttgtacaaaccccctctccccgctttttttttcttcttttcttaaaaagcttctgtgctcttttgaaacaagccaacaaaagttgaagccagtgtgtgtgcaactcagacctcatgagcaattcttttccaaaccaaattttaattcacagctgccagtttaggggcaatgctaagacccaaatcgtcctggcatctgaagcacctgtcctaatgttgagtactttaaatatggtgttcccatttcctaaatctcaatttagtctgtttggtcttacaattgtgagtataattatgggaaaatttaaatgggatacttgagtcaggactgtgttaaaaaatccaagatgtattgcttctgtaaggctagactaaaataatgaaaatattaagagcctaaagtatgctgctgctttttttttttttttttttttttgatacagagtcttactctgtcgcccaggctggagtgcagtggcgtgatctcggctcaccgcaacctccacctcctgggttcaagtgattttcctgcctcagcctcccgagtagctgggattacaggtgcccgccaccatcggctgatttttgtatttttagtagatatggggtttcacaatgttagtcaggctggtctcgaactcctgacctcaggtgatctacccgcctcagcctcccaaagttttgggattacaggcgtgagccactgcgcctagcctactactgctttttaactaaagtctgcctgcattccctctcttgccacaaaaggcaaacagagcttttggcacatttgattcctgaggcagccccatgcctgtttaacacagtgtagcttaactggttaaagcaccgggctagtaaacacatgactaggggctcaatcccttgtgggcctgttagtttatttactgcattcattggccacagacttcatccctaaagtggtcaagccatctcagacacgtttgcttctggtcacaccgatcaagattgatccagccactgaagtaatccaaacaactcacttctaatgggccagaggttgtcatcttcatacctgaggaatggcttgcattttataaaaattggagattcttctgctctcagaatagcagacacagggctgggcgcagtggctcatgcctgtaatcccagcactttgggaggccgaggcgggcagatcacctgaggtgtcaggagtttgagaccagcctaaccagt

SEQ ID NO: 435 - DNA, 1149 bp, Homo sapiens
ggagttgtgatacacgattatattaaattgcttatggttagttttccaggaggtgatttaattgttcaccttcctaagtcttcagtcttaggcttatccagtgggagctggaaagctttaataggcaagtttattggaacacacttccagagtcaaatgtcactcttggcagctgcagatgtcaactgggacaagtattcagagcctgagaattaaggatatgtgttaaatatggccctcataggcggccccagggtttttttttttttttttttacttttgcgaacatgttgacagagatgaggctcagaaggcaggtatacatgtgccttgtcttcattctctgcagagagaatgtttttaggggcttgggaaagtatttcaactcgaagaaaggacttatagttactagaatcttcacatctgctttctcgagtgaccttgagtcaaccacagtcttgtggggtagatggtattattcacccctcttttgttacatattaacatgacaaaactaagactcagagaggaagtgccttccccaagcacatgcagctagccagtggcacatccagtacttgaacccttttctctttgaatcatgctttgtactaagctgatcacggtccactgtagcagtaggtgacttatggtactaagtaccatctgatacattaatttattcagcaaacattgagtgtctgttgtatctctagtacctggcattgcaaagatgagtaaggcagtagacagataactgacataacccatgacagtgcagttgcgtaagtggcatgatctggagtgcagagtactgtggggacacccatgagggagccacaattgcctggggtagggagttggaggaggcagatgacaggaggtaatgactgagctggagctggagggatgagcaggagttaggcagattgcaaagggggtgcgggcatgtgctgggtggcatttccagacaaaatcggagggcttggaacagcagtgtgtgctcacacctggtacgtagcaggagtgagaggcaggaacagcagtttgaggcttgacagccctgtgtgcgaagcgaagcatttgaatgatgtctcattaccactgtataccacatgtccttcccctgcagctttggctgacatctgt

SEQ ID NO: 436 - DNA, 1494 bp, Homo sapiens
attattacctggtcacaccagattttcccccagactcagcaccatccagtctgattccccgtttctgggctcagtttgactctaaatctgttttgctattttaaaaagtcaaacctggtccccagcagagcttgccacccggagactttcaggagaccgtgcaggctctgaagggagctcccagtcacagcagccgcctacttggagcaagggaaggctcccaagatgcctcctttgaaagccggtgctcaccaagatcagttcaggatcaatcattatccttgtagtcatgccttgatcagttctgagatgaagcagggaatgcaggcctgggttagtatcctgaggacacagggcccctggccttgatggcactgggctgtgctcaggtgaagcccacccgtgtctgggagagccttggcttttcagtgggcagcatgctcaactttacttgaagctcccaggtgccaaaccatttagtgccttggctgtttatcccactgccttggaagatggactcctctcatctctgagcctttacctagctgcttcctcatctacctgtggtgttgggaccaagcctccaatatctctgaatagcccactcctagcttggaaacagctataagggctgccctgccccttgtcaaatgatcaccaattcttggtggcttggctggggacaatgaacagtgtctgctggggtctgtgacacactgtttctggaacaaggaagggatggaaggctctacccctccgtggcagcccagcatttggccaactctgtatctgaacttgagctttctatggaacaaacaatggtcttagttttttaagagcctctgggtctctgattccatggagagtcaggagtagaattagtggaccagaaaccatgacatttgccatctaggtactctgctgttcagggtggaggcacagatgagcagagtggggtgatgttggttgtatgtgcatagaagtcccctggctccagagccatccagtggtgcttggttctctcttcctgcccaggtattgtgtgtggaccaagtgtttaggaaacaagcatagaagcattatgtcacaggaaggcctggcctctcactccttcacactaatgagccttctactgacccaagtttctttttctcgggcagcctgggaccactatgagcagagagatgggagtctgtgtaagaaggatgcaagtatcctttgatttggagtggacagagcaggtccttgcaaaggcagtgggttaaacaacgggatgtctgtgggacaggccagggaaggagggcagagacagggtctccagttcaccttgccgcagaactagcctaatcatccctgcttctggtcttggccacttggcaatcatggggaagttgactccccgcctcacttgggcttggagctggatacttgtggccacgcccaggataggttgccagagtttcattaggccgctgggtcgggctggaggcttgt

SEQ ID NO: 437 - DNA, 1315 bp, Homo sapiens
ctagcacagggggttacaaccagcccagcctaggatatggacagagtaactgcagttatccccaggtacctgggagctactccatgcagccagtcaccgcacctccatcctaccctcctaccagctattcctctacacagccaactagttatgatcagagcagttactctcagcagaacacctatgggaaaccgagcagctatggacagcagagtagctatggtcaacaaagcagctatgggcagctgcctcccactagttacccaccccaaacttgatcctacagccaagctccaagtcagtatagctaacagagcagcagctacgggcagcagagttcattctgacaggaccaccccagtagcatgggtgtttatgggcaggagtctggaggattttccggactaggagagaaccggagcatgagtggccctgataactggggcaggggaagagggggatttgatcgtggaggcatgagcagaggtgggcggggaggaggatgcggtggaatgggcagcgctggagagcaagttggcttcaataagcctggtggacccatggatgaaggaccagatcttgatctaggcccacctgtagatccagatgaagactctgacaacagtgcaatttatgtacaaggattaaatgacaatgtgactctagatgatctggtagacttctttaagcagtgtggggttgttaagatgaacaagagaactgagcaacccatgatccacacctacctggacaaggaaacaagaaagcccaaaggtgatgccacagtgtcctgtgaagactcacctactgccaaagctgccgtggaatggtttgatgggaaagattttcaagggagcaaacttaaagtctctcttgctcggaagaggcctccagtgaacagtatgcagggtggtatgccaccccatgagggcagagggatgccaccaccactctgcggaggtccaggaggcccaggaagtcctgggggacccatgggtcacatgggaggccgtggaggagatagaggaggcctccctccaagaggaccccagggttcccgagggaacacctctggaggaggaaacgtccagcaccaagctggagacaggcagtgtcccaatccgggttgtggaaaccagaacttcgcctggagaacagagagcaacaagtgtaaggctccaaagcctgaaggcttcctcccgccacccttcccacccccgggtggtgatcatggcagaggtggccctggtggcatgtggggaggaagaggtggcctcatggatcatggtggtcccggtggaatgttcagaggtgg

SEQ ID NO: 438 - DNA, 1717 bp, Homo sapiens
aacttgcacaaaaacaacagacagccctacgttgtcagtgaattagcaggtcgtcagaccagtgctgagtcttggggtactggcagagctgtggctcacattcccagagttcgaggtggtgggactcaccgttctggccagggtgcttttggaaacatgtgtcatggaggctaaatgtttgcaccaaccaaaacctggtgccattggcatcacagagtgaacacaacccaaaaacgatatgccatctgttctgccctggctgcctcagccttaccagcgctggtcatgtctaaagatcatcatattgaggaagttcctgaactttctttggtagttgaagataaagttgaaggctacaagatcaaggaggctgtttcgcttcttaagaaacttaaaggctggaatgatatcaaaaaggtctatgcctctcagcaaatgagagctggcaacagcaaaatgagaaatcgtcactgtatccagtgcaggggcccctgcatcatctataatgaggataacggtatcatcaaggccttcagaaacatccctggaattactctgcttaatgtaagcaaactgaacattttgaagcttgctcctggtgggcatgtgggacatttctgcatttggaccaaaagtgctttccagaagttagatgaattgtatagcacttggcataaagctgcttccctcaagagtaactacaatcttcccatgcacaagatgttcaatacagatctttagcagaatcttgaaaagcccagagatccaaagagccctttgagcaccatgcaaaaagattcattgcagagtcctaaagaagaacccactgaaaaacctgagaatcatgttgaagctaaacccatatgcaaagaccatgcacgcgtcagaacaccattcttcaccaggccaggaatcacaagctctgagtggataaggcagcagcaacagctgcagcactagaagccaaatcggatgagaagggggttgcaggcaagaagcctgtggtaggtaagaaaggaaagaaggctgctgttggtgttaagaagcagaagaagcttctggtagaaaaaaggggcagcagctaccaagaaaccagcccctggaaagaagccagcagaaaagaaacctactacagaggaaaagaagcctgctgcataaactcttaaatttgattattccataaaggtcaaatcattttggacagcttcttttgaataaagacctgatcaaagaggcagtgagaaaaaaaaaggtaggtaaataaattaaaaagaaaatccaaaaatgtattgaaacaagtgaaaatagaaacacaatatactaaaacatatgggatacagcaaaagcagttattctaagagggaagtttatagcagtaaacacctacatgaaaaatatatatttcaaataaacaatctaactatgtatctcaaggatccagaaatgcaaaaacagacagaatcaaaaattagcagaaggaaataaagtataaatatcaagccagaaataaacaatatagagactaaaaatatgcaatcaacaaaatgaagggtttttttcaaagataaacgaaattgacaaaccattaactacattgatgaagaaaaaagatacaagaccaaaataaataaaatcaaaagtgaaaaaggatacattacagctgataccacagaaatataaagaattattagagattattacaaataactatatgcca

SEQ ID NO: 439 - DNA, 1167 bp, Homo sapiens
aaaattaagacatactggcctggtgccagcagatggcttttctatagacaaactaggttagtgtggaagatataggttaaaataaactatgctgttttatttatcttcccaacctgattggcagctagacttttttagggtctcatttaatggccctgtttttttcattattatatttaatgatagggcaggatttcgtatgcaagctcttgtttctcaggctgcctgcagaagaagtcgctataaattatctgttgtctacatggtacaaggcccattgactcatctgatgcttgttttgttaatttctttaatatttttatcacggggcagtgggagggcttgggcttttagccacagctgttttaagacttctgatctcctgccctgcaggaataggtgggaagtcattgaatttttacactatagtaatttgcattcccacataagtttgagtgttacgaaaacattcctttaaagggatctgtgctacacaaaatatgccaggacctcacagacaaagccattgctagaaatgtcattccaatgatcagatctggaaacaggctgccataaccacttttccttcttgtagactcagctcacctgtatatttaaactgttcttggcatcttgaaacacctatttctactcaggtactcattgtcctgttactgattcacctttctgatccttttcaaccagttttcccccaaggggggaaattttacttaacctctagtatttgaacaactcaatatttgaattgttgccccatttgcttttacctgtactgtattcttggtcatctcaaatggcgtctaaacccagctactttgcattccagaagtttccattccctccaattccacctaatttttcatctgtcctagttactggctctttcttcatgtcttatttctcttgctttgggagcttaaaagattttacaagacctaattttgggttccttccttggagccatagttaccctgccaagaagagtagaaaatgggttcaactcctgtttcgctccaccaacacctctgtgagtctcatcatcagctgagcgatgatgccttacaggttgcatagcactggaactttcctagagtaacggctctgctgccagggtttctctgggctcattcttccactgacttaatt

SEQ ID NO: 440 - DNA, 1210 bp, Homo sapiens
ataagtgagatcgttcaatatttttgtctttctgtggccggcttatttcacttaacataaggccctccaggttcatccacactatcatacaagaaagaatttccttctgttttacggctgaatagtactccattgtatacattatccaatgttttctttatccattcatatgttgatgaacaattaggttggttccatatcttggctattgtgaatagtgctgaaataaacatgggagtgcagggatactgatttcaattcctttgggtatatacccagatgtgggattgttagatcatatggtagttctatttttaattttttaggaacctgcatattattttccataatggccgtactttcaattatatctttatcaaagtcttctatcgtgcccatggaggcttacctctgagttgacaccagaatactaatcaatttccattaggtgtgattgctaaccagccaattatattttctttattcctataattttgtatattttactcacaaggatatgagaaatttggccaaatgccttaaagtcaatatatacattgtctatagcagtctcttgatttaaaagtttaataactcttccaaaataggaaataatgttggcttgctcttggctctgaatccatttgactccttttaatcacctcttgctaatctaaataaccattgaggctgctcccaaatattccaactctctttcctattgtgcacatggtaggagtgcacttccctgtctacttgaaactaggcatggtcatgtaatttgctttggtcaatgccatgagtaaaagtgaaatacgtcacttctgggagtagaatgagtatactccactacatcctctttcccactaccttgacaaccagaatattccagtttgggtcccaaagtgaaggcaaaaacagaggagaaccccatacaacccacaagggacatgtagtgtgagcaagaaatgaacaagaaataagcctttgttatttcaagccattgagatttcaaagttatttgataatgaaacataacctgtattatctcaacaaatacattatgtttactggtctgtgttttctgggatccatgagtagcctcatcttttgaaattcaaaagagaatgtgcccatctatggtattccagcccatctcttgttctccatggttttttgagattactgacattacacctgtcagttcttt

SEQ ID NO: 441 - DNA, 1181 bp, Homo sapiens
taaagaggtttcttgctgcaagtcttctcagaggctttattacgctacaggttcttgtgaatctcacaaagaggtatacacaatgtagtatttcccaaattttgtgaccacattgtagagtatcagaacactttggacaacagtgaccttcatcttcttattctgtaattaaattattccattcaaaaataaattgagtgtgaatttattattaaaaacttaagcctgggcccctccccgccccgcctcccggcgcgggtggccgaggcgtagcgctgcgacccccgcacccctgcgaacatggcgctgcgagtggtgcggagcgtgcgggccctgctctgcaccctgcgcgcggtcccgtcacccgccgcgccctgcccgccgaggccctggcagctgggggtgggcgccgtccgtacgctacgcactggacccgctctgctctcggtgcgtaaattcacagagaaacacgaatgggtaacaacagaaaatggcattggaacagtgggaatcagcaattttgcacaggaagcgttgggagatgttgtttattgtagtctccctgaagttgggacaaaattgaacaaacaagatgagtttggtgctttggaaagtgtgaaagctgctagtgaactctattctcctttatcaggagaagtaactgaaattaatgaagctcttgcagaaaatccaggacttgtaaacaaatcttgttatgaagatggttggctgatcaagatgacactgagtaacccttcagaactagatgaacttatgagtgaagaagcatatgagaaatacataaaatctattgaggagtgaaaatggaactcctaaataaactagtatgaaataacgcaagccagcagagttgtcttaaattagtggtggatagaagacttagaatagaaacttttagtattaccgatggggaaaaaaaaactactgttaacactgctaatgaaagaaaatgccctttaactttctaatgattatagataaatataatatgcgtctttttcacaatatcctatgatttttagactaggctctagtgttcagaattcatgaaattatccatggtaaaaactagttataaaaattacataattcaaagataacattgttattcttaagccttatataatattgtaacttgcatgtatccatacctggatttg

SEQ ID NO: 442 - DNA, 1160 bp, Homo sapiens
atctcagctcactgcaacctctgccttctgggttcaagtgattcttgtgcctcagcctcccaagaaactgggactacaggcatgtgccaccacacccggctaatttttgtatttttagtagaaacagggtttcaccatgttggccaggctggtctcgaactcctgacctcaagtgatcctcctgcctcggcctcccaaagtgctgggattacaggcgtgagccaccatgcccagccccatgtcctttttaatgcctggattgactttgtgggacatgaggccaaggtaccttttaagatgtcacctgtatagcatactagtagtgaatgtaggctttgaagtcagatgcatctggctgtgagctgtgactagtcatatactagttgtgtcattttgaacaggttacctaacctctggctcctcagtttgttcatctgtttaaaaattgtgggaataacagttcctgctgggtcattgcaagatgtcagtgagacgtgtcaagtgcttagaatagggcttggcataagtagagtctcagtagggtaggtgttatttaatcccagaaataactgacaactttggaagatgagagtgaatgtctccgatcattaatttatttaacaaatacttatctagtactatgtgcccggcgctgtagacactgccatgttttatctcattcaatattcacagtgactgcccagtgaatggtattgcctccatcctctgagaaggtaaagagcctatcccagaccccacgagtggaggcgtcagggaggggttcttggcaggagatgggtcttgtagaaaggcttctgctttgctttcactcacggcctgtggccagtttgctcagacagctcccatcaggacaccattggcagcttttgcatgaccctgcctcccagggtcttcctgcgtttttccttaagttgccttattctttggttgtttccctacttgtttttgttagactgtgggaggaagaaatccatttcaaatctgctgaaacctgttaccaagcaacagcagtgattaaaagcaacctgatgagtgagtaaagaattagggtttcagacctgtagttaatgatggtctctgtctccctgctgccctgcattcccttcccttccgttcactgctgggtgaaggagggcttg

SEQ ID NO: 443 - DNA, 1222 bp, Homo sapiens
gggtaattctaagactagttgaactggattttagagctgtgtaataaagaactttccaacagttttacatatccataaatggaatgaactgccttgacaaagtagtgagcacttccttctggaggtgttcagaagagagctggatagaccctgtcaaggatgttgtgaataaaagtgtagccaatattatttcttaaaatgttcccaagtcaaagacttccatgagcctttgaaaaaataatttggcctgcatttattctttttgtagccatttattaataaattcattacttgctctacattgatattgctgacctaggaatttaaaagaagaaaaaggcttgtgttgcttttatctcgttttaataaaataatgatacttttcacttatgcagcacttttcatccaaggatttcaaagtgctttacaaatacgcactaattaagcctcacaaacagccagaggtaggtggttttcttctctttctacaggaatgtcaactctggcccagaaatttaataagagcctgtgagtgcctgagattctttactggctgccattcccttgtaatgtgctgcatgtgaagcatcacttgtcatttccagatttctttgttcctgctctgaatcatatcaagtttagaattctaatgattgctattacaaatgtgtttgaagtcttgcaaatattagcaaaaattcagtcttctgcttgctgaatgctaattagatttctaaatttgtttatttaaaaaaacacactctagatatggttttctatttgttgttgggttttaaatataatttttctcttttaaagaatttgtcatttttctttctaggtacccagaaataattgttcttgggagataaaacttaatggcagattgactttttggccttatcattcctagttatcttttcacaataaacaataaccattttctttggaccagaattatgtattttcaggaagagacactattttggtgattcaaaggtccaaaatatgttatctgaatacgaaggaaaaaggtgaaatggcactaaataagtaatcctataaagaaaaagtactataatagttgcatatactagtctagagggatacaccacattttatgtgggttaggagtagcaagaagaaactatgtacatacagagacatgcaccctacaagattggattgaattccagtatacttataaatagccacatattca

SEQ ID NO: 444 - DNA, 1189 bp, Homo sapiens
aggctgatcctctgcccttaatgattgagatttttagatacatggctagtaggacagtaatataaaaagtactaacattgtaaaagtaataaaaaagcttttcaaaattaaaattgatataggtagagggtatacttattttgatatcctctataactgtgtggatgggttttgaaatcagagctggcaagctgaaggcaaatgctactgagcatgctgtttcaagggttttgggattactaattatgtaaattgtaccattttgttacttaaatgtggttatgctgagtgcatctgtgcctactcagcaattgagatttttttactagctttttcctccagtggcttttcttgccattaaaaccttttttgtttttttattgcaaatgagagatgggggtcttgctggtattgcccaggctgggcttggactcaaataatcatcccacccctgccttctcagtagctgggactccaggtatacaccaccacacccagctttttttgtggcatttagaataaactcaaggataacacttctaatccaaggctctgcaaaatgtgacttttgcctactctgatttcatctcctgcctgtctccctgagacatgacttttacacttgaacgttcttagattgaaattggtttgcttttcagtggttctcaactgtgggtacagtttagagacacttggggaacttttcaaaaaatactattgccaggcctggcccaagaaattctgatttaattgcctggcatggggccttgacatacaatttttttttaaaactttggataactgtgcagcctaagttgaaaaccactgattggttttccttaactcctgtccccttttcagagaggtcttctggacctttgctatcctatccaaagtcccctttacctctttgctgcccctttttacccagttgagtttttcatttctacatttttatttacttgtttattgttttgttaaaagttccatgaaggcaggggcatcatctgtattttcataacatatcctaatatctgaaacaccaaaaaaggcttgtttctgtgtaacctgtagagaattgttttgctaaattatattttagagaacataccaactactctagtaggccttaaaaggacgttgattgttgttattgagatggagttttgctccgtacacaggctggagt

SEQ ID NO: 445 - DNA, 1195 bp, Homo sapiens
cctgaaaagacggaaaagaaggatcttcctcctcccccaccaccacctcagccaccagcaccaattcagccacagtcagttccaccaccaattcaaccagaagcagagaaatttccttcaacagaaactgcaactttggctcaaaaaccatctcaggatactgagaagcctctggaacctgtgagtactgttcaggtagagcctgcagttaagactgtaaaccaacagactatggcagcaccagtagtcaaagaagaaaaacaacctgagaaagtcatcagcaaagaccttgttatagagaggcctcgaccagattcaagaccagcagttaaaaaagaatcaactttgcctcccaggacctattggaaagaagctagagagagagattggtttccagatcaaggatacagaggtcgaggccgaggtgaatattactccagaggtcgaagctatagaggttcttatggagggcgtggcaggggtggtaggggacacactcgagattatcctcagtatagagacaataagccaagagcagagcatataccctcagggcctctcagacagcgagaagaaagtgaaacacggagtgagagctctgattttgaagttgtccccaaaagaagacgacagcggggttcagagactgacacagacagtgaaattcatgaaagtgcaagtgacaaggacagtttaagtaaaggcaaacttcccaaaagagaggaacggcctgaaaacaaaaaacctgtaaagcctcattcttctttcaagcctgataatcatgttcgaatagataatagactgctagaaaagccttatgtaagggatgacgataaagctaaaccaggctttcttcctaaaggagagcctacaaggagaggcagagggggaacattcaggcgtggtggaagggatcctggaggccgtccatcacgcccttccactttacgaagaccagcttatcgggacaatcagtggaacccaaggcagtcagaagttcctaaaccagaagatggagagccgccaagaagacatgagcagtttattcctatagcagcagataaacgacctccaaaatttgagcgaaaatttgacccagctagagaaaggcctcgaaggcagcgtcctactcgaccaccaaggcaagacaagccacctcgatttagacggctaagagagagggaggctgcttcaa

SEQ ID NO: 446 - DNA, 1220 bp, Homo sapiens
acttcatagcaattcaatgagcagagttcaaaagtgcgaaactttacaagacaaataactttgcttctccaaaaattgaattgcaaggaaagaaagtggagagggagaaactgacagagtaaaaggaatttaagactcatatcatcagcctagagcggtggctcatacctattaataaaatcccccagcactttgagagggcaaggcgggagaatcgctttaacccaggaattcaagaccaatttaggcaaataagagagaccgtctttacaaaaaactacatatatatataaaatttatatatataaaatataaaatgtatatactatataattatatattaaaattatatattatatataaattatgttatatataaattttaattatatatatatatatataaaagctgggtgtgttggcacatgcctctggtcccagatacttgggagattgaggtgggaggattacttgggccagtgcatgatcacaccactgcactacagcctcattgacagagcaagaccctgtctcgaaaaaagccagccagatatgagggcgatctgactgtgacatctgtcactctattgatcgccagggttgattcggctgatctggctagctaggcaggagtccccttcctccctcaccactccatgtgcttccctcttgaagctgtgcacactcagtggaagaggacagccatccccaatagaggaaggccagtctgcagtcaagggtatacaagtagctgcattcccctactagaacctccaaacaagctctcaaggttcatttgtaagagaacgtagggttctttgaagtcaagcttccaagactccagacacatccaagtgagttgctgcatgtggcagtctgcctttctttaaaacaaacaaacaaaaccaccaaacttcaggtaataaggcaggtaatgttttacataatgcatctcagtataaaacatgcaacaattgaattatttacatagcccagcagaagcgattcaatagtctgccctgatgtggactgtaagaatgattagaaaagaagttaagcctgagaaaggtttgaaagagagtaatagttttgctaagtggacaagagtggaaaggacattccaggcagagcagcatgtgtaagatatacagaaggaaggcagtgagacagcatgggctgttcagggaaatcaaagcagtctgctttcaggagaataaagt

SEQ ID NO: 447 - DNA, 4721 bp, Homo sapiens
cttacaccgcccccccttcccccatccccagagctttccttgcctcgcgccccctcccctctctgctcttcctcctcagtcgggaggagggcgggagcacggcatcacgtggacggtcatgtctctgcccacaatggcgaggaagggcggggaaaaggggcggacttaaggggtgggaagaaggtgatactggatgagaggaagattgagggaggttagggggaggagccgaagcggacgctgccgggagcgtgcgtcgtgacgtcatcaaaagaactcttatatacaggagcccaggcaccatactgtcttttcgaggtaggagtcgactcctgtgaggtatgttttatctttgcgaatgttgcgggttttggggcgctccagcctttgtctgctaaggtcaccctgaattgactgggacttctaagccagtcgcgcgcctttgcagggcctacaagttgaggatggtgggggattgcacatatggtgcatgcgtgacctaagctgcgactatgttagagtagaactgcggagaagcctcggctctcgtgccctgcctctgatgaagcctgtgttggtagggacatctgagagtaatgatgaatgccaaccgctctgatggtggcacatgccgagtcacccgagtaagctattgttaagggccgtgacccgagcctccatcagccgtccgctctcatgaaaggctgtcggtggtagtccacgtgcttaagtgcctgcattccgcagtgtcaccaatatttccattagtgtttcttttttcttttttgagaccgagcctcgttctgtcacccaggctggaatgcagtggctcgacatcggttaatggcaacctccgcgtcccgagttaagcagttctgcctcagcctcccaagtaactgggactacaggcgcgcgccaccatgctaggcttttatatttttagtagagacggggtttcaccatgttggcgagactggtcttgaactcctgacctcaggtgatccaccagccgtggtcccccaacatactgggattacaagccgtgagccaccgcgcccggccgccatcggtggttcttaactgcgggtgcagtgcttctttgtaacattaagtgtatcctttacctgtcgctagataatgaatggtatgttacctgcatcattggtttaaaaagacgaaccgtttttttaaagaacactctttaaaaaaaagaaccgtggaacaatgaattaaaatctgtacctgatctctttaggtatggtgctgggtgcagatgcagtgtggctctggatagcaccttatggacaggtaagaattggggaaagtatggtgggaagaatgaaatctaagaggtggtctcagcctgtgatgctttaagagtagtggacagaagggatttctgaaattctattctgaggctttaatgttaacagcatttatatttaacgtgactgctgtgaggttcattctcactgttttgcttgcatctttttgttttctagttgtgtccccaaggaaggatgagaatagctactgaagtaagttgaaaattccctctcaaaaaggtttaaagccattggatgtgccacaatgatgacagtttatttgctactcttgagtgctagaatgatgaggatcttaaccaccattatcttaactgaggcacccaaaatggtgagttggggaacatagagagtacacctaagttcacatgaagttgtttcttcccaggtcctaaagagcaagcctaactcaagccattggcacacaggtgagacacctctattttgtacttctcacttttaagggattagaaaatagccaaagcaatgatgattatctatgttagtgcttctctcccctcttttcaaatgagaattttgctctcatattgatactaagtttaatactgaagaaaatgtgaaaacagatactatgatggttgcatagttcagcagatttaatcatgaagagatgtactatctgtctgatgtatctggggtagttgtggtttgctgttaatggttaagcagtgtaccaccaatctaccattaaaatattttttgctgacaattttgtattaaaattacaggcattagacagaaagctggaagttgaaatggtaagtgaaactgtatccaagtaagcaggtaactgggcaaacttcctacggcacaaatggctttttagttacctcctagtgctgaatgcattaaataaatggcggattcttgtcttgttatgattaataagaaagtttgtaaatgcagcctggatgatgataagcaaatgctgactgaacatgaaggtcttaattagctctaactgactaaaggcatttgttagttttggcagggggtgaacactcatctgtggctattctaagaccactcttatttcttaggtggagtccaacttgcctggaccagcttaatggttctggtaagtattaatgaaaacagtagatagacttaatgaaaatgctgatggtgatatgcttactgctgagctaatggcttaaggcttggctgatgaatactgactgtattttccttgagcatgtctggaacagtgtttatgtgttttccttgagcatgtttggaacggggtttgtgtaatgatgttgatcaaatgtctgacctgaaatgagcatgtagacaaaggtaacactgaagaaccctgtgacagacaactttgaaaagagtttaatgatgtttagcattttaatggaagtcctcatttgtattccagctcctggtaacgtttttatccatggatgacttgcttgggtaaggacatgaagacagttcctgtcataccttttaaaggtacatgttttattgatgttaacgttaattgattgagctactgttagtgatgattttaaaattaaagcagatgggaatctctctgagaaagaaaatggagattaatcttaaactgaaacagtagttgggaaatcttttagaaatccacctattactacctattggtaaaggagattaaatttctacaggtatggagagtcggcttgactacactgtgtggagcaagttttaaagaagcaaaggtatagcagttccaagtattttttttttttttttagacaagagtctagctcttgcccagaatggagtgcagcggcactatcagttcactgcaacctctgcctcccaggttcaaggaattctcctgcctcagcctcttgagtagctgggattacaggcatgtgacaccatgcctggctaattttgtacagctatgttgtccaggctggtctcgaactcttgacctcaagtgatactgcccgcactgacctcccaaagtgctgggattacaggcgtgagccaccatgccccgcctcaagtctggtttttaagtgttgtaaagccgatacaatgatgataacatagttcagcagactaacgctgatgagcaatattaagtctttcgctcctatctgatgtatctggcggtaacattctagtttatgccccgaaaaggggaatatagccattctataatgtttggagattttggattactcctaattgtatgcaagttgtcttactgtgtattgtcccttaatttcaggactcagaattcatgattgaagaaatgcaggttagtttaaactttgaaggaaatttttaaggtggcaaaaggttttggtggcatatacaccttaatctgtagatgggagtgattagctgtttaaaagttaaaatgtgactgagaaggaaattgagtagggcaaattttaaatgggtattatttttcatcttcaaacaggcagacctgttatcctaaactaggtgagtcagcttttggtacatgtgatgattttcagtgtaaccaatgatgtaatgattctgccaaatgaaatataatgatatcactgtaaaaccgttccattttgattctgaggttactctactaacaagcatcacacatttgtattttgccctgattaatatgttggcttcgctttcagggtttttaatgaccacaacaagcaagcatgcagcttactgcttgaaaggtgaggattggaaatgttgggactattataattgcagaatacatgatgatctcaatccaacttgaactctctcactgattacttgatgacaataaaatatctgatattctgcattcccatgtagcattttaattgaagtctgtaaatgtggctaaaagtcttgtcttattttttgagacagggtcttgcctcacccaagctagagtgcagtggcctttgaagcttactacagcctcaaacttctgggctcaagtgatcctcagcctcccagtggtctttgtagactgcctgatggagtctcatggcacaagaagattaaaacagtgtctccaattttaataaatttttgcaatccatctggagtgtgtagtgtttacttaaaaaaggacagtgcttttcatctgttcattagctgtaagcataaatcacattcaaaagctattataactccatggtatttgcttcattaacactgcagccagttaaaattttatgggtattttacaaggtgtcttatgcattaaagtgcaatatttcctaattctccatatgagcaaattgtcaggtttcataggcccctgtgctaattggttttgagcttaaagtattgatggagctacttggagaaagtcatgttgagtctgaggctgggaaaataagttatagaaaatactataga

SEQ ID NO: 448 - DNA, 4721 bp, Homo sapiens; identical to SEQ ID NO: 447

SEQ ID NO: 449 - DNA, 4721 bp, Homo sapiens; identical to SEQ ID NO: 447

SEQ ID NO: 450 - DNA, 4721 bp, Homo sapiens; identical to SEQ ID NO: 447

SEQ ID NO: 451 - DNA, 4721 bp, Homo sapiens; identical to SEQ ID NO: 447

SEQ ID NO: 452 - DNA, 4721 bp, Homo sapiens; identical to SEQ ID NO: 447

SEQ ID NO: 453 - DNA, 4721 bp, Homo sapiens; identical to SEQ ID NO: 447

SEQ ID NO: 454 - DNA, 4721 bp, Homo sapiens; identical to SEQ ID NO: 447

SEQ ID NO: 455 - DNA, 4721 bp, Homo sapiens; identical to SEQ ID NO: 447

SEQ ID NO: 456 - DNA, 4721 bp, Homo sapiens; identical to SEQ ID NO: 447

SEQ ID NO: 457 - DNA, 4721 bp, Homo sapiens; identical to SEQ ID NO: 447

SEQ ID NO: 458 - DNA, 1178 bp, Homo sapiens
aattcaagctgtacccctccatggtcctacactctagagctaatctggttgggcagaaaggcagaaggatggtatattgtcccattgtgcctataatgtattttaaattggtcattccaccttacctaatggaaattcttgcagctttcctagtgctcatcagcggttttaggaattcactaacacccccaaaatttgttttttgttttttgctttttttccttttccttttctctgtgatatcatgagcctgtaaggacaaatggcatatttgggcataactgcttgactctgtaactacttttttaaaatcaaaattgaaaaggtattaattgcttctggctttttaatttttttttttagagacaaagatgaaaccagataggaaatacagtttttatgttttctacttactaaaatattagtttcttctaaatattactttatttgtatttcactaaattccaaagcaaaaatcagatatctgagatgaacaattttgaatgggttaaggtaggagtaataagcattgtgttcactcatacataggtgagggaattttatttatagcgagaaatataaaagtattttgacttactcttttttcaaggagtcgctaggaaagggtagaagaactgagaataagacatctagattccatttctggtttatatgtagctcttttgcctaatttatatataattttgtcataagataagtccagtaactgtcctgtcttagataacgtacagaggctgaagtgaccaaagatccattccttattacttttctaattaaaagaagagttagctagatttctagtagtagtattctagatattgataagacattattcctaatgccaactacaaatattcaactactcagaatgtatttaaaaaattgtttggtacagcattaatgttggtgattcctttctcccatcttatttcccttcccttctattctttcccatgtatttcttttgcctaaaagaatattggtatgattctcatttgctactttgagtatataactccatcagactttccagagttcttcagggatggagctcaaagtttacatttttccatatatgtctttttttttcttgacctttttccaccctgtaatttccccttgacttacccactgccctccccaatctgcaacagtga

SEQ ID NO: 459 - DNA, 1299 bp, Homo sapiens
tgctctgtggtttgaaagcagtggataatacgttaaacaaatgaccaggctatattccaataaaactttagttacaaaaatatgcacctgaaaaaaaaaatacgcacctggctagctttagtttgccaactgtgtgctaaaacatggataaggggctgtagattaaaatgtggaagccatttatatattttcaatcatgctaaattatatcccctgttgattttattgtagtaatcatttttctctctctcctttttcaaaattttaaaatgtcagcagtgatgtaccaaatggatcagccttgacacaagagaatatcagcctcctatcaaacaagaccagctctctgaacctgtcagaggaccctgagggaggaggggataataatgactcccagagatcaggagttactcccagttctgctccttaaaatatgaggagtcctacttttatcttctgctcctaatcagtttgtcgggcataggggtaggagaacgcataacttctaaactttttctcttaagagcggtcagagaaatccaggaaattcaccagaggcaatgtgcacaaacaccactactaaaaacaaaccctgcacatagttcacattaatgcatttttttaatttaaagaaaaagaaaattagcagtatctgcaagcaattcagattaaatttgtttttgttctgtgaatgaactttattttaataactttggacgccttggatccagggctttaaaaaaaaaagatattatatatacactctgtttgattaattgtatgatcttaatgaagtaggttttcttgtattttggtattacatacccagtgtataatttgtataattcctcacccccaatccttatcaattctcaccaccccataaacttaaaacagaccaaaaatgtcagctttcagagaattctgtggtgcttgagaaacagacagtactagactgagttattagaaaatgtgcagcaaaccaacttttcccagagctgttatttggaattctttatccctttctagatcactagcttcattggatacgtatatttttcttgacattgaagctttttgtttgtttgggagggttttatttcttgtttttattttcaacttttcaaatagaattaccaattttgaagtcctcattttcatattaaggatcatttgcattctcttaatataatcagaaagctgattcagtgtttaattagatttaaatgttgatcaagaattaactgtaacttactagcactgaaaatacatgtttggtgtttcgcctgcgttcagctc

SEQ ID NO: 460 - DNA, 1239 bp, Homo sapiens
taattttttgtgtttttggtagagacggggtttcactgtgttagccaggatggtctcaacctcctgactttgtgatccacccacctctgcctcccaaagcactaggattacaggcgtgagccacgacgcccggcagatagcatttctttcagtagaagattgtttgtttacattgaaaatctgtggtttaatgaagccacatttatcaattatcttagccagatcttctggataacttactgcagcttctgttactgtattagtacttactgcttcactttatacttacatgtcatggagatggcttttctttaaacctcgcttatcgtttgaatatttctcccctccaaaacttctgttgatacttaatttccattgtggcaatattgagaagtgtggtttttcagaggtgattgggtcatgagggctctgccctcatgaattcattcatggattaatgtgttagtggattatcatgggagtgagactgactcattgctttttaagaagagaaaggggctggatgcagtagctcatgcctgtaatccttgtactttgggaggccaaggcaggaggattgcttgatcccaggagtttgagaccagtctgggcaacatagtgagactctgtctctacaaaaactaaaaaaataactagctggatgtggttgtgtgtgcctgtagtgccacctgtagtcccaggctgggtgacagaatgagactctgtctccaaacaaaaagaaaaaaggaagagagacctgagctagcatattcagcctctttgccatgtgattccctgttctgccgttctgctcagtactctgcagagagtccccacctgaaagaaggcccttggctgggtgcagtggctaacgcctgtaatcccagcactttgggaggccgaggcgggtggatcatgaggtcaggggatgaagaccatcctggccaacatggtgaaaccccgtctctactaaaaatacaaaaattagctgggcatggtggcgtgcacctgtagtcccagctacttgggaggctgagccaggagaatcacttgaacgcgggaggcagaggttgcggtgagccaagatcacaccactgcactccaccctggtgacagagcgagactccgttgcaaaaaaaaaaaaaaaaaagaaagaaagaaagaaagaaggctctcaccagatgctgcccatttaccttgggcttctcagcatccataactgtaagaaatcattttttt

SEQ ID NO: 461 - DNA, 1212 bp, Homo sapiens
ggaaaaggactgacgttctccaggtctccatcagctctttgagaatacagaaattggactggatgaagtattcattatcttaaaagacacaacaaattaactcaaagcctagcagcttgaaacaaagaactctgatgatctcatgaagtctgtagtcaggaacccaggcactgtgtggccaagcccccagcgtcagagtctccctgaggctgcagtggaggcgtcagctggggcagtgatcactcagggctccaccaggtatgatcaactttttagctcgcccaagtgattgttaggcagaattcaatccctcttggagtcccagagtaagagtctcatttggaataaggacctcagttccttgctggctgttagctggaggcctccctcagtttctcgatatctgggtctctccatagggcagctcataacatggcgacaggcttcaatcgagctagcaagagacacttctgctttctggtacttcaaagcttggaagatgccactgccccctaacaacaagcaaaaagctgaacaaactgaataatcaactcttcttagaactctaagagaagtgaggacccagggacaaccactgcccccagaattggagagacaagacagatggatacagagaatcacaacttacctaccagagcagaaattcatgagcagaaatctctgtgggaactagtgccaagatagaaaaatccaaactgtaaatgataaattactgttggctgtgtgtggacaagtctgagagtaaaaagactccagggggacccagacataaggggggctccatccacacttttgtgaaacttaccttcaaaatctcgaccaggttctcacattaaatgtcagagaaaaatgccctcatgcttctggcaaagggagggagaaaggaacgattttgaaatgcacagagcaccctgttcttaacaaggccttcccttaggagaaactattcaaccagagcctaagcccctgagattttatcacagcctacccgacctgggggagggaaataccctactccagcaactctagccatcctgtcccacataaggtggggaggagacaagggactgagaagcacttgtgaagttcagaggcacaggctcactaagaggctgagactaaccacaggaccacagaatgccttccccacttcacccccccattactagaggtctgtttacagcagttcct

SEQ ID NO: 462 - DNA, 1235 bp, Homo sapiens
acaattgtcacacattagcttgttctcattataaggaattacagcagcatttaacagcgtggacaagtcttagaaacaaaatagacgaagcaaccacagaagaccatatttttaaattttatttaataaatgcttataaatcacttggtatgtactagacactttttttttgagacggagtcttgctctgtcacccaagcgggagtgcagtggtacgatctcggctcactacaagctccgcctcctgggttctcgccattctcctgcctcagcctcccatactagacacttttctaacattacaaatactattatttaatccacacatacaataaaatatgatttttaaagctcaaaaataggcaaaagtaggaatacagacaaatgtcggggaaaaaataagggaatgatcttaaagttcaaggtaatggttacttctggacaggaagcaaggagatgaagtagagaaggaacatacagatagatgcaacagtattgatgatgtcgtagttcttttttaaagtagtttaccccaacatattaaaatattaacatgtaaccaataaaaaagttaatagatattttacattaatttttcatgttaactcttcaaaatcttgtctattttatattcaaatacacctcaattcagaatagacccacgaaacagtagtcacatgtggcaagtggttatattggacagcacagtatagcgagtgactacaggcgagttgtcatctgagtttaataagatggaagaatggcaagaactggcacattagtaccccgctcaaatcccacttcttccttgaagctttctctgatcccatcagcaaggaatgacatttttttgcacagaattcttatgaaactcctgtttaaacttttctgtgctacttttttatatcttctattgctgttattgatgtacatatgccaacatccccgtgccatttccttgaggaatcttttagctctccttagggatgttgtagtcataagttgactggtctttcacaaatgtttattatgttgtttgataacaacaagtgtcacatgtgttgataattttttcttagggcaggagtctcaccatgttgcccagactggtctcaaactcctaagcagtctgcccgcctcagcctcccgaagtgctgagattacaggcatgagccaccgttcccggcaataatttttgtgaaatcacgattctcacacaaatatgaaatgaatat

SEQ ID NO: 463 - DNA, 1173 bp, Homo sapiens
aataggttccagaaaacatggttgtttctaactagggttaaagtttagctttctatatgaattcattgttggaccacagatctgcttaagtaaagagctataatcccaacctaaacttttctgagattttacaataattagatctttttccaagttaattgggttttcccttctcccagtcataggtggtttttatcatcaagacagactgatattttgtcaggatattttcttttacagtgtttgatgtgcataatgccagagttatttttttattattcattttctctctttttgttcaatatgagattcaggatcatatttgtttaaaaggtaacacatagagatgtatgtatatattttgttataagacatacaaaataattttaagagggataaaggtgaaaatatcagattctggaaattttaagtatctaaactttatacttgtatgatttaccataaacataccaaaacatttttctgaaaatttactgtcggtctctgacatgaaaccgtattttgtcagtagttgaccaagcagttttatgagaactcttctatgcaatgatgcatttaatttctaaagtaaatgttgaattattaaaaaaaaagtttgaaggtaagatgccttagaattttaatgaaaaatgacactcaaacaaaggctatatgtcgaatgttataaactcttgagacataatgaattttagcagtggcctagagtaaggtaatgctttgtgactgatatctactaatagacttctgttactttgggcctcacataaaatttctcacattcgtattcttagagaattttatacttttttattataagtattttgcccttgagtccatgaaacttcaatagaaaatattgcttatacaataattagcttaaaatccatccaaaggaaaagagaagagctttttttgagtgttaagttttttaatttagtattctgtttggaaaagatgttaagagttcaaatatgcttcttatgtaacagaaataccattatttctggggtttagtgacacaggctggagaggacaaaagtttcctgtcctgaatgatttttcaattaatgctctaagcttaacccatgttgggtaatagaaagacatagccagcagtattactacgtagaccttgcacatcttacttttgtt

SEQ ID NO: 464 - DNA, 1210 bp, Homo sapiens
gaggaaacaccttgaaaggacactcctggtatgaaatacgtttttttttttttttggtaaaatcctctatgggaataattatcaattaggggataacctgtgaaaaacttctctgagtggtttaagtttaaaagatactacactaaattgccagtattgatgaacacataagtgtctgttgtcatgatgtagttggcaatggggcaaaactcagttacccacctgaatgccataataggttgtttttgttgtttgtttgagacggagtcttgctctgtcacccaggctggagtgcagtggtgcgatcttggctcactgcagcctccacctcctgggctcaagcaattcttgtgcctcagcctcccaagtagctgggattacaggcacacgtcaccatgcctggctaatttttgtattttcagtacagatgggttttcaccatattggcctggctggtctcaaactcctggcctcaagtaattcacctgccttgacctcccaacgtgctgggactacaaatgtgagccactgtgcctggccagttttcaaggtcaggtttttgtatgtgtctaaaaaatctcgttggattacatcactataaagaagatgttaatcgtccgaggacagtgctaacagtttgtcttctcttttagcccgttggcctactaagaaaaatgtgagaacctcatatcgccatcaagacttttttcaccccaagtaactctaatggcctgtctggctttcacatctgaggggtgggaggtcactaggataaccagaattggattttgatcagagcagtttgaatgctctcaaaatgtgaagtgaaagcctcatctgtaaattggctcatacttgtaaaagtacatccagtctacatattctgtcacattgtagtggggaaggctgagaggtaccacatcaggaggagagtcaggagtggcagcagcaggagaccccatgtgagagatctcagtgggaagggcagtctggagagccagggccatccacagcagctcagaagcttgcgaactgcaagttcttcttgattgatttcttctgagtgaaaagaccttcagtttcaccagttgaacattcagcagtatgtagctgtcagaaataatgctactgaaaaccagactttcagactggcttaaaatcctgccatatactgcttataaaacacatacctgtagaatttcagcagaga

SEQ ID NO: 465 - DNA, 1211 bp, Homo sapiens
tctaaagttacgggattatatcttatattaattttgcagttttgagtagtatgataaaagaaataagaattcaaaccattaagtacctacctaaatactacatgtaaggcactgtgcttttatttcattcagctgaggtataagcagctgtactcaaatgttcttaaaaatgagaaccagtggggaaattgtttataatcattggaaatgaagaaattccaattggctatatctttacttcagcttttcttgaacaatttacagcattgattttcaaactgtgtctactggcacccttcccctttgtatcagagcagttctgcttttaactgttttatatgttggggttctctatgagatttcattggaacaaagagtttcactgatattcgagtttgaaaaccattgattaagtgaaaaaacatcttagaagataggaaatatgtttaaaaaatgaatgtattaaatcttatgagtaggaagatgaaatacaggtttattgtatagatacattatttatgaaggataaagatctatacatgaacagcagaatgtataagctagcatttactagcatgtctctgatgcttttgttcatttctgttaatcgtcatttctgtcccctctgcatggaattttatacttgtctagggtaagagtttgtagactctttcagcagaacagattttaataaccaatttatttgttttattttaaaaatttatttttgaataaccaatttaatagtaaattttatatgaacatttggcataactttaccagtttatttctatgcagtgatggaacattatgtaatgcagctcatttcttgaccaactagttatagaagtaccattaggttaaaaattagagaaatctaagagatgttatacttagtgagaggaagcagaaatggtgggtagattctcagaggttttgatgttcagtactgacggaccatgttctgtgattgtaagaaagattgaaaacagtttgtatggagatagagttgattagcatttgagctctgaaagcagaactctagtaaaatgatctcgacctaacaaagggtctgttccattatatagactattaccataatcctggattatttcaactgggttttggcctctccattatatgagatcatatgtatatagctaagaagtctgattaaagtatggaaagattttaggaaacactaagaagat

SEQ ID NO: 466 - DNA, 2333 bp, Homo sapiens
ttgacttttttttagccttcaaaaggatttcattcaactttctatggttagcttttaagaatattatctaaaaactgtgtaagctttttttttttttggatggattgaaacctattatggaaaggctgtcatcattaatgttatcccatacattatggggataccatatgtggcacccatttcacagaagagacgtacaagagatcgctaagttttaccaggttagacgtgattatacagaccttattattcccaaggcacacatggagtaaagaagaaatatagtcctaagaaattaagctagtcctagtataaatgatccagaattcttcctagtgccaacatatcagttggtttgaacccatgttaaatagtcatgggaaaacccatgagacatttcttatctgccttaactaacctgaataatttccaaatgcatgtttctaataataatgtgaacaactgcaaaacccatgagtcgtctgaagttttatcatttacaggtatgtgacgcattcccagactcttcagccaactgagcatcagcttcttcacagcaattgggtcctgattaatgtcctcccaagacagacttcattggatccacgatcaagaggactctgccaggtttttctgacccctctacattgctataaagtgccaaggccttaagacttgggtacgtgtgttacaacggcaagagtgccagcgccaacaaaagacccattggacctgtcagctcctctgtttcaccaagcagacacaataaccttaccaacaaagcagagtaagccaagtgcctctgtgtgacaccaccagcagctgatgacgcataagaaaaatataactaatttagactagagccctatctcttcttgagaagctgggatttgaaggagctatcctgagatctgtactgctagtaagtgactgataacattataaactggatcggtccctgagttcagagactgagttgcaattgagtgaaaaatagacaacgaaatcttgaagaattgcacggaggtgcaagccaagtttatttggctctccaaataatattggttgaactaagaaattggtaaacgaaacctgtaataggactggtgtttgggcgtctctctctgtcactgttgtctcttgctgtcacattgctgtctgtgttgtctttctaggtccagatgttttcagataattcacattgccctgattgtggacaacagtggttccctagtttagaactaggccactggttgtaccaaactgaacttgttgaaaatgaatgttaccaggtattcttagaccgtattaacagagctgattattgtcctgagtgttatcctgataatcctgctaatagaagccttgttcttccttggtctttcccacttgagtgggctccccagaatctcaccagatggacctttgagaaagcttgccatccatttcttctgggtcctccactggttagaaaaagaatacatgactctcgagtagctggttttaaccctgcattacagttaatcttgaccagaacagataaaaccttaaacaaaaaactgggccaaaacaaatagcttctataatagtcaaaattgtcaagtctagaggcttttgtgtaggtagcccaaggaagatggaaaaataattcatttctaagtctgacccagattgtcactactttgggaactgcttaaattgttggatctgcttccgtggcctatacatattttattcacatgaatttagttagtattccagccagcctgttcatctagactgaggctaatctgttcatctagactgaggctaatccgtatttcctataaactgttttggaactaacttaccactcctaaaaaaatttctgcaacctaatgagtgtcatatgacaaagtagtcctagaggggaagtcctatactgtgtgcttcatagtggtatttctaatgataacttttgtgggaaagcagcctcgttatagctggatcctagattagtccagtgaattttaataagaaattacactgttgtaaactcacctcttatgcattggtcagtgatgagatatatatataaatagatagatagataaaatttgctcttatatagccatttattcatcattggccctgtttggcccatcctcagtgtggctgtgagattattgataactggtcactgtcagataaatcacattctattaggaaacacctatataggttatgcagaaacatgcagaaatgccacctgtccatacttacgtggctttacataaacaaaagactgtcttgtctttgtggtgactgaatttacaacgtcctcccctggaaat

SEQ ID NO: 467 - DNA, 1199 bp, Homo sapiens
gtgtgacatcttgcaaataaatcgaacgctgagtgctaatgtgagtcctgggcctttctgcctcctgatgtacacccatcgccatcatagcaagagtgcttctggaccttgtacttattcttaaagactaccagtatggagttcataggacaatgtggtacacctggtattacagcctttgcctttcgagactatccactggattaatgggttattttcagtgggcagggttgcacagtgtaatcctacaccttttgctaacacccctactaggtcccagagggccagaaacacctgacttacctctgagtttagactagggtatcacttctttgagtctgaagtcaagtgagagaggtatagataaatgcatcacatcacttttgaaatgtaattctggtctataccatggaagtcataaatggacattatagtctctaaacagtattaaacccttaaccacttctaaaataggcaagctcaataatgtctgccaacttcacattctggagtttatttcatttctttttgaagaccattttcttccattattgtagttgagcagcaccaagtggactgtcaggctaacaggaataagtggtagccttgctttctgagcaccatctaaagaattttaaacctctgcattatgtttagtgttctctgtgtgggcatgaaaacaaagaaatgcccctactgaagactgggctcaaaggaccaatgcagggctggttcttttaccccttggtttactcctgcacttgtcttactcattctgaatctctaccagctgctcccagaatcacagatactcaggaccatctcaggcatccaggcatggcaaagtggaaataattcattttggcctgcaaaccttcaactcccatctttccccaagaagtcagagatgctgttacttgaatgatttaggaaatgagtgtgtgcaccaaagacaaaaagatattgtctattgtttgtgtgcttgttttgcgctatggaacattttttaatttattttaagataaattattaagttgaaaatgtgtgtccctattcagaagtgaaagattcatcttgtaatagttaaacctccatcttgaagcttctatggttcatagtctttgcacaggaacctgtggttttaacaaaccaatacacatattgaagaagtcattttaattcagtgaaacgaagatggg

SEQ ID NO: 468 - DNA, 1186 bp, Homo sapiens
gagaaagcacaaagactgagaggaatttgcctgaggttgcatagcaagtccttgaagggccaagaacctgactcccaacactgatttacccatcgggccagcttcttagcccttaaatctggtatttcctccatggtttcattacgttccaacaaacagagattcctccatagcccctcagtttccattttgcttataccagttaccactggaacttggggttttaactaatttgctcctggattcaagagcttcctactctaaagtcgaccagccaggcactgcagataatggttgcctctagaaggtctcatttcatttttaaaattcatccatgtcattttagcaaggggggaaacagctaccatgtagcaccttataccccataatagacttccaagcaacagaggagtgcctctaagagaagctaaaagtaatgaatgcccggcttttctccatttccaaaccccagaagagtcctgtcatgcaatggctcattagtggcaccagcccacccataatgctaacccaacctgtagggagatccatttaaaatcttagacctactgtggctgtgcttctaaacaggcagcagtgtttgctgctttctggggaggtggctctggaaaacaaagctctcctggttttcaggccagtgctctcaagggtttttccagctaaccagccctactgatgccaaagaactattgacctcgtcaactgctcactgagttcctcaagagatttattatattattagtataaatgaggaaggcctctccttccactattgaactgggaattagtatgattaacttacaaaaactggtcaacttacttacagtgatcttaaacagtgctacacagaggaggatgccccccccccttttaaaaagcctgctctcccccacactatactcaccaaaaacttcaagggcctctgaaatcccatgagttgctaagccaaatagtcaacctgcaacagtgatctgggtgggcagcttttcatctggttcattgcccagcagagccttttctcctgtgtattttaagcagcctgctaagaagggtgtatttaaaaagccatcctccaaaaagacgactgcattttcctttcctcacatggcatttgtgtcttcctccccaccccagtgttcatgattggagaattcccaatagcacagaa

SEQ ID NO: 469 - DNA, 1218 bp, Homo sapiens
gctctgttgcccaggctggagtgcagtggcgcaatctcggctcactgcaagctccacctcccgggttcacaccgttctcctgcctcagcctcccgagtagctgggactacaggcgcccgccaccattcctggctaattttttgtatttttagtaaagacacggtttcactgtgttagccaggatggtctcaatctcctgacctcgtgatccacccgcctcggcctcccaacgtgctgggattacaggcatgagccaccgtgcccggcccacaagaaactttttaaacaaattttcagttaaactgaatgagtagaggtttgacctaaaactaagatttactatagagttttttttttttagtttgagtgctgtgtcaattctagagactacatattatgtcctgttcatatctttctaggaggatttgcttcattcatagacgatttataggtttctgaactttatgtaccaaaaataaatggtcagaattgatgcttctgtaggagaccctcaagtcccataatggcatttatttctattataatcttttggggaatgccacgtgagtggcatttagattgaaaacatgagtacaattagatttatgtaattctctgtgactgtgagaaggatttttgtgaggaggattttgtacaatgaaatgataataatcagcccttgcattctgcaggatttaggaatgccaccctttaccaaagttaagtagaaaatattaagtgtagggctagtgagtctgaggagcacataagcacctgaagagaatttcatttatgctaagaagtttactcctttgcatttagctgtaaattgtataataaagttgcctaactaaggttttactatctcaactcccctaaacacatgttgtgttttacctggtaacagatatcctaaatgtaggtagaaattaattcacctccatgtactactttaggttatagaaatgcttattgggttctttcattgcaagcaactgaagttggatgacaaagtaaaatgggcatttattgaaggatgttatggtggcacatagaattgaaagaacagaatattcagatcaattcaaaagaaaaaagtaggtcaactttggtgctcccagcagtgcaatgcatgaacttatttgtggaagaatgtttctcaaattgtctgcagcaaaaaaaaatctatatctgtttttttttaactcaatatttttt

SEQ ID NO: 470 - DNA, 1200 bp, Homo sapiens
cagactgccatagcagaatactacagactgggtgctttaaacaacagaaatttgttttctcgtatttctggaggcttgaaagtccatgatcaagattcaggcagaattcgtttctagtaaggcctcttttcttctttgcaagcatttccccaaacatggcctatcctctgtgtgtgattggagtgagggaggcagagagagaaagagacagagagagagaaagagagagaacatacgtgtgtgttgggcgggggcagtgggggaatctctggtgtctctttttttataggaacattagttttgtgggattaaggctccattagccttaagtcctcatttaaccttagttgcctctttaaaggccctgtctccaaatacaagtcacattgtggggttagggctcccacatatgattttgggtacacagttcacttcataatacccatgtagcacgtagtagtcacttttatacagttaatatgtttatattccttatttgataataaaatacagtgatttttctataaaacttatattgatattggggtggggaaaactcatgtcacctaggctctttgtacctcagttttctcatctataaaataacaatattgggctcgttgatttttgaatgctgaaattctctgattctccaattcagagttactgatttctaacattattcagcaggtacattataggaaacatcttataatagaaattgatgttctgtaaatgagcattctataagcttctcataactgaagtgaaaggcttaatcattctatatactggtatagataatctatttcctgtggtcccagctactagggaggctaaggtgggaggatcgattgagcctgggaggttgaggctgtagtgagccatgaatgtgccactgcacttcagcctaggtgacacagctaggtgctgtctcaacaaacaaacaaacaaaaactctattcaactagctatgctgggctgtttagtttttattatgtataatttaaaggtctggatatggtatgtttctttttttcttccagttaataatatcctttatttatacagtataatttatcctttatgaataccttttcattttgatgggttcaaacaatttaataagtgaagatagcaaaatgtgagaatccttctcatacctactcccctttcaaaggaggtaaccacaacagattg

SEQ ID NO: 471 - DNA, 1213 bp, Homo sapiens
tttcaggggactggcaaagttgtgactgcatgcgaagtgcaggccaagaacagagcagcattagagcatcaggcacctaggcaggtgtaagatcatggccccgtcatttgcacgttctgccccttttctgcttcaaagggtgccataaattccatataactgtatcttggggaatgtggagtccctgtgagagctaatccccatgtcctgccttccagatcggcgccaatggtgtgccatagccatcctctttgcagtcctgttggttgtgctcatcctcttcttagtgctgtgacggcggggcctctgggtgcgagttcctcctgcatatgaaccgaggggaggaggagaagctgagcacgtgtgacattgccgtctactcacattcctatcctggaaacatactgctgcactgacttttctccgtgtgaccccacaattgacatggctcctccatcccagcgctggaagggccagtgggaagaggaaatagatgtctgcactcctggctgcagctggacaacagaagccccatgccgcctgtccagttcggaggagaactagctgctgccttgccttccgggacctcgtttgctgaggagggacttacagactccactggtgttttgctgttgctcattccatgcatctttggcagctcttttcttctgctcagacccttccccgtgctcagacagtgcaccgctgtcccatctaaagaaacctgtcaggaatacgagcttctgggtatgtttcgtttcccattgctgtagcatttcttatcccctgagagctgatgattattgaggacagaaggctcagaaacagtttgtgacagaaaatgcagtgtttcatttttcagggataaatgctaagataaaattgcttttccaggtcatttttttttgtggtaagaataactaatggaaaataatgaaacaccctggggtttgggggtgctaacaacttgtggctttaactgacaggagcaattaaaaagagcaagagggttctgcattggcatagcttagggaagggttaatgatgtcgccacaggtcagctcctgatccttgccgacttgatgttgctgtaccagggcttcctccccagaggtgcagcttgcgttttgagggtgattgctacatatgttgttgctaaacagctcagtaacacacttgaatgaatttggataccagattgtcctcattacag

SEQ ID NO: 472 - DNA, 2073 bp, Homo sapiens
agtcatatatcattatataaatatatatcgatatatatatttgtgacatatgtcatggtgacagggaaaagttgacaaattcatgcatttgaaaatcttttagaactaaattagtaacaatacaggcatgtggataagcttaatgcttatgagggggagaaagtttcaaatgattagtcttttcaacaaacagtaactttgtactgcttgtcgggcactgttctcaccactgagacacacaggtaagaagatgcagccactgccctcatgaagtatttgttctactggtatcatattttggtgcacttcattcttggctccatacctggagacaaggttggactgccatcttttctgtttactctaggtacatcgaggaggccattgagaaactaagcaagcggcaccagtaccacatccgtgcctatgatcccaagggaggcctggacaatgcccgacgtctaactggattccatgaaacctccaacatcaacgacttttctgctggtgtagccaatcgtagcgccagcatacgcattccccggactgttggccaggagaagaagggttactttgaagatcgtcgcccctctgccaactgcgaccccttttcggtgacagaagccctcatccgcacgtgtcttctcaatgaaaccggcgatgagcccttccagtacaaaaattaagtggactagacctccagctgttgagcccctcctagttcttcatcccactccaactcttccccctctcccagttgtcccgattgtaactcaaagggtggaatatcaaggtcgtttttttcattccatgtgcccagttaatcttgctttctttgtttggctgggatagaggggtcaagttattaatttcttcacacctaccctcctttttttccctatcactgaagctttttagtgcattagtggggaggagggtggggagacataaccactgcttccatttaatggggtgcacctgtccaataggcgtagctatccggacagagcacgtttgcagaagggggtctcttcttccaggtagctgaaaggggaagacctgacgtactctggttaggttaggacttgccctcgtggtggaaacttttcttaaaaagttataaccaacttttctattaaaagtgggaattaggagagaaggtaggggttgggaatcagagagaatggctttggtctcttgcttgtgggactagcctggcttgggactaaatgccctgctctgaacacgaagcttagtataaactgatggatatccctaccttgaaagaagaaaaggttcttactgcttggtccttgatttatcacacaaagcagaatagtatttttatatttaaatgtaaagacaaaaaactatatgtatggttttgtggattatgtgtgttttgctaaaggaaaaaaccatccaggtcacggggcaccaaatttgagacaaatagtcggattagaaataaagcatctcattttgagtagagagcaagggaagtggttcttagatggtgatctgggattaggccctcaagacccttttgggtttctgccctgcccaccctctggagaaggtgggcactggattagttaacagacaacacgttactagcagtcacttgatctccgtggctttggtttaaaagacacacttgtccacataggtttagagataagagttggctggtcaacttgagcatgttactgacagagggggtattggggttattttctggtaggaatagcatgtcactaaagcaggccttttgatattaaattttttaaaaagcaaaattatagaagtttagattttaatcaaatttgtagggtttctaggtaatttttacagaattgcttgtttgcttcaactgtctcctacctctgctcttggaggagatggggacagggctggagtcaaaacacttgtaattttgtatcttgatgtctttgttaagactgctgaagaattattttttttcttttataataaggaataaaccccacctttattccttcatttcatctaccattttctggttcttgtgttggctgtggcaggccagctgtg

SEQ ID NO: 473 - DNA, 1192 bp, Homo sapiens
gtattggttttgatttgtttcctctgatagtttagtatttggatagtttagtgttaacctcagctacactgaaggaatagaccttagtcctcacaagtataagttctagcttggaagcctgggttctgcagtagctgtggaacttaagcctgtgagctcagggatgcagaggcattgagttactaccaagggcctgatcttttctttagcaggcatctgtgttaattgtttcaaaaggtggtgatcagttttacagcctattataaaggagatttttgcctactataaaactaatccccctgaaagagtgagtaaacataactttttgtgtgttgacttccacaagggaaggagttggcacttacactctgacttttgattcagtcgtccttcttgagccatttttgcaggggatcagtttggagtgggcgttaacaatgttattctttttttcttctccagaacaccttccaccatgaccacctcagcaagttcccacttaaataaaggcatcaagcaggtgtacatgtccctgcctcagggtgagaaagtccaggccatgtatatctggatcgatggtactggagaaggactgcgctgcaagacccggaccctggacagtgagcccaagtgtgtggaaggtgagacagcaatgtggagtggagcacatgctgggtgggatctgcagaggggtgggcagcagcctttgactcagcctctggattaggcctctttcttctgtttgtaaaggttttctaaggcagggcttttcagactttattcagtcaacattaagctcctacactgcctcaaagcagagcgacgatggaaccctttatttcaatggaattgtgcacgtaggccagtgtattgaagaaaaactaagtctggtttatggagagttggcatggggcttagaggttgccgacctggacatccccacttagctggctctaaggcaccctcagaaaaccactgctctaacctgagaatgccatctagtttacaaactcttagaaaactgtgtttaatactcatatcactggcttctagatgtgaagcaaatgctctacaatggtttttaaataggactaatttttagttgatgccacttttggaaattcttaaactaattgcgtatccctctaggagctacagttagattatagttgtgaccttcatttttcagtct

SEQ ID NO: 474 - DNA, 1191 bp, Homo sapiens
tgatttgggacttagttaacagcaaagcttaggattaggatattcacaagttaataattgggtgcatcttttaagaggttatttgagactacttattagcacaagtcatcataaagctaaactacccatttactcttgttattcacattgcctatggaggaaaaaaacagtatttttttcttggtagtaataaaaagatctcctcttcagctttataggaaatgtaattatctcaggggaccttattttatgagcacttagagtaaaaaaaagtctttagtatagcttatttttccacttcatgtattcagtgttaaaacaagcacaaagaagttgtcattttttttttttggaagaatttaaatgcaatgtattaactaatagcttgtttatataatagggcctttagatgcaataaaaagtaattctggttcagtttttgactaggattataaactatcaaaaacagcttttgcattataaaggatagtacaaagacagtattaaaaatttctgtgccttgtttgtatacctaaacttaacacagccaaatttaattatcattgattctacagactctagaatcagaagaagtggatttaaatgctgggcttcatggaaactggaccttggaaaatgctaaagctcgtctaaaccaatattttcagaaagaaaagatccaaggagaatataagtacacccaagtgggtcctgatcacaacaggtttgcttgtttcattcttttccttctgtagtaagttaaggtggttttggatattcactgttgaatataatctatttttgtacgttgtctggttaattgtgtggattagaattgaattgttaaaagataacgttaatttgcacaagaataattattgatttgtgcagtttccatggttttcacatgagtgaattttagctgtgtaagaagttcagcgtaaatctttttgacatgctagacatttaagatgctcatttgaatctgaaaggcaaaagtcatgaccacaattgctggtttgtccctagttgatgtaaaagccagccaaaggtggtgattttttttttcaccttggtattgttagaggcagttactatttctttaatgggtcaggttagatacttaagctttgagtcccagaattagattgtattgcatctacatccacatttcacttaagccttgaaaac

SEQ ID NO: 475 - DNA, 1151 bp, Homo sapiens
actgtggtatattgtattgaagttacttctttccatgtataactcccacacaatggaagtgtatagataaatgtttgattgaatgttatacacagaggataccccaactggctctgggaacatgtataaaagacacctcaccctccttcaaggtctaagagagggaaacactgagtttgattaggaaaataaggttattgctactggaactttttggcatttgtgaagaatcagactagaggggtattaaagtagttttgaactatgaattagcaaatgaatttaggtctgctccattgtgaaagttgatagtacttaacctgactggattgtccctggcagaatattttctggaagactgcattcagatgacccactttgttcctccaccaaaagacaaaaagaagaaggataaggatgatgatggtggtgaggatgatgatgtaagtgaatttcatgaagaatttccattatgggcaaattgtcaatgcagagaaaaaaatgagttaatgtaacatgcaatgtattagcattacagcaaactttcttaaaaactgactgtaatgtctgcctttggattaattgatgtattttactgcaaaaaaattccaggttcagtgacaagctgttttctatcacaagttaaattatctctggcgtaaagatcaaaggaaaaagaagaaagaatgcgatgtttaaaggccaggcatggttagggacaatgctgttgtataaggttttgctactcaaagtttttcagtaggctgcagcatctgggaaactggtagaaagacagaatgctgtgccccaccctagatctactgagtcagaatctacagtttaacaagatcctcaggtgatctgtatatacaataaagtttaagaaacagcagctatagctttagctacaggagaccggtgatgacattatcaggtggacagagtattaaatcagggagcaatgagggatttcctaggagaaacaggaaagaaaagactttgtagtgcttgagagttggacgacgatagtatagaaatggattatctggaaatacagactgagacagccagcaatgcagaatttgctagaaaacctaagattatatctttttaatcaaaagatctgaagatgtaaatgaacagcagattag

SEQ ID NO: 476 - DNA, 1248 bp, Homo sapiens
gggaaatgatgacagtgttagtgagtacagtagtcctcccttaattatggttttagttaccttgtggtcaatggtaactaaaagtaggtggtcagaaaataggtgagtacagtacaatatattttgagagagtgagagaccatgttcacataacttattatagcttatgtcataattattccattttattattagctattgttagtctctcactgtgcctaatttataagttaaactatcataggtaaatctgtataggaaaaaagtggtatatatagtgtttgttaccacctgaagtttcaggcatccacagagtcatctcccatggataatggaggactaatgtacatgtaattctgaaaacagctttgggctaataggacttcatttatagaatcctcaccttgagataaggaggtagaatggaggtagagttgtgggaaggagaagttctacagcattagggggaaatatcagaaatctttagttactaaggttaagtgaagtgtctttggatttaactttttcaagtcataaagaagaaaaactttgcagaccctttgatgattagtgttttgttctcacagttcttgatggcattttcctactgttgtgtcttgtcttaaatgacaagcatgattctgaaagtctgttataactgctatattgcattaatattctcatctgtttcccaaaactctttgggttcttttctcagatcgcagaagttgagttctttttctttccttctccttcccaaagacatataatagtatttcagtgctgtgttagttgggatacagtataatggatgtgtctgttttactaatactgcctcttagaaaggttacgaattatttacttttgtatcaggtgatcacctaaccagattatctttgagatactgtacagtaatgagataattagtagtgaggtaatcaaaggaaaatgcaactggaagatggtattcaaagagaaaaatgagttaaagactgcttacttgaaattttttttattactggtgaaaaaagtaaaaaagcatagtgttgagagaaccaccataggataaatttggacattaaagagtgtcttaggacatctgcagaattttgtgtgtgtgcatacatacaacttgtgtaatatattatgaggtgaaatttttgtacttttaacatctaattctatgaaatcatattcctcaatttctgtttaagtaaccaaaatgacagtattataccttgtctgaaa

SEQ ID NO: 477 - DNA, 1199 bp, Homo sapiens
ctgtttctcgctgtcaagagggtgtaagtattccaccagcccgctgagtgtgcacgaaatgttcgcagtgcaacaaaaagaaaaatccatcaggaactctccgtccccccggggccctccggagggagagagagaggaactgctgtttatctcactcagttacttggtatcaccgcctctcaccttctccatcgtgcatgtccccagccacatgggaagtgaaagctgagaagggaaggcagatgggagaagccaatgggaacttctcagtccttttttcctctttggggaataaaataggaatccattaatgattgctttgctgactgagaatgtagttgaaattattcttaaacatcttttattattattactctcagtagtaaaatatcacactgaattcttccatacacaggtgtgcttctagtcagtgtgtagcaaggaaagccccgttcactgctcctgtgagaggttggtggtgacaggatggggaaccgacctcttcagccagtggaaatgttccataagggagagttcaaggcctgtcagaaggctctggtaggccttcctctggccaggagactccagcagggaatgcccttcactctgtaggtgctcgagccccaatcgaggatacagtgtgggtggtggtgctgggctggactagcaggtagactgctgtaggatttcaaattacgtttttgattcctgtacattttacagtcgcacagcaagcagtctcacagaaggcaggctagtccattcacagcctgacacgttctaataggtagaagctttcagtgtggttattttttctttggttggtttttgtgcccccattctacttcccaccctcctgccccatctccatcccttcttttacccaatgctgtatgctagtaattgtttttattcctaatgtgtgcaacatcacatctccccaagaagcaacagcatggggtccagcagttggggcccaaaagacagtctgaagaggaaggaagcagcagtatctgcgtagcccacagagggcccaggcccctgcccagctgcagtctcccagcctccactttcagagtgaaattcaaggcagcacggacatgtgcccatcaggcacagaagaaaacacgacgtcgtccattttggaagagacgaaagaaaggaaaataaactctttgtatgatatttattaggaggaa

SEQ ID NO: 478 - DNA, 1182 bp, Homo sapiens
ctatgcttaccacatccagcctgtattattgcaattgcctcctaattgctctccctgcttctaccttatcccctactcccacagcttattttctgtaacatagatgccaaagcaatcctgttaaaatgtgagtcagattatggcactgctcttaaaaccttccaatgtcttctcatttctctcagtaaaagccaaactccttacaatgcctgtaggccttacacgatctgtcctcccataacctctgacttactcacgtgcttttctcccaccaatccactccaaccacattgggtttttttctgttcctggaacacactgaacacacactaatagcactgttctttcctctgtctgaaacactttcctcagttatcccaagccttctttcacgtccttcaggtccttactcaaatgtcacattcatagtgtagactttctgaaattctaaaccctcctcatacagatatgtctaaatgttctgttatttattgacccaccaggaccgggcaggcagcattgtcttgaaggtgctcatctcttttaaagctaatgatatagaaaaggcagttcaatctctggacaagaatggtgtggatctcctaatgaagtatatttataaaggatttgagagcccgtctgacaatagcagtgctatgttactgcaatggcatgaaaaggtaagttatgaattataaatctatatgactggttcttttacaatagggaatgacaatgacaacctctctcacctaaataaccattttgatttgttgtacatttttgttattacaaataaaatgcatgaaaaggatagttcatatttatgtttactagccttggtcttaagagattctgattccaacacttgtgtttattcaacaatgattattagtaattaaacataatcttgaactctgaattaaatcaaaactttgtaaaagaaaataagcaatacaaatcaagaattctttcacagtgaccaaaaggtgaaaacaacacaaggatcataacagatgaacagctaaattgtggtacatacatacaatggaatatgattcaaccattaaaaggaatgacattctgacacatgctataacattaataaaccttgaaaacataccaagtgaaatgagccaaacacaaaagaactaatattttataattttacttatatgaaat

SEQ ID NO: 479 - DNA, 1243 bp, Homo sapiens
tgaggaaacaggctgggcaaggtggcccacacctgtaatcccagtgttttgggaggctgaggtaggaagatcacttgaggccaggagttcaataccagcctgggcaacatagcgagatcccatctttatgaaaagttaaaaaagtagctgagcgtggtcatgagtctgtagtcctagctgcttgggaggctgacatgggaggatcgcttgagcctaggagtttgaggttacagtgagccatgagtcactgagccactgcactccactctgggtgctggagtgagaccctatttctctctctctttttttttttttttttgagacggaatctcgctctgacgcccaggctggagtgcagtggcgggatctcggctcactgcaagctctgcctcccgggttcacgccattctcctgcctcagcctcccgagtagctgggactacaggcgcccgccaccatgcccggctaattttttgtatttttagtagagacggggtttcaccatgttagccaggatggtctcaagaccctatctcttaaaaggggaaaaaaaaagggaaacagaaatgaaagcttctgatctcaggcagaaaccaacccaccaaacaaaaaaaaacacacaagatcacaaaaccccgaatgtgcagcctttagcaccaaggccaacagtatagaggaaaacgatagctagctcattgtttcaaatacatatgcaattatggcaggtggatgtggagaagtatggaactagctattctctttaagacagagtgggaaaaaaacggcaggaatcattagctatgacttgggggaagctagatgtgtgaattttaatatgcagtatacctctttttgacttagaagataaaagattagaggaaacaactggttgctggctgaagtattcaagttgaaagacattgctaaaggtagagtattttcttagctcaggagaacaagactgtttttaggcaatgtactgtcagaaacatttagcatgctttgatccacagaatattacagtttagagagctcttgatgctacttaacataaaggtttaaatttacaaatgaggaaactggaccctcagctataagtgaccagccctgtggttcacccaagaatctagaagcagtgcttctttaccattcacgtgtatttgtataatagaaaatttgtgcttactcctgtttcagtaaccagtattcctgtaatcaagttatctccaccttgtagcagcaaa

SEQ ID NO: 480 - DNA, 1177 bp, Homo sapiens
ccgcatctggccccaaaatcattttatacagttggaaagccctaagatatttttctgctttcctataatctcttctgagtcttaattctgtacattgggctgatataaagtccagtgcacagaactattctggtttgctacttagtagctgcatctgtaggataattgtccagcttcttcctgcttttcttcttctctgaaataataatagtaactaccacagagttggtgaaaattgtacttatttagatgctgctactgcttcctctccctcccccttttaagttgcctaagttccacgtgggaatggtttttttattgatttgattcccagctcttagagagtatttgtcatattaggcatttaataaattctttttgacaaaatgaacaggcatttctatttttaaaaccactgatttttaagcaaaagacagatttaggggagttttaccttattacactttaatctctggatttaccccatctcatttctcttttaggaaaactgtttgtatgtggtggctttgatggttctcatgccatcagttgtgtggaaatgtatgatccaactagaaatgaatggaagatgatgggaaatatgacttcaccaaggagcaatgctgggattgcaactgtagggaacaccatttatgcagtgggaggattcgatggcaatgaatttctgaatacggtggaagtctataaccttgagtcaaatgaatggagcccctatacaaagattttccagttttaacaaatttaagaccctctcaaactaacaggcttagtgatgtaattatggttagtagaggtacacttgtgaataaagagggtgggtgggtatagatgttgctaacagcaacacaaagcttttgcatattgcatactattaaacatgctgtacatactttttgggtttatttggaaaggaatgcaaagatgaaggtctgttttgtgtacttttaagactttggttattttactttttggaaaagaataaaccaagaattgattgggcacatcatttcaagaagtcccctctcctccacatttgttttgccaatttgcacattaaatgactcttccctcaaatgtgtactatggggtaaaaggggtagggtttaaagatgtagacagttgggttttttaagggccctttttcaataactggaac

SEQ ID NO: 481 - DNA, 1206 bp, Homo sapiens
taaaatgaggtgtaccaaaagtagctgaaaaaagttataacctaaatagttgatggtcatggacccattaagaaggaaagctgcaattttaatcatttgattatgaacttcctgtgttccttctccatcaatcaaattaaaattgaactatattaagtatcaattaattataccagccagacacagtggcaatcccagcactttgggacgccgaggcgggagaatcgctcgaggccaggagttcaagaccagcctggccaacatggcgaaccactgtatctactaaaaatacaaaaattagctgggcctggtggtacatgcctgtaattccagctactcaggaggctgaggcgcaagaatcgcttgaacccaagaggcagaggttgcagagagccaagattgcaccactgcattccagcctgggcaacacagtgagactctgtctccaaaaaaaaaggaaaaaaaaaattaattacacctttatagagatctttcctaatgttctgatgtttgctttcttaaagcagaagcagtctacagccagaccaccctgaaggcaccccatctcgtctgatctcggaagctaagcagggtggggcctggtcagaacttggatgggaaaagcaaagcacaagacatatcatcctcctaagaaatgtcaggatctttaacatcttgtgaactttctaaaacttaatgatgtaagaaaagtaagaaagagattagctatcaatcttttataggaattaggccttaaaggggaaatatcctgagattcatagatatttataaaaattattaaaaaatggagttaaaacataaatataatgaaatcaataggcttcgattcttcaacataaaaacaagccactctctacttctttagttgcataatgctttcacctttttaaaaagatttcaagaactcttatctcatttgatttacaaagctgtctaggtagacagacatgtgggtctaaccattttataaacaataatcagatactgttaagatttacatgtggcaaaagcaattttaatagcaaaatcagaataagaatccagacctcctgaccattaaattctgtgttctcacaaaatctttaccactaagtgaaaaatcaaaatatcaccataataaaaaccaatgatgcttaatcaatattttcatgtttagtaagcaaatgtttccaaagtatataaagg

SEQ ID NO: 482 - DNA, 1270 bp, Homo sapiens
gctagagacatatatcacaatttgttgagatagtcctgcttcctacatgcttttctagtataaattattaacaatatcccctttcaatatcaaaagtattctggtttggacaataattatgcagtttctctaattagagagaacattagtggtttaaataaagtgtcacacagacctttgaaggacaacactttagaaaggctgaataaccaccatcgattactttgtatctgttgaagatgtttactggctttgaaaagaatctgaatagtagagtgagggaaatttacagtttagatgccacttacatagtggaaatgatgaacaatttgacacctgtgtcactgcctttttcaaatttaatcctttatagcctgaagtgagtcttttttctcgctaatgaaagctttttagtgttctaataataaacctaaataagcttgtatgtcacccgcacacatatattaggaggtgaaaagagtttagcccagtattctgttagagggatacagtccaccactgactatgaaactaactatcctcagtttgataattagacaaaataattcaaagaactcactgacagctactatacccatatatatgcttaattaaaggaaaaggttataaattaaaattagacaaaggaggatgaagtacatagggtgaaatctgagaaagtacctgttactttcccagcttcaatgtatgacagtatgcaagaggtatggccaagctcccacaggtttgaggttcagagattgattgattgattaattgattggttgatttcttcttagggacaggtcttgccatgttgcccaggctggacccaatctcctgtgctcaagagatcatcccaccttagcatctgaagtagttgagactacaggtgcatgccatcgtaccctgcgaggctcaaagttttcactggggcctcattatataggcataattgataaatgtctacatggttgatttaatctctaggtttactagtaccccatgattcaatgtctgtaccttaaatcacaccattggtctttctgatatggtcagtccccatggtaaatcagtgttaatatctgtctagtccaaaccaccaagggaaataaatacctcccaggagcgatgagaaaaggctagacctcttcctggcccaagttaaattcttttttgtttgtttgttttaatagcttttgtttttatcattttttatttttttatttgttattatactttaagttttagggtacctgtgcgcaatgtg

SEQ ID NO: 483 - DNA, 1914 bp, Homo sapiens
ctatctactaaactagctcttggggaaatagcttcaggatactgtagtttcctctatctaatagagaactttttgttaacagacactgtaaaatagttttgctttgttgaataatacgtgtgtacctaaaagaggtaagagcaaaaagtgtaattccacatcatgttacttgagaagtgcttaacgttttcttaaatgttttcattgggaaaggacagctttgataatgtccaaatactctgaaatgcactagaccatataactgtgatgaaatatgaaactcatctgtaaacttttataccaagggggtaaaaaaaaaaactaaggcatttgattaaattatgaatgagttttacaaattcctttcagagttttactaagatcacacaaataacagctttcttattcagtgaaaaagatattttatttctgatgttttatttgcacttgtggaatatgttaccattaatcagaaacatcatggcaacccctaagaatagactaagtttgtgttggctgagggattctatttggtttgcttttttttttttgctttgttatattttattgctacaaggggtgtgacttgataatgatttcctctgaattataataacatagccagatgtagtctcacactgtttttcatactcttaagtgtaaataatataaaatgtttcaagcgcttaactccccctcattcacaaagtataacaattaaaatctcaactataaccagtttagctttttccttacttttaaaataaaattttttacttttaactatttttttagttaatatttttaaaagtatacatgtcaatggcctctttgtccattattcattttgtggcaaaatattcttctttgatagtgtaaacaaataataaagcaatctaggtcctttaggtttgaaaggcaatttttgagtagcatattaccagctagccagtcactaggaatttttttcagtattatttgtatgtattaaacttttcattacactaaagtgcattattttattgagcaagtatccttcattgtgaggtttaacattaaagcaatctgttgaaatgccattatctttgctcataattttattatggccgtctaaggtagcttacacataaaacctgtttgcgtatctgttgttctctaaatattaattgaagatttactgaggatttgtaaggtccttctcgctgttatgtgaaaagtcaaactgtagttaatgtaaattatagccttttaggtgcttgggggttagagggtttatgttttttgggaaagggggactttagtagtctgaggatttctgtacatattttcttctgttttatgtgaaatttgggctctgggaataagaaaatattcctttcaaatttatttgacatattaatgctggttttgatatgtacccattccttcaaggcaactggtatcagtttttaagtgtgatttacctgagatatttttgttcagcaaagctcatagcaccctcacccccactccagacatgcattgcttctgatgttgttcacgtttttaaccctgtcaagcattgaactgaatatattagctacttttgacacattaaaatattacgttcagattgaatttaaagtttaaagaaactaatagaattacgtaatagttattgaattgtttaagtaaacccaagatcttaaaaattataacatgatcattttattcctaatagaaatgttaaatagaatatagtacaaaagtgcattaccttcagttgtgtactatttccataatacttttagacaaatatatctataagttaatattaaatccatcaaggatacaagattggatggatatgacctttctgaagtatttaggtaggtctaattaaatggactagggtaacatttaagaaagaaagga

SEQ ID NO: 484 - DNA, 1177 bp, Homo sapiens
atttttaatgaagaatttgcattaaataacaaaatgttagtttgtgtgaccatctcagacaaattgactatatggaatattaataaaatataatcttcagacattactaaaataaacatctaactacaaactttttatcaaaatttcagaatagacataatttaatcttttacatataaggggtaaagggacaactgtttgctgtgatttattgtactgaattttcaacaaaagttttctactactgtggctgcagtataaacttatgtatacacaactagaaaattttttagaaatagctattaaacattattatgtgtcatatgagttcaaaaaataaaaggtttgtgctcttttggatacattaaattctacctcagggttgtggtattgggaaacagtgcagatagtagtgtaacgtggagaaatagcttttttacaaaatatctaggtaatgaaataatctgtacaacaaacccccacgacataagtttacctatgtaacaaacctgcacatgtacccctgaaattaaaagttaaaaaaatacgtatctctctctgtctctgtctctctgtctctctctctctctctctctatatatatatatatatatatattatatatatatatatataatatatatatataataaaatacaattaaatcttgcaaaagaaaatttagatgattatcttttttgggagattttcccactcacacttctcaaatgttattatataatggaaaccacatataaatgttattgagcataatagtattattatctaacaataaaattaggccaggtgccgtgggtcatgcctgtaatcctggcactttgggaggccaaggtggggggatcacctgaggtcaggagttcgagaccagcctgaccaacatggtgaaaccccgtttctactaaaaatacaaaattagccaggtatgtggtgcatgcctgtaattccagctactcttgaggctgaggcaggagaattgcttgaacccaggatgtggaggttgcagtgagccaagatggcgccattgcactccagcctggacaacaagagcaaactccatctcaaaacaaacaaacaaacaaacaataaaattaaccagatttagtttgcatgaagcattaatagaattgttttcgtacaatctgagttgtgcaatttt

SEQ ID NO: 485 - DNA, 1177 bp, Homo sapiens
aaaggataaaattcatcttgcaaaagatttgtttttcttggtcattttttaaaagaatgagtatattatttgcttcctgaatttggagattttagataccatgatgagtaatatctatctttgctcatagctttgcaagatgaaaaaaataccattaaagtgcatatctcttacattaatctttaactaaaaaagtaggaagggatatcaattaaatattaacccaataaagacattgaggtttttttttgtatttaaagaataaaacattatttttttaagattatataaaaacgcagaataagagcttagtggatctaacaaaataaaattgactctgacagttcaccatgtctctcaaatatgaaatgattcaaaaacaaagttttgaaatttaaataaccattagtgttcaaaatggccctgttctcttacttgaacttaaagaaagacactagatttcaggaattagaaacttctttcagtaattactattggagagtctatatttttgcttaggttgctgtcagatctcaattttcctcaacagttcagaaagctttgctgctgtcagtctctccatataaacacatattaaaggtttagtctatggaagtggtctgtggcctctggaccccggaaagagttgagggctaggagtatcacactgaattctgaacgctaagttaaaagatacattctgtacgctttacacttcagcagattgaaagactctttcttagggaaactgaccaacccacgtggaaggccctaaaaatacagatgtgggagattctttaagtttgtaatccagccagatcaccatgaaatgcagcaataaaaagaatctcacccagagctttcagttaacttattagtcatttactctaagaagaagacaactaaaaattcccaacagaagtgaaaaagcttataatatgaagttcaggaagttattgataaactagagcaagaattcaaaacatggacaatgagtaaagaaaagataaaattagagaattagtctaggagttctaagatttgaatcacaagatttcaagaaagaggaaatgcatacaaattgaagaaatattactgtaataattctagaaaaatcagtagtgtgttagtttccaaatggtaagggttaccatgtgtccacaacagtgaattaaac

SEQ ID NO: 486 - DNA, 1210 bp, Homo sapiens
tatatatggcaaggaagtaaaaattatctgagatcacaacacctagaataaatacttttagcatttttaaagactccatttacaaattctctctatacacagacatatagataacatatacatactggtatgacctaaagtaatattttaatgactttttcctcatttgtaatgtttttgttgttttacttgatgatgatgcatctgctacttaaattctcttcttattaggtattcaggtagattccagttactctcctgctgtaaataatactgaaataaatattattgtgcatgttttctttcctcctagtgttttttttatcaatgagattaaattttcatttgaaattataatttggctgtcagctttggtttcactcctcattttggaggttatctacgaatgtgcagattagatcccacattctttttttttatgataaattcattttatgaaggagggtttgaacactagtttttaccaaaatatatacatttccttctatgtatttatccaacttaatgttaaggaaactggtaaaagtatgtctttccattggagatctctttgaaatttatatatgagatttgtaggacttttttttttatggattctgaagcctatttcacaagacatagtctagactgggaaataagtatgtcttttttaaaactcttatttaaattctttatgacatttcaattgcctaccaatatcacagaccaaagaaaatgccattagtttgacgtaagcagatttcttttggaattttaaaaatacgaagttgattgtattacaaatttcagatatacacattagaaaattatttcttttggaccctttaggaaagtattaatttcaccaaatctgctatactggcagtgtaaaagtcttaaactaactttattattatttttgtccattttccttcccctcgccccccaatccccaacaggccttggtatgtgttgttcccctccctgtgtccatgtgatctcattgttcaatgtctaccgatgagtgagaatatgtggtgtttggttttctgttcctatgttagtttgctgaggatgatgccttccaccttcatccatgtccctaaaaaggacctgatctcattcctttttatgactgcataatattccatgatgtgtatgtaccacatttttttatccagtctatcattgataggcattctggttggtt

SEQ ID NO: 487 - DNA, 1177 bp, Homo sapiens
taagaaacccaacctattttttttgcagcctaaaatcccatttaaggttaggggttggtccttatgccagcaagatttaaccaactgtaaagatagtagtctttgcatacatttaagtaattaaggcatttattgctgggagaataggagtagcaaaaatatggttttaaattggtgctttattaggtgacttccttttaggcgatggcaggtcatgaaataggtacactaataattttctatcaaccttaaaaagtgtcaaagcatctttgtagggtgactctaaactgctaattaagggttaataagtaattatcattggttgcttttcaatataattgcaaacaaattaaaaacacagttaaactaatatgtttataagcttgagttttcttcctaccatatcactctcatatatcagtgatgaaatgtcagattttgagcagtagctctttgacagtgtccttttatacccagtcttttctgcattgaatgctttgtgccttttcgatgtgttgtagttgcttagagttgattctgctggctagattgtactgattaatagatttttatttttatttttttttggttatgggtgttatgattgtgttgcctgctggttgggcaactttttttttttaggttgctttatgtttatataggcaaattggcactaagtgttagtgtgaatatttgtttttatgatttatatatcattttaaaaatctctgttgtggcctttatagttactgtgaagccactcttgggcctgtctctatatgcttattagaggaatctgacaagtaaaataaaatgagtagtgtgtctgcatctgtgtctctgtttctctgtcttttaaataaccagtaaccataactacacagccctgcactgaatgaccttatttcagtttgcctaaaactgaacaagaggtgatggtttgagatgagtttctcattaggagcagcaacatcccaaccaatatataatgagttgatcaactcaggaaaaattaggactttaaagaaggttgtatttggatattctaagattcagtgccaaatttaaaatgcctagaaatgtattctacaagtagcatttctaaaactttaagtagtgttatagtaaatgctacttgctgttagagtgaataatggataatgtgagaataattttc

SEQ ID NO: 488 - DNA, 1229 bp, Homo sapiens
aaatgttgagactgggatactagaaacattcatggttcttttcaaagatctgatagttatcctagtagttcttaaaaactcattcatcataacacagaaatgttaagaatgaactatcaactctaagcacttatttttttgcattgtctgatatcgacatgtcacttgcttgattatgggaagtactggatgactcagttaaatggaggcaggtgagtgaggtcaggaatattcctgctgaatggtgacttggggccaagaaaaatattagttctggatttgagtgttcagactctgccaagtatcagtcaccatcaagtttccatgataccctttcattttttaggtatcacatgtacatacagctcagtcaataattttcctttggatgggagtagtgttgctacttaaatatgattgatcctctttttttgttatttatgagctgtagttgtaatcaatgaaatgtcttattaatattctcagaatatttaaatggtacatgtaactagaaggaatattgagtttttgaataaccttgaagattgaaaagacactttatttcaggaaaaggaaactattaataagcttggacgaatatgcttcaactctagaattctgaaaaaaatcagaaaactaaaaacttctgaagctctatttgaaatctctcttcaaattggtaagcacatattttgatatttaagatttcatactgtgtcaataattcattttagggaaactttgatagcatcatggaattattacttggaagcataaagaggaagtctatttaaataatctttggaaacataaagaggaagtccgtttgaacaactagaatctatggatattcttggttaaattggatttacgttacattttaaattaaaagttgagtttgaaagattatgagattgaccagtctttaaatctttcttcattaagtatatatagaatgaagtatttttctttggtttaacattctttaatataattaattttttttctgcctaaagaccaattataaagtttttttgacaaaaattatgatcacaggtaaaatgcaccaatgatttttcttaaaaacatatttttaagcctcattaaaaaaacttttatattacacgttttaaaactatataattggccaagaatcagattaatgttttgaaatgtatattggtttattttaggtcaatttctgcaaaataaattttcaaagattaaat

SEQ ID NO: 489 - DNA, 1197 bp, Homo sapiens
ggagccccagcagaacctactcttcctggagtgcttcctttcccaggccccagggaggggcaggggccccatcctgcagatgctacagacactaaggcttccagcagacctggcacactgtgttcagctctgcagatgacaaggcaaggtcctcagcctgcagcacttggggaggcccagcctcccagtctggggaaggtaaggctttggggttcgttctttccatgtcagactttcaggatccaagacccttctggcttaccgtgccagatcttctctttttttcttcccactacaggatgctcgctctatggcagcagctgctgcatccctcgggggaccccgagcaaacacagtcctggagcgtgtggaaggtgcccagcagcggtggaagctgcaggtgcaggagcagcggaagacagtcttcgatcggcacaagatgctcagctagatgggctggtgtggttgggtcaaggccccaacaccatggctgccagcttccaggctggacaaagcagggggctacttctcccttccctcggttccagtcttccctttaaaagcctgtggcatttttcctccttctccctaactttagaaatgttgtacttggctattttgattagggaagagggatgtggtctctgatctctgttgtcttcttgggtctttggggttgaagggagggggaaggcaggccagaagggaatggagacattcgaggcggcctcaggagtggatgcgatctgtctctcctggctccactcttgccgccttccagctctgagtcttgggaatgttgttacccttggaagataaagctgggtcttcaggaactcagtgtctgggaggaaagcatggcccagcattcagcatgtgttcctttctgcagtggttcttatcaccacctccctcccagccccagcgcctcagccccagccccagctccagccctgaggacagctctgatgggagagctgggccccctgagcccactgggtcttcagggtgcactggaagctggtgttcgctgtcccctgtgcacttctcgcactggggcatggagtgcccatgcatactctgctgccggtcccctcacctgcacttgaggggtctgggcagtccctcctctccccagtgtccacagtcactgagccagacggtcggttggaacatgagactcgaggctgagcgtgg

SEQ ID NO: 490 - DNA, 1199 bp, Homo sapiens
tggtcaaagagccaagagaacatgtccactgcattgactcctgcatatgacactgcatgctagagtggagcctccctgacaacccgacacatttgggttcaaattttaactctgctactcactgagatgtggctttgggcaagttacttcaaactttgggactcagcttcttcacatggaaagtggatataacaaagaacttctggggtcattttcaggattaaatgaactaatgtacatgaaaaaagattacaataattcttaagattatttgttaaattaacatggatagaggttattttagatcctgtaatcctggctctgtctgctttctaagtgatctcaatccactatacttcatctatccatttactgaacaaatatttattgagccctaattctgtgacaagcactgcagtagatgctcaggatacaaccacaccagccagtgcaggaattttctgctgctctaaagtcaggagtaccgggctagatgacacccaaggtttctcctagcctccaaattctatgactttcatttactttcgctgatgcaacattagcctgcattattcttgggaattcttttgtaaggccctcaagacattgtcagatggggattaaaggctgcttctctgtgggaatctggggttctgtcttggtggggccttaggatgaagcagcatttgctttaagacacagatgtctcacagatatcactcctgattgactgtcaaaggtcctgggtcctggggagaggagagggtgaggagtttataagtttggtgttcttttgtcatttgcttgattcttccattcctgagttcttttgggggctaattttggaggctatgtctttcttacatattacagcttggggatgaaaggagacaattaactagatttgctgtgaatttacttccctcgcttttttcctgattcttgatggcaaatgacactcttagtgcaaaataaacccagcacactgagcccggtaaactgacagatcaagcacagatgtgaataaaagggcttttacacaaagggtgatgaccaaattgagaaaatggcttaggaatgcagcataaagggattagatgaaacccaaggaaggcagatcactgcaccagcagccggaatggatgattatgctgacagtacagatggtacgtgtctttacttaaatgacattaccagtt

SEQ ID NO: 491 - DNA, 1173 bp, Homo sapiens
tctagaggctatgttgtgaaggtccttggggtgatacagccttggaaaaatgttgtttccctgtggattacctaaactagatccaagaacatgaaagaccatccctcagggagctggcatttgtctaaaaaccagcattccctgtgccatttgattgtggttcttgctccactgcaaatgggtgacttgcaatgtctcactaatgccactcttgctctttcctccaggcatatctcacagatttcctctgccagtttgctcagcagccctgctacataatgttttcaggccaccttaatgacaatgagaggcgagttctacagaccatcggcatctaaaaaggggagcctttctacatttgctccttctgggccagccgcaaaccattttgcagccctcactggccttgagatgcactttcttctcaacctaaagtggcatcttgacccttggcccttggcctcggcagtgacactgatgacaattcagaccaggctcaccggtgccgtcacttaggaatgctggaacaaaggacatttctcaaagttcccctgaagacatgccatctctagaaccttttttctccccgactctacccccacctctgttcctagagccctctgctggcgagtccagaaacattattgcccagaaggattatgtgtttatggattattttgccccgcctcaggagcgcaggaagtcactaccatttatattctaaaacagacctatctatgttcataggacttctgatgtgttcagataggaatcctcatgagagatcattatgctttgtgccctggaccactgctgctctgggttctcaggaggaacaggcaagagcagcttcattctaagcctttccagtgacctcagccttgcttctcttctacaacactaaggctcctctgtcagaggaggtcgtcttgtttttgcttcattgcatgacataacccttcccctcaagctgttcctatatatacatgcacacacaaaataagccagacagatggcaatttgatcttccttttttagaaaaaaaaaaaaaaatggggaaaagggattttttttaaatccacctgacccaactatatttaatatgcctctcccacacattaccacagagtctgatattcaaaggttatcccctttccctcaggaagcctctaa

SEQ ID NO: 492 - DNA, 1175 bp, Homo sapiens
gaatcgcttgaacttgggaagcagaggttgcagtgaaccgatatcacaccgttgcattccaaggcaagactcaatcacacacacacacacacacacacacaaatcatggggagaaagatgaaacctgtgttcccctttttttggtagtgcccacatctggtgccccatttttaataaccacaggatatttctttagattgatattctcacaaagaagaaatagaatataggctgggcgtggtgtgtcacacctgtaatcccagcacttacggaggccgaagccagcggatcaccagaggtcaggagttcgagaccagcctgaccaacatgatgaaaccctgtctctactaaaaatacaaaaattagccaggcatggtggcatgcacttgtaatcccagctactcgggaggctgagacaggagaatcgcttgaacctgggaggcagaggttgcagtaagccaagatcgcaccattgcactacagcctgggcaacaagaggagcgaaactctgtctcaaaaaaaaaaaagagaaagaatataaagtgaatctgaatctccactcaaggggatggccccaaggatattgtagctggtaatttcttcatgccactaggtgtccccagtgttcaacctccatgactgagattggaagaagtagagttaaaagtttttactacctttgagaagcctgcgggcatgttcacagtcgtcccatgccagccaggttctgaggctaactgcttgtgcccctgctgcttcacatggcattgtgggagttgctgatactggggaaatgatggcagatctgaccaagtggtgctgagaaaaccaccctcggccttgcagactccatagtttatctcaaggcagtgccagtcggatttggtgctaaaggcataaggccaagtcagcctctgatattggcacaaaagaatggtctcatgccagtagcattgaactgctgagcttgggaaggcttaaggctcccacacacagactgagaatgatgggggtccctctgcgtctgctaattagacaaacattctatatctagtgccaaaagtggtcctaaatcctttggcaagggtcctttctgctctcatgctgatttgggggaggactgggcatcctgcctcaggagaacttgagtcctgaggaaagggccctagtaacac

SEQ ID NO: 493 - DNA, 1222 bp, Homo sapiens
agcttgtcgccaagcggttgtgtgatctcgggcaaatcgatccccgctctgggcttcacctcctcgtttctaagattccagggctggacccggtgattctcaggtccctgctggctctgacatgctgtggctctgtctctttcccagcacctgaattccgctactactcattcagggccatgtggcgcttgccagctctggacttcttgtttgtttttgagaaagtgtctcgctctgtcacccaggctggagttcagtggcgtgaccatagctcactgcagcctccaactccactcctgggttcaagcaatcctctcacctgagcttcccatgtagctgagactccaggtgtgcgccacccctcctggcatctctggacttctgatacccttaggtttggtttcttgggcctctctgctgccccagcacggccagtacttgcaggccttataagctgttctcttttctcctatcagacatcaccctacagtggcttattcaacactcgaagtcacggagaagctgagactccagcccttctccctcagaccagggaccgtcatcatctaaacctgaagccgagctccccgcccacccctgtcgtccccctaagcccacccctcctcacccagtgtgaggagggccctctggggaccccagagtcctgttctgctgaggtttgaactcctgtttttattgtaaaataaattgccccccattctggtcccctaacttctcacccttccccgctgcctttgtcccatcacccagccctgcctccctcccagcagccctgggccacagcccccgcccctggcttttccccggcccgctcttgtacctcccttttcaacactctctgttattgtcctgtgtgtacagtatatatatgtatatatattttaattttttaatttaagcaaagactaaaatcaaccatttgatgctgcaggggcctttcaggatctgggagggggcagtctggagagaaggagggagacgcaggtggacttggggcaagttcagatcagaagaggtgcaggctggcacctgcggcaggtaccagcctgggcactggtggccgcctccctgtcccgtgtgtttccaccgcccaatctggcttgtcctggcagtgcttgaatgccacaggctggcaggggcctctgggggcccctcccctcgacccccagcctgggtagagccaccaggtacgacgaccagg

SEQ ID NO: 494 - DNA, 1187 bp, Homo sapiens
tgacggggcgaaagtgcacgggccttcctgtcccgcgggtagagggtcacgggacggggcggccgagaggcttgaggagggggtttgggcaagcccagccccacccagagggcttaacccctccttgccggaagaggaagccccggccctattgagggggaggggaggtatcccccggggtagaggagtcagctgaggcccttggctcaagcccagactcctccccaacttctccccgacccgcagtgtctagccgggggtccagggaggatcgcatggtaacgggagtttggagactccgtctggctcagaagtttgcaggagcaggtgctcccgacaagagaggatgaggtgtaggggcacggcccactggggccttgggagagtggctctaagggctttgggtcgtcaacactgaagtgggtgattgtaagtctttcagcgccaggggagtggtggggaaggagttaaaatctctctcaaaaaaggggaagatgagctccatgggtgtgagctgaggctgccgtaatggctgcggcctgcctgtcagagccaggctagacagggcttgtgggtcgaggaagcatgggacaggggctggggttgtccagggacctggccccagtcccaaagctgaggtttcccacaactgtgagttggccagatagtaaccaaagatactgatgagataggtcagcagaggaatgtatccagccggcctaggtacctctacctgtccgtgttgttgccccaccttgcagaagatgggcctcctcgacagttctcagcgtcctagaaggcaggggacgtcacttcattggacctgaggcatgaaggcagatggaaagctcgaggggcgggcatcctgtggttacacaattgaacactggcttcctttcccaaacatgctctgcaaatgacctctgccctttctcgacccagtgtctcctgtctcctgacctgacagggcaggatcttcaggccaatgctgcggttttggcacagtaattttcggagctaacacccctgggctctgtctgcctaggctctgcccttggggtcagagaccctctggttaaacttggcattgacttaggctcttggattcccagagcaggcacataacacctggactctgacctgactctgcaggcctaggtggcttgggttctaggcgtttaggtctg

SEQ ID NO: 495 - DNA, 1220 bp, Homo sapiens
tcctttttttcccccctgaaaagctcaagtgtgcttgaatgtattctctttataagatggaaaggaatagaacaatatgctccctattttacaaatgggaatgctgaggccctaagagcatagagtcatttgcttaatatgacactctgagtcagaggcacagtagagaccatcacctaggccttcttttcctcctcattgaatttactgaccatttcttctattgaatttaagtattatccattcagaataaaggttttgactcaggggccagtccacagctcagaatgcaacagtctctatctttagggctttctgataactgccattcagtctttggattgcttgtgagaactatagaaaccaacaaggtcatctgattataaagggactgatttgacaggacagaaatggcaagtggcaagctgttggcagatagctctgcagaaataccagggccaggcagcagctgtcacaatagggtagtggttgggttcattttccaaagctccaagttttccttagcaacaaaatgtaaacaattcccattgctaatattagagtctaatagtgtctgactttgattcttttgtttttcctttagctttttctctctcacccaaccctgaattttacctcttttttaattgtgctctttcttttctttgtagaaatggttaaaaatagtttttctccacaataagctaaaattgtctttcccaaatagctcacattacatatgactctgctttgcttggtcaagatacagtgagtactggctgagtcatatataccacacttatggaccttcttcagtcccttggggtctttataagctaggtagttatacctactaatgtgaagctgtcagcagattaatttggcatcatctttggaatgttcaaaatttaaaccaagaatttaaactctgagttatggtttttaaaagtcatttgatttgttcccctgtgtccaagctaaagactggcagttgtcaattcaaaaaggtactcaaagaggttccacaaacgactccaatctttctccagttttgttctaaagtgattagttatctaaaagtctgcggccatgctgccattaccaagttttttctctactgatagaaataagctctctcttcctaagtatgaatattgaacaagaagagagtgaaacatatgtagcagtgggtacattttctactatattacaattctgga

SEQ ID NO: 496 - DNA, 1220 bp, Homo sapiens
cccaggagaagacatttcaaccacttctgagcactggcactttggccaacacaaacaacaggaggtcaggtgggtgggcaaaagagcagggcatgaggccagttaggagagcgtcaagtactgttccctgtgttctctgggtagccactttcctcccctgtgcttcccatcctcccctgacaccagcatcaccagctcagccctctgcagtggcatttagcctagaagaacgcatgcctgtggcctcagaatcgtaactttactaaacctttgattaagacatagggatgattcccttttattctgaatgtattgacctcaataaataaactcttagcaccttaacccagagttccccttgaatcctcctaagtcaggctagattgatggaaggcagagggagaagggagacaaaaatctgagattcaggaggttgcggggagggcactagccttagctcagcctccacccctactctctaaaaaaagatctctgcacagccttagacctttctactctcagttgcctcacgaaataatagatgtgaagtactttgaactacgtttaaagtgctgtgcccactccacttcctgggagatgtgggtgtgggaaacttgagaggagagccttgcgcagcttcttctgtttacctggtgttggaccgagcatcagcttgctctctaccacactaggaggtagggcggtgggggtttttaactccccaatttacagagaggaaactagaacttgaacaacccagatgacttgcccagaattacacaacacgcagacagtgagctgagactggaagctgagttttctgactcctggcccactcctagcttcttaatgtttgcgggaatgtgggaatgattttaacagaatcccattctggaacaactcaaactttatcatttaactgcagagcacccagatcccactattccccacctgtcccagaggccttggattttccatttaaacccatttctgaagaggcaaaacgatgcgggtcaagggatgtttgcctgatgaaagcctcaaagtacaaagtcccaaagtactgcagcttagtgctgctgccccaaactgaagtcttccttcccaggggccctggctctgcgcagagctggtcagaagcccaggaggagcgtgggggcagagcttccccaaaggaggacagatgggcaggctggcctcagtacccgtgctttcaacaa

SEQ ID NO: 497 - DNA, 1256 bp, Homo sapiens
tcgcccctgggtcgcggcctatcccgggaagtcagagcggatccttcagcttcgccgtaacgacccctcccccccacctcccggtcgcggccctcgccggggctggctgggagccccaggctcccgctcacttttcccatcctccccacccccaccccgttcaccccacccccacggcgcctgctcctttcccagccaaccttcctcccctcccccacatccggtgttcgctaatctcgaggagcccggagcagccccgaaaaccgactgttcccccgaatcccgaagagagaactgacactagattgctttcttcggggcaacagtttctctagttgagcggaccctcactgcctaaatcaatcagactgagtgccgggcgctgaatttacctactctcattcctctccagggtcccggtactttggagcttgtctcaaactccacatacagaaagccaccgaccttattccggtatcctacacccattccccactctcattacactcccacccctggccctcagcgtcggagtcaagagcaacagggacacttccgttctccttgtaggactggtgaaaccgtaatgaagaacacccctaaactcccataatcggtgcggattcctatggggaaggcctatattgttgacatcttccaggccttggttctggaccttgagaaagaggctgtggaactagagatagcgatgctttttagggtaaatgtatgtaggtattgggggaaggggagggatcaatcgaaaaatggaagtggtttaaagttcatatttcactttttgctatctctatagcgtacaacttgtgagttacttacaggctgtaaaagcttctcaagtctaaaaatatctgaaaactaaacttgaattaactcttaatacaaacagtactttgaaaatgcagcatttaaccttgttttaaaatttttttctcaaagcatttttttccagccactcacattttaaaaggttgtattacttttagttagaactgaaagggctcaactagcatttgctgtgaccagtatgcggagtctgtgttggctttccagaattgactttttgggttgtattggcaaatcacagtcctaaatgatgaatgttgaatgatgcactatgtttttgtttaaatgagatttcctgaaaatagttaatttcagaattaagggaaattgatgtcgctatcatgaggcatcataaaaatatgtattttacaaggtgaaggcatttcaagtag

SEQ ID NO: 498 - DNA, 1198 bp, Homo sapiens
aagtgggaaaagaataacacctactttgagagattaaaaggatttaatgaagtgatgtatatattatggcccttagtataggacctggagtatagaaggctttggtaagtgggagctgatattagtgtgatggctgctgtggaggtggttgttgaagtctgtcctggggtggggacagtccagcattcctgggcctacttggatttagggggctgctcctcctagggtcatgggcatggcctttatggggtatgggaaaggaggggaatcagcttcccggtgtgtggtggggacaggcactgtctcctataacacctcctttggttgctacgtgcagatttgctgtgcagcacgggtcaagttacttagcctctctgtgtttccgcttcctaactgaaatgccattaatcacaatgctctcacttgagaagagagaacattagaagggtcacatgagaagagtctagaatagtgcgtgggaatcttatccaggtgttggctatttgttgctgtgattattctgtttttggagtgacccccattcagtcaaagaagcaagggtgagagctgctgtcccaagtgtatcagcatagggacgtggggacgtgggggaggtggactggggcatggacctcgctatgctggccccagggagcagcctagagaaggaaagaaactgtttctcgaatgctagctgtaggtagggcgttcccaggtgtgactgaaatgacagtctggctcagagcacactgccttttcttcccaccttaactggttactaaggggacagttctacactacacaggattgatttctgtgaaatctatggaatttacatatagttttgaggggctgctttgaggcatgaagccaccgtattcacaaaacccagctgcgggtgaattgcaatttataataataaacagcctgtacctgacctttggaccctgggtgctcaggatgatgcctgtggggcctgacaggaagtgaaggcggtggcatgggtgtggggggccacccctccctctgaccatggtggcgggtggcatccaggcccagagaagccttgtcactggctgtccccttggcacccagcccagcaggcggagagggttaattgggatttggagtgtctgtggaaagtagcctcttctcaaatatcttgtgctatggtttggaactttggaatcaggcatac

SEQ ID NO: 499 - DNA, 1172 bp, Homo sapiens
gaggactttgacgagaagaggagtgaggcaggcagtggggagtgtgagtaacttttgccagcccctacctgctcccctatgcagcccagctggtgtagtgggtatgttcaagggagtgataactaatagctgacttttggcccctgattgtaatggcaaatctcattcacatgcattaactcccttgatcccagcaacaatcctgtgacagaggaggtattaatatttccattttcaaaagagggaagtcaggttcagagcatttcagggacttgtgtgggatcaagcatcgtgtgagtcactgagcctggactgaaacccaggtcttttgttttgaaatcttctgttcttttcctaaacaaagcttgggcaggtggaggccaaagggacctagtgagtggagaagtaggacttggatagggctgggatccctcagggtacacatctttggggtgcccagccctccctgcagcctgtccccttctcttgggggttatggtgacaattcagtatgtcttgcaggactgtagctctccagagggtaatgggtccccagaacccaagagaccaggagtgtcggaggctgcctctggaagccaggagaagctggacttcaaccgaaatttgaaagaaggtaggatgtctgccctagttagaagcagaggcctgaggcagggaggtgttaagacggttattcctcacccctttgctgtcttccagtggtgccagccatagagaagctgttgtccagtgactggaaggagaggtttctaggaaggaactctatggaagccaaagatgtcaaaggtgaaggcctgttgggggtgggggagatgtttgaaccccatctctcttctcctggtctggccacgcagcctggctctgtagggcagttcttggtacatacctatcctgtgccatctggctcctgcctggccttaggggtcatcaccatccctcgcctggaggccccaagcattaggtctcactcatcccatgcaggagaggcctggtaggaatcaaatcccatgactctgaatctgggctctcaccaggcacccttgtgacttcaggcatgtcattgccacttcccgagtctaaccgcaaaatgagcagaaagttccctttcactctaattaattctaggtcagttggacctcactaagtgagtg

SEQ ID NO: 500 - DNA, 1238 bp, Homo sapiens
tttagagagtttagtaaatactggtaacttatcaaacatgaaacagctgaagaacacatgttcttcatggaacatgtgtgaatggaacaaaaagaaaaggaaaggaaaatatttgttttgctttatcttgctaaaacaaaaaacaaaaaaaaccctttaattctaattaaaacctaaatgtagctacttaaaaggaagcaggccgggcgcggtggctcacgcctataatcccagtactttggaaggccaaggtgggcggatcatgaggtcaagaaatcgagaccgtcctggccaacatgatgaaactccgtcttttccaaaaatacaaaaattagctgggagtggtagcgcgcgcctgtagtctcagctactcgggaggctgaggcaggagaatcacttgaacccgggaggcggtggttgcagtgagccgagatcgcgctactgcactccagcctggcgacagagtaagacaccatctcaaaactgaaaaaaaaaaaaaaagaaaaaaaggtagcaacctatatggagtgaacagaaagagcttttcttcgggagcgcccggatagctcagtcggtagagcatcagacttttaatctgagggtccagggttcaagtccctgttcgggcgtttgtagttttcgttactttaacctgctaaattatcccatcaagtcccaagagcggacatcgtaaacccttacatttcaagttgaattcaaatcatttttcactgggttcagaatatgctagatagacgtgttttcagggaggaaaaaaaatgactgaaaagtcatttaatttcttggagagtatcgaggtctggcacagtggtttcccagaaaaatatttgttttttgatggctcataattgagaaaggaagaaaaaaacttaaaagcaagcaccttgtgctctcaccacaaaaaaaggtatgcgaggtaatgcataaccttatcagtttgatttaatcattcaacaatatatacgtatttcagaacatggtgttatacaccataatgtgtacaatttgtatttgttcattgaggaaaagagaacaagacgcccgaacagggacttgaaccctggaccctcagattaaaagtctgatgctctaccgactgagctatccgggctcccgtagacaacagcttgttctgccgtttcttacataagaatgaggacccttgagtgattgcatcatccacactgtgagactgctttaacgccaagaaagttcgt

SEQ ID NO: 501 - DNA, 1153 bp, Homo sapiens
aaaaaaaacaaaaacaaaaacaaaaaaacaacttggatgctttcaggcgacctattggataacctcaccatccttcctttctctcactttataccgcacagtgcaacccgatagcttcagaacagcatattcatagtctcttagacagattcatttttttctattattggataggttttagcactgatgcccattctgttatcaatggtaaaatagatcgaaggttattacagcacttcaaaagtgacacctcgccattcttttaatcctgaacctatttaactacaaataaaaaaagcctacctaatcatgcttactaggcgcataaatatctcgcaattctaaattagctggtgatgctggtgaaaggcgcagaatttgggccttctgtttttccttttacgcacgaatcacgaactttcttggcgttaaagcagtctcacagtgtggatgatgcaatcactcaagggtcctcattcttatgtaagaaacggcagaacaagctgttgtctacgggagcccggatagctcagtcggtagagcatcagacttttaatctgagggtccagggttcaagtccctgttcgggcgtcttgttctcttttcctcaatgaacaaatacaaattgtacacattatggtgtataacaccatgttctgaaatacgtatatattgttgaatgattaaatcaaactgataaggttatgcattacctcgcatacctttttttgtggtgagagcacaaggtgcttgcttttaagtttttttcttcctttctcaattatgagccatcaaaaaacaaatatttttctgggaaaccactgtgccagacctcgatactctccaagaaattaaatgacttttcagtcattttttttcctccctgaaaacacgtctatctagcatattctgaacccagtgaaaaatgatttgaattcaacttgaaatgtaagggtttacgatgtccgctcttgggacttgatgggataatttagcaggttaaagtaacgaaaactacaaacgcccgaacagggacttgaaccctggaccctcagattaaaagtctgatgctctaccgactgagctatccgggcgctcccgaagaaaagctctttctgttcactccatataggttgctacctttttttctttt

SEQ ID NO: 502 - DNA, 1185 bp, Homo sapiens
tgtgagttaggcgaatttggtaatatataggaagagatgacaaaaatagactccattatgtcctgcttggaaccagttttcatataaaaatttaaaagcttgatatggaagaacatttttagctatttttcactgttttttttcccgattatattttggtaatatattttggatatggcctgtcttggtctttgtcatttttatcaattttgatttttcccttgcaaatgagagctttgtccagccaacatggagaagtacatttctagggactaaacctggctcccgggttgtttgctgaggtcctttttgtgtggaaagaatggttattaccagggaaggttttccttttgttttacttgctatccagatgctgctcagactctcgctctcgcacaggatcacagtatggatattccaagtcaagaccaactgaaggtaaaatcaccacacggtgacttcttttgttgtacagagtggccccttctctgtacctatggatcttggactcccaagacctttccctgaatgtggtaagaatttaataagaaaggttcttgggagttcacagaccagggacagagtgaaccttctctgttctgcccataacagagttccagtctctgaacctttctttgggatgtagcacttctgatcttcagttcttccagttgcatttttctttgggtttgtgtgtacctgtgtgtgtgtgtttgaggatattgctttattagattttaataggcgtgttgcagttaagttcatgtcaggccatttcctaaagcttccccaaacctggggaaactttatagtcatcttggtacgtggcgagggtttcatatgttttctgaattatgcctaattttgtagtagactggagggtttatacagatagcctgtttttaacagtagattttggcctttgtgcagaggttttttttccccccaggtttgggattcttctagctttgctcacagtgggttgaggagaggtgttgcctttatttgatgactgttgtgaacttgagttctctttcttgtgtgtaacccattgtgttgcacactaactggtgagccagaatggaactgctacatcccctggtctcagttatttctactgcactgatggacacctttcccttctttcagcaaagtgcagaggaaagttccacttccagaaaaaga

SEQ ID NO: 503 - DNA, 1178 bp, Homo sapiens
acaggcatgagccacagcgcccagcttaaactattttcttggtctgtttttgattttcttttttccttgccactgcggtacagattttttttactcactgccactaaactaaagcaaggcatagtttatatgtgaagtgttcagagtttactgctataaggaaacttccaaatactgacatttaccttttagctgtagttattgggaccatgtgctctggttttctggagactgccaaattgctcccatttttctgcatcccacctggtttctttctgcatgtcccctttcactttcaaacctcttcatttggatgttaaattatatggtcacctagttataggtaagccttgttcgagttgatatcttgattgtgaggaaggatctgtgtcattggagcttgtttctgctgcaacgtgctgtagactatgaataatgaaatcacaccacattaccatcagatttcttgttttagttgtcaaattaatatttatgattgttatcttgggcgaaaagttcagagcagagatgacaaatcattagaacaacgatgaatttcagtattacggctaaaaagttcttctgtctgaatattaactcactctccttccagtgtacttcacagtaattggtatgcttttttatttaatgcttaaatcaaactttataaaaatcttagaccagatctttaatatggtatgccatttccccagtctaccaatggaatagtatgggtttctaatcctaggcttgtacaatggattggagttgagccatgccagcctccacactgccactaacttctgtaatgtaagattgagtcactgccaagcatttgaaatatgcagttgtgttttaattataatttatgtatagttagatgtatgtagtgcattgtgtggtattatttggtttgtaagaatttatttttaagggtcaaggtcatttgtaacattttgtgtgtgtcaattcaatgcaatgttggctgccttttgaagtctttgatatattggtgaatattcttctgatctataatacaaagctatgtaatgttacctcttgactcgcttttgaaaggaagacaattgttaactagatatttgagttttttcccctcagaattatgtgaatttctgatatatggctttagatactgtgaatctgttttccatttagtc

SEQ ID NO: 504 - DNA, 1244 bp, Homo sapiens
agtggtcctcaaccagaggccattctcccacttaagtaatatttaccaatgtctgcggacattttttattgtcataattaggggagtgctactggcatctagggagcagaggccaagaatgctgctaaacatcttagaacacacaggacagcccccatcacagaattcttcaatccaaaatgtcaacagtcctgaggctgaaaagccctggtctgcaaattggacagtctcaggcaattgccttgtggaaattttcctactctgttctctcccctattctccagaatacctgttccagacctgctccactctcttcaaactcttatcccaaccaccatctctgctgtatggctggaggctctgggaggccggtggaaggcgcagcagggcagaccggcggtgcttgggcgtagaaggggagagcagtccgaccgcaggcgagcagctcaggggtccccagtccgagccccacgaccctggggtggcagtgacgcctggagtcgggcgggcgtggctgggccgggctcttgaagaggcagccaggcaccaccattagtgtctacggccataccaccctgaacacgccagatctcggaaactaagcagggtcgggcctggttagtacttggatgggagaccgcctgggaatacctggtgctgtaggctttttggctccctccctccttttgtctccgagcttcccaactgccccctgactctgctcccccttttccgcccgcctgtgtaccccgcggtagcccaggacctcctcgtggaggtctgccgccgcagcaccgccaggcagcagcatcccacctcttccgcctcactgcagccccaccaggagctggcttcagccctggcggggcagacctggacctgaccccgaaagcgcaggcgcgggttccctgccatcagggtgtcttcccgttcccaggatgcccaggcaattcaattcactcatctctctctgtccatgctttcagcgacactaaactttctagttcttcccagatgccactgttttctcacctcaagaccttggcatgtttcctcctaactacggcacttttcccttcctctcctaactcctaaccttcctttaatctcagctcatctcttcccggaggttgttcagaagctcttggctacattacgtcccccttctgtatttctcatagcagcatgtagtctcacaacaaaacattcactatgctaatatttacatgcttaaccagtttccc

SEQ ID NO: 505 - DNA, 1383 bp, Homo sapiens
gcctgggcaacatggtgagaccctgtctctacaaaaagaatttaaaaattagccgggtgtggtagcgtgcacctgtagtcctagctgcttgggaggctgaggtgggaggatcacttgagcccacgaggttgaagctgcagtcaggcgtgattgcaccactgcactccagcctgggtgacagattgagaccccatctccattttaaaaaaatcgtcatctcagcctcgccattctgctttctagtatgtatgcgacacagaaaagtaactgctctctatgtcttagatttgtaaagtggggaaaaagttgtcatcaattgtgggtgcacttgggcattggcaggtgattagagaatgcaggttttccatccatgtgttgccttaacctctgggaggcacaagccccggggactagaaagggaaccactggttatacgtccagtggagatggccttgggccacctggctcctcagaaaacagatgaggtccccaccctcttctccctcttcttttttttttttaacagcagttcctggaaaacctagggtcagagggttgtatttctccttctctcatctctcccaggcctggttaggcatcaatcccttctctccttgttcagaacctctccccagctgatccctgggcttgtgcatggagtgtcaggaaggggacgcagcacaggagtgctggatttacagccagccagcccctgactgtgtcctgctcaccccttcccctcctgcagtgtggctgagaagcagcacggggcagagctgggagggcttctggacagcttcaggagactctgtggaggtgctggggacaggaggactcttatgacaggccccactttgagagcaggcaggaaggaagagagggccaagatctccccagtcgtgctgcaggtgaagtgaggagggtggagagatgacaacgtcctgactggatgcttccctgtggcctcatggtgttatctccaggctccagacagggaaaccagtggagttcagcccatcacctaagcgagagcagactctgaatgccctgtgctctccgtccactcccacaccagatttatccaacaagatttcttctctgccccagcataaataagcacccctgtttactctgaaggatggtgagtgaggggcccccccaacccctggctcttgccaagaagacagatcttggcagctgcccaggggccttggtttgtttatgtctgggagtctgctggttcagaggtgggtggggcgggctctgctgagagaggtttccaaacatgaccgctcagccagccggccgtgggggcccctggtataactgaacttgtaggccaggttgcatgggaggctgaaggggcccagacgggccactctg

SEQ ID NO: 506 - DNA, 1196 bp, Homo sapiens
gaggtgtgggcgttcttatccaggcctggggtgtccttcactcattcctaaggcagaaactacacagtggcactaaagtcaaacgggcaacagtccatcatggcccatggtaggttagggtaccctccaccgtatgtccaatgttgagacctctggggaaggaggggatagctctttctttcccacaggggcatgtttgattatatttgggaagtggttcctaaggtctcacttagatcttctttgctacagttgtctcatttcctattgcttttgttctcatcttcagaaatctttttgtccttcactatgactcagaaggcaggaagaagggtgtgagagacccagtttaccctgaacacagtctctaccctcagagggttgaatttcaatggagagagagaggatagacaccaacatacacacaagggcttatgaaggggtcacagtcctgaggggtcagaggacagagaggcagctggaggagtcagtccaggaactctggactggggagctgtcctgggccaaggcatgtatagagccctaggttggaagggacgcatccgacccaggagtatgcagtgtcatagctcaaaaggggatgagctggggacaggggacagggagtgcctattctgggagctgccaaactgaagcacctgccttttgtcttccagatgcctgtggcctgatccggtggctgttgatggtgaaccccacccgccgggccaccctggaggatgtggccagtcactggtgggtcaactggggctacgccacccgagtgggagagcaggaggctccgcatgagggtgggcaccctggcagtgactctgcccgcgcctccatggctgactggctccggcgttcctcccgccccctcctggagaatggggccaaggtgtgcagcttcttcaagcagcatgcacctggtgggggaagcaccacccctggcctggagcgccagcattcgctcaagaagtcccgcaaggagaatgacatggcccagtctctccacagtgacacggctgatgacactgcccatcgccctggcaagagcaacctcaagctgccaaagggcattctcaagaagaaggtgtcagcctctgcagaaggggtacaggaggaccctccggagctcagcccaatccctgcgagcccagggcaggctgcccccctgctccccaagaagggca

SEQ ID NO: 507 - DNA, 1199 bp, Homo sapiens
caggcagataaccaaaccgggttgatttagacagatgctggaatggtggtctcctgagagaatacagcaatgagattttaggattcaaatttaacaacagtgattgacagtcactagtgattgacaatcattgttttttcctataatttagggaactagctttatcctccttgcaagttgcttgttgcttaagacatttcttaagcagcgtggcatccttaagagtttggattctgggtccagattgcctgggcttagatcttagcttcaccgtttacttgtgtgatgttgtacaagttccttaaccctcttatgaatcagttttttcttacgtaaaatgaggatgcagtagtatctaccttatagaaatgtggggatgaattaatacatttagagcacttaaaacagtgcatgacatacagtgttaaataggtgttggctgttaatattatcacatatcttatctatattctttcagctcattgctatggacagtgctatcaccctgtggcagttccttcttcagctcctgcagaagcctcagaacaagcacatgatctgttggacctctaatgatgggcagtttaagcttttgcaggcagaagaggtggctcgtctctgggggattcgcaagaacaagcctaacatgaattatgacaaactcagccgagccctcagatactattatgtaaaggtagtacacatcctgatcttatactatacagagaacctccagacaagaacgattccttcttggctgggcacagtggctcacgcctgtaatcccagcactttgggaggccaaggagggtggatcacctgaggtcaggagttcaagaccagcctaaccgatgtggtgaaaccctgtctctaccaaaaatacaaaaaaaacgttagctgggcgtggtggtgggcacctgtaatcccagctactcaggaggctgaggcaggagaatcgtttgaacccgggaggcggaggttgtagtgagccaagattgtgccattgcactccagcctgggtgacagtgagactccgtctcaaaaaaaaaaaaaaaaagattccttgttttctgttgaggttatagataccaatttcctagtttattttaatccagtgtattttgtagcttcagcagtttggaattaggatacaaggtataaatgttccggctgaatctctaccaaatcttcttcttttt

SEQ ID NO: 508 - DNA, 3580 bp, Homo sapiens
agaaatgtgataagaagtacatccctgtgatcctgctgcttcgtagagcaccactgcacaccctaccccgagtgccaaccacctctgctataggacactattttcctggccctattcttcacttacttcccatcctgtccttgactaggaatatgttaaatgctgctcccatacaattcagttagctcttgtctttttatttggtccaacccctgctttactgctcatgctgcttaaagcaggagggactagagaaacaaggcattttaggaggcctgtgtgcagttgaaaaccgacttttacacgccttataaaagcagtcaggagatagatccgtaggtttgatccttcacatctaataccaggcgctaatgggaacaaggtttaaagggtcctggtatgctaataaattgaaaaattagtgaaatttaaacttctgcctttttttcctgccttttaatctagatttgcttcctcaatatcctactttgtggtttactaggaacatgcttactctgatctttttttaaaaaacacacagtggcagagtcatttcactattgcactgtgtgttaaagaatgaataaggagttttcagttacatggccaaaaatacaggacttgaacataaatagcagttggatcattctctttcatgacggttaaattcagaggtgtgaactttgtaatgagggtgttaaagattaatctatttgcctaaatgggtttgttcaggtatccatttttaacaaagaagtttgtgttcatatagtaaaagacctatcagtgtttccaccatgcacttctattttttaggagtttataattttaagtcttacattcctagtaacatttgggcttttcttaggttatgtttcgtgaagatttggggggagggctcttttaaaacttcagcctcagttgtttaacagtctctttaatatattaatctgcactaacatctctgtgatatatgcacatattttagaggtaatcatgtcttctagattacttgtgtgcatttgattgggcttcttgtttagggtcccttttaaaattaattcattagattgaaaaatgtattctatatttctgatagactggacagaaggatctgtgtccccaagtgagacaggctctgaataacctttgttttctccactttttattgatgatttaaaacactctagtcttcccctcaaatcatgcatgcaaataggaggacagtggtggtgactcaactggatacaggtgctcaatagtcaggcttgatagtgatgtcaggacgcattacaagctgtaagccgatactgactggccattggcaccatccttgactaaccttcctctttttctctagtgtgcctatggtgaaatggcaatagcattcactgtcgtattttgcagtgctcaggaagtgggacgttaactttgaaggtgcttgtttgtattagctctgctaggtttacctctacaacgtagatttcagcagctatgctgactgacactacattctagttcttaagattttttttccagatccccccttccccagctagacatacgtagcatactttcatcttattcagtctttctgtaacctgctgctgcttttagtcctcctcacctcagatcggaatcaatggagtgggcccagaggatacattttaattccagtaatggtaggtagatttgtcctgctttctaaaacatctcctcatttcatatttccactccatattgattccataagggaaaattaatgggtgtttcctcctttagggaggtaatgcaaagagtgtggacatcttctaatcttgaggaacagtagttgatttcccttgaaggagcttacatattgactgttttcacaataacctgtttgccccagttcaatcctcattttaatacttaatttggtactggctcaaatagcattttcttacagataacaaatcaagagtgaaatttgaggttatactccagtaaagtttttaacacttgtgaatatggtcagctagactaaacttgactcttttttttaatggcttttttatctgtgaacattcagataagtggattttcaagtactggttggggatgggaatcgtgcttttctttaaacttcagtttacgagatgctttgagagcgttaggcaaaagcagaaataaatatcaggagcaacggggaaagctttataaaagatcatggtggccactgttgcagctttgaagaatgagtgctggcttgaacagttctttgcctgcatcattggtagctgcactgaaaggaaaaaactttcaccttaagaatttgaaaaggaagaaacctgggctctggtcttcatggcatttagactgagatgcttaaacagaacagaagtaatacgcatttcctgccataggatagggaaaatgtaacaagctggttgctcttgaggttagaaaattgtctgtttctctgtggatgaagctggatttacttgaaaatggagagttggcttattgtttgaatattgggacatcaagctatctatagccaagtttcagtcgcaaccagttttccctttgtctggggtaaattcgatacaaaatgattctttttgaatcctgaatccataaattacacttttttttttcaaattcacaaaattcacagtggtgctgactgtgtaataaccactattgggaaacatcccgtaaacctgcctgttgccatgccaatggagtgactgaactggtgacatctgtttgagcatgctttgtgtggctggtagaatgccaccgttgtgcatacactttgtacatcaggggtgaagggagggttttctagattattgggggagggtaaaattgggatttttttgttgttccttttttgatggggtgtgggggtatagtactcagcttatgccctaaaataacatgtataaaaacccctgaagtattgtgtgggtgtgtacgtgtgagtgtgtgtttgtatacatctggcaattaaagctttgtcttctggaacttagtgaattcttttctctttttcctccagaagtatttgttacaagatttgtaaataagagctctacttagtttgtttaccatgaacatgttgcagcaaaccttatgcatctaattcctacaaggttaaagaaaggcttttagacttgccaggttaagcaacagccaagttctcagtaattgtttgccttgatttatcttttagacttcattttgccagctctaaaactcccagtcttccttgattttagtccttaatcttttatgttctgagcaggaagggtaaaagacaggaacctgcttcactgtattaactagtccatgggctgagaccggggcatctcttttcttcatactgcaatgttgctagatacatgatcagacaccagagggttgggcattcttgcaataccttaacagtgctgaaatctgcagcatggtactaaggaagttaaagtttgaatgtaaccactttatttaaaaggtttttttctttaatttaaatgaaatggggttgaagtgaacatgattttgttgaccatgttcgtgaattacagatgcaaca

SEQ ID NO: 509 - DNA, 1418 bp, Homo sapiens
aacaacttttatcataaacaactgttagtttaccaagcaattaaggatgttgtgcatattctatagcatggtgcttcttctttacaggtattactgctaacatcatagagtgttggtaaaaactgatgggaaatactgtagcatagtgtagtaacttatgaccagtttagaaactgagatagatttacctagggatatatgtgctcccttgtgcccaccttggtttttagtaagttgcatattgtctttatagattttattcttacagattgttgtattttgtagctgacttttattaaagacatttttttctcttcccttccccaaattatttttctattttcagtgacgccaagtccagtgaaaggcaaagggaaagtgggtcgccccacagcttcaaaggcatcaaaggaaaagactccttctcccaaagaagaagatgaggaaccggaaagcccgccagaaaagaaaacatctacaagccccccacccgagaaatctggggatgaagggtctgaagatgaagccccttctggggaggattaaaagtgatgatggtctggggagagattttattaaaaaaaaaaagaaaaaaaaagaaaaaagagggaggaaaaaaaagaacctacttaagatagaacatggttttggctatggcttgactcatgggctttcagtgcttttttccatttgttgaaagtaacatttctctctctctctctttttttttttttttttttaaagcaaaccattgtatgtgtaagtgtttaagttacctttttgtctattggtctctttgccagccctcccctttcccaatgaaagccatgtcaaattaatcactggattgactgcttcatctttttatttttaatgaaaggtgtaccacggttgtaaagcaataagatttgagatgaacactattgaaacttcgctttttgctaaaaaatagcaagttgaatagtaatcaaaaaacatagaaagattttagttcaaaatgattgctcctttctctacctggacttttaaaaaatcaattgtcatctaatatgagtttatttgtctatagacacaagtatcaatgtctaaaaaaaatcatgactttaaacttccaccgatgaggcaggtaggagataaagatgaattctgaactgttactaaaagtactcattttttaccttgtagggagggtgggcaatggggttacctgaccttatttgagggtatgggctttcttttttatttcatcacttgttatctcaaagagactcggagccagtgatccttttatcctgctacagtctttagggagctaaaaaaaaaaaaaaagcaggggctgccaaaactcttgatttcatatttccttctctaaatatatatgtatcctgttttttggataaaattttaccaagaatcca

SEQ ID NO: 510 - DNA, 1324 bp, Homo sapiens
ccctgagggttaatgccgaagccagggtaaggggcttgtaggtttaaggtcaaattttttgaacctaaggaatttccctccaattctgtagcagccccgcagtgacgaatctgctgcctctcccacgggttttgctattagaggattttcaaggtgatcaaggcagacgagatgaaacaccattaaactaacactgagcaacgctgaaccctacataaatctttttttctagtctttctaagatacgaccccagacgaatctgcaactctggagtggaaaccagggggcgggctaagcagcgaccatttttgttttgcggccgtgcgctctcagagcatcttgactaacaggacccccacggtgaaggtggagcctatcagagagcagggcggggcctggaagacgtgatgattcaaacggactaatgatctgggcgcatctggcagaagtctccaatgagcaggcgtgttggggaggagcgcacaaaccctagtgggtttggttgcacggcggctttggcgcattttcggctggtttgattcatccattttgaagagacgggggagcggggggctcgtctgttccaggagccctgaaccaaagagcagcggagtttgagaagccagcagctcggggttcggcagcagcggtcccatcggctgaagttcggggggggtggggcgccgagcgcgcggggtggggggggtcctggtctttggcttctcgactcggtcctgtttcgacagcgaacatgtcgcggcctgtcaggtcagtgcggagtctgaggcctggagcgggttggagggggatgggggcgagtggtgaaaagagtgggggacagaaggctagagtccgccatccccggtgccgcgcgcggcctcctccctttcggggcccgcgcgcacccttgagcgtggggggccctgctggcgcgcgggggtggtggctgcgcgcccgtgcgcgcgcccctccccgccccgcgccgctgcagggctccggtctgctcagctgcctcccccacccaccgcactagagcgggcggggtgtccctgagccgccagcggccggagggggaggggtgtgaagtcagcgcccccaagaggccccacctcctcggggccgtccccttggagccagcgcggggaggcgggcggactcgagctccactccccaccttcagcgaggaggggcggaggcacccgtattgccccttcccccagcgactggcgcgggggtgggggccctgagccctctctgtagcggacgggggtgttcctggcaaagggggaggggcagcactgccaaccggccccgcctctgtcc

SEQ ID NO: 511 - DNA, 1238 bp, Homo sapiens
attagctttgcttggtttcatactttatataagtagaattgcacagtatgtactcttttttgtttggtttctttcaatattatgtttgtgagatttattcatactgttgtgtatagttgcagatcgtaggaatttctcttgatctttgtaactttggatcaattaaattgtagttgattagagacatgcccagggttgttgaatggccaatgattactatcccacagggtgaataatctcttttctccctcccttggggcattcccatgtaggcagaaaactcttaaattaggagctggttggcagatcataaaaatagattgagccaagcaccatggatcattcctgtaatcccaacaactcaggaggtcaaggtgggaaaatgcttgaggccagaagttcaagaacaacctgggcaacataacaagaccttgtctctaaaaaaattttaaaagttagctgagcatggtggcctgtgcctgtagccacagctacttgggatgctgaggtgggagtattgcatgagcccaggtgtttgaggatgcagtgagccgtgatcatgccactgcactccagcctgggcaacagaacgagaccctgatagtttgaggatgcagtgagctgtaatcatgccactgcactccagcctgggcaacagagagagaccctgatggtttgaggatgcagtgagctgtaatcatgccactgcactccagcctgggcaacagagagagaccctgactcctaaaaaaaaaaaattgattcattctcttttggctgggtaaagagcctctctgctttctagtaatgggcaaacaaacattcttcataccacaccccagttttttaacctcttttgtttagagtgtcgttgcacatgaattagaatcctactggttaagatatagtatcagataagagtcctaaggaatgtcctcagccattctgtagttacatgaatcttcccggggatttgctttgtgctatcagaggagatgccttttccaagtgaccctttctcttgggcctagctctgctcttaactctgagaccttggacaatgacttctttctgtgcctcagttccctaaactttaaaaaaagagtgtggtctatgtgatctccatggtgccttccaaattcaggataccacagttctgtgacgataaggggatcctacactgggggcttccttctggttgttaggttacctttgttaaattgtgataggtaaattgt

SEQ ID NO: 512 - DNA, 1211 bp, Homo sapiens
ggtgaaaccccgtccctactaaaaatagaaaaaattagccaggcgtggtggtgggcacctatggtcccagctactcgggaagctgaggcaggagaatggcgtgaacccgggaagcggagcttgcagtgagcggagatcgtgccactgcactccagcctgggcaacagggcgagactctgtctcaaaaacaaaaacaaaaacaaaaaaaaacaaagaaacaaaagaaaacttttgattcccctagaactactattaaataatagcctactgttgacccgaagccttactgattacatagttgattaacacatattttgtctgttgcgtgtattatatctttattcttgaataaaataagctaaagaaaataagcatcgttaagaaaatcactttgagtaggctgaggaagaggaggaggaagaggaagggttggtcttgctgctgcagggctggcagaagtggaagaaaatccctgtataaatggatccacgcagttcaaacctgggttgttcaagggccaacagtacttagcagccatttagcacagagcactgccagcccccctcggcctgcagcctgctccagcaccttgctaagaggttgctgaggctcacctgcagcagctgccctcccgagtcctctttcctttacacccctcagagcacccgggccagccatcctccatgtggtgcagcagaggcgccggtggtccgggaaccagagtgggtggccctggcctggaggcacggtgggttagtgtgtgacacacgtggctttcccccgacccccagctgcctcctgggagtgaagaggaggtcttatttgccaacacataccgcaccacacacccacaacacacttggtgccagaatcagccttttgcatcgctcttggcgctgaatcagagtctgtcttggggagggatgtcttccttctctcattacatgcgcccagcttaggtggtgtagtgagggagtgtacagggctgggatgccacagcctgctttcctccccgtgtcctggggtcccccgtctgtccagtgcccagagctattaataacaccttcattgaaatgggtgtaatggaatcccagttgccccccccagtgggactccaacacatggggagtggggagcagaataataatagcaaacacggatgcagtacttattacgtgccaagcgttattcttagttatttacatcatgca

SEQ ID NO: 513 - DNA, 1589 bp, Homo sapiens
cccaagtctcttcctcctatcctgcgggatcactggggggctctcagggaacagcagcagtgccatagccaggctctctgctgcccagcgctggggtgaggctgccgttgtcagcgtggaccactaaccagcccgtcttctctctctgctcccacccctgccgccctcaccctgcccttgttgtctctgtctctcacgtctctcttctgctgtctctcctacctgtcttctggctctctctgtacccttcctggtgctgccgtgcccccaggaggagatgaccagtgccttggccacaatgcgcgttgactacgagcagatcaagataaaaaagattgaagatgcatccaaccctctgctgctgaagaggcggaagaaagctcgggccctggaggctgcggctctggcccactgagccaccgcgccctcctgcccacgggaggacaagcaataactctctacaggaatatattttttaaacgaagagacagaactgtccacatctgcctcctctcctcctcagctgcatggagcctggaactgcatcagtgactgaattctgccttggttctggccaccccagagtgggagaggctgggaggttgggaggctgtggagagaagtgagcaaggtgctcttgaacctgtgctcattttgcaattttatcagtaatttgacttagagtttttacgaaacctcttttgttgtccttgccccactcctctccaccagacgccttcctctctggatactgcaaaggcttgtggtttgttagagggtatttgtggaaactgtcatagggattgtccctgtgttgtcccatctgccctccctgtttctccacaacagcctggggttgtccccgctggctcacgcgttctgggagctcaaggccaccttggaggaggatgccacgcacttcctctctcggagccctcagacatctccagtgtgccagacaaataggagtgagtgtatgtgtgtgtgtgtgtgtgtgtgtgtgcacacgtgtgtatgagtgcgcagatctgtgcctgggatcgtgcatttgaggggccaggggcaggcagggctgcagagggagacggccctgctggggcttaggaaccttctcccttcttgggtctgccctgcccatactgagcctgccaaagtgcctgggaagcccacccagattctgaaacaggccctctgtggcctgtctctattagctgggttccgggaggcagagaggagtgaccgggcactggcactgcgatcaggaagactggacccccagcccccagggcccccctccccccacttagtgctggtcctaggtcctctgaggcactcatctactgaatgacctctctacttccccttcttgccattattaacccatttttgtttattttccttaaatttttagccatttctccatgggccaccgcccagctcatgtaggtgagcctgggcagcttctgttggcagagcttttgcatttcctgtgtttgtcctgggttctggggcatcagccagctaccccttgtgggcaaaggcagggccacttttgaagtcttccctcagatttccattgtgtggcctgg

SEQ ID NO: 514 - DNA, 1179 bp, Homo sapiens
tatgggctttgtatgaattatggatgcacgagagcgtccaaccatctggatctaacaaagatgtcaaagtaaaggatgaaattcactattttatgggagtgaatttggttaacttcatatattcctttgaagacaaggactatttcttttcttaattttttatttttatagatttacagtacagagatttcttaaaaaactaaaaatagaactcccctttgattcccactattgagtatctacccaaaggaaagggactttttcctaacacaaacttaggatatgttgtgttctccaaagggaatgggaagtggtgatgaagattaaaaaaaaaagtccttactaattttgctttaaacaagtctatatagtctgatttaaaaataaaagtgcatttgccatgtatatttttcatatatatatatgtgtgtgtgtgtgtttatgatcatttttcaaaactgcaaattgcttcatggtttattgcctttgtcaatagttctcacaaggaactcccaatacttctatacggcgactcaactctttctctctatcccatcattttcctgcctttttgttttttttttttttttttatgtttgtacctttcttttaagtcctctgtcatttctttgttagatcatctggccaattgcaagtcttctcactcaacctccctgtttctttcctctaatccctttaatttatcttgtgcatgtctgccataatgatcttaaagcataataattatgtcattcctcagcttaaaaacaaacattcacatcaaaaacaagcacttttattccccaaggagtaaagtctatgaatttcctaaacttgacgtttacatcccactcagacacatctgtaaactgtcccttccccatctcagacattcagccaaattggaatattatctattgttccctcaacatgccctgcatccattctgcagtgtcttcagtatacctagtgcagatgcagtctcctctgcaaagcccactccctccctccacttggaatcaatctctcttctgagctcacagcttctgcagaggccaatccttactgtcttgtgctgtaacatttgtgctcaggggtttttttgttttgtttccactccaggctgtcatttccttgaagacatggatcccataacatttattctagtgctttatgaca

SEQ ID NO: 515 - DNA, 1197 bp, Homo sapiens
cactgacctctgcagcctctctcatctgccagttttgattccgcaaggagaggtggccctgggctcacagctggtgtttgtccacagatgttcatgggtttctttgtgttctctcattttttcaaagctgggtgttgggaccaacatcaccactgacattctgtggctctaaacaagtcctcacgaccacttctcagttttctcatctttatgaagtatggagtaatccccactagccttatagagggactgtgtgagaagggaagagactgctattgtttgccctatatccacctacttccctagttccagaacgctggactttaatgagataacaaagtacctagtaaaaacactgcatcattttccatcccccaccccttgcagtaaaatgtggcccatgagacagaagcactaactactgagcaggacttctaggggagttctttaaaactcagaggagcaccacttttaccttctgctcttccctttttcctgcctggaacgcagaagtgatggctgaagctcctgaggctataagctctgtacgtaggagagtggtgaagaaaggagcttggttctgcaaggatgttgtagagctgccataccagtcctgcatggtattcctgtgcactactgttacgtgaacacacaaacacctaatttgtttaagccattaggccaggcctctattagccattcctgactgatacagaagacaaaaatggcatcacagactcctgaactccaaagacactgcctattctttcgtctgttcttggcaagcaccaacattgagactgtacttcagggttgatgctggccatttggtggcgtgaggagtgggcactcacatgtctctgctagcagttctgacgtgtccattccacactggatccatagaacgagggaacacaagtgtcttctcataagatttatagaaacagtgatcgttgcagaaaaataattagcaagagaacagacttcagctctctgaaggctgatgaccacctgtttctcatctcttctagtgtatgtcaaagctaaattaggtcaaataggaaataagtcagaatccccaattcgatagaaacttacaggtcttgtgatctaatctgccacttgatccgtgaattacctataggtcatccctaagaggtggcctccagcttctgcttgaattccttcaaggatggg

SEQ ID NO: 516 - DNA, 1184 bp, Homo sapiens
tcatgtgaggtcagtagttcaagagtagcctggccaacatggtgaaatcctgtctctactaaaaatacaaaagctagctgggcttgctgacgcatgcttgtagtcccagctacttgggaggcttgaggcaggagaatcacttgaacccgggagatggaggttgcagtgagccaagactgcaccactgcactccagcctgggtgacagagcaagactctgtcgcagaaaaaaaaaaaaggagttacagtgtccatccaagaggtgtgatggagattaaatgaaatcatgtacaaggagcagtatgacacgttcaagtcacactcaatgtccttctttctgtgggaaatttcatgcacatgaatgatggtaaaaagaagatgataactatgattatgacgcttatttatacctcaggaaaaactgtataagacatgcccttgtccttgggcagcacagccgtcaccagggaggacctacatggaataacgggcggcaatccatgcctgccgggcacaggctataactgatgggccagggcaaggaatggcttttcatggtcagggacttcacaggcgtgagcacgcaagctgggttcagaaggacgtggagatttgggcaggctgaagggaagggacattcacgtgaaggcaagggtgtcgcagaggtgcagagtgggagctgaactttgcttgaagactgaatgggacttgcttgttaggaggtgttgtattggtgtatgtgcttccaggacaggcccagtgggaaacaggttggcaagggagatagggatcagattacatagtgatcaaaatctggtctgaactaacaatcagtctaccagagcctggggtaggtgctgagccccaggccccaccataccctgtaccctccattctctggttgcaatggcctgcttagccctctgtctctcctggactgagtgctctgggagtgagacagggatgaaaccctgtttgctgctgagcccaaaattagtgctgtgtttgagggaggcacatgtggtgtgcctagaggctgaatgagagggtctcttcaggacctccagacagtgagcccctaccgcagcaccatgcccagtccctatgggcacttggtaaatgggaatggaatggacacatgtgcccaggggtgactgttctaaggccgacggcagcgtctgtagg

SEQ ID NO: 517 - DNA, 1242 bp, Homo sapiens
attccctggtatatatatacaccacgttttctttatccacttgttgattgaagggcatttgggctggttccacatttttgcagttgcaaattatgttgctataaacatgcatgggcaagtgtttttttcatataataactttttttcctctgggtagatacccagtagtgggattgctggatcaaatggtagatctacttttagttctttacagaatctctgtactgttttccatagtggttgtactagtttacattcccaccagcagtgtaaaagtgttccctttccaccacatccaccccaatgatggccattcttgcaggagtaaggtggtattgcattgtggtttttatttacatttccctgattattagtgatgttgagcattttttcataagtttgatggccctgtgtatatcttttttttgagaattgtctattcatgtccttagcccactttttgatgggattatttggttttttttccttgctgattttaaaactggaaaagttcccttgtcccccttgcagggcgtgcgatgagggtgtggcttccttcttcaatgccccggtgctcagacctctacgggagcatacagatgggcaggctgtagggctccgaccccacagcagtgtctgggggtgaatgtttatagctcctgaagccccagtgggcgtgtgttacagtgtgctcttttagttttgctgtctataggcggcttgtgttaaccagctctattagacccctgccttatcgcaaggacagagggctttctgtatcccggggttcttgccttggtgtaccagaagactcggatcacatgtgggcttggagaatttgagtgcaaggttccactgagcagaagtagctttccgcggatgggggagccagaagggaaatggctttcccctggagttgggcccttggcggccccagttctcctccgactgccccgaccaaactgcatcattccaccggttgatgccctgctggcctgccggcctgcctatgcctgtcagtgtgctcttctgccagcgtgcttctcaacgtctgcttgacgaccagccacttgtgtctttctctgcccatgtgttcctcacaacatccagccaccatgtgttcctgctagggtcttgggggtttttataggcacaggatgggggcgtggcaggccaaggtggtcttgggaaatgcaacatttgggcaggaaatgcctgtcctcacctaggtctgtggggatg

SEQ ID NO: 518 - DNA, 1193 bp, Homo sapiens
gaatttagggactttgtatggctttcacttctgatcttcatgatcctctcctctttttcagtaacagtaacgagtagccagagtactcctgccaaagcccccagggcaaagtgcaatccatccaattcttccccgtcatccgcagcttgtgccccaagctgtgctggagacctccctcttccttcaaatactcctacgttctctattaaaacctctcctgccaaggcccggtctcccatcaacagaagaggctctgtctcctccgtctctcccaagccaccttcatctttcaagatgtcgattagaaactgggtgacccgaacaccttcctcatcaccacccatcactccacctgcttcggagaccaagatcatgtctccgagaaaagcccttattcctgtgagccagaagtcatcccaagcagaggcttgctctgagtctagaaatagagtaaagaggaggctagactcaagctgtctggagagtgtgaaacaaaagtgtgtgaagagttgtaactgtgtgactgagcttgatggccaagttgaaaatcttcatttggatctgtgctgccttgctggtaaccaggaagaccttagtaaggactctctaggtcctaccaaatcaagcaaaattgaaggagctggtaccagtatctcagagcctccgtctcctatcagtccgtatgcttcagaaagctgtggaacgctacctcttcctttgagaccttgtggagaagggtctgaaatggtaggcaaagagaatagttccccagagaataaaaactggttgttggccatggcagccaaacggaaggctgagaatccatctccacgaagtccgtcatcccagacacccaattccaggagacagagcggaaagaaattgccaagcccggtaagtcagcagtggtgggaagatacatttcctaacttaaaaggggccagacacccagatgtctcaagtcaggatgcttttttttttttttaaagaaagaaatctatttattcctagtgctgccaaattcagcacataaatacaaaacaaattttgcatgggccatatttttagtaaaaatgttttatgctaagaaactatttttgtttgtctgaaattcaaatgtaactgaatgtgctgtattttatctggcaactctacttactcccattaaaatccctcctgtcagggtccatact

SEQ ID NO: 519 - DNA, 1308 bp, Homo sapiens
cctctgttgcttgtcccccaggagtcggagaagctggaaagtgtgaatgctgaactgaaggctcagattgaggagctcaagaacgagaagcagcatttgatatacatgctcaaccttcatcggcccacgtgtattgtccgggctcagaatgggaggactccagaagatgagagaaacctctttatccaacagataaaagaaggaacattgcagagctaagcagtcgtggtatgggggcgactggggagtcctcattgaatcctcattttatacccaaaaccctgaagccattggagagctgtcttcctgtgtacctctagaatcccagcagcagagaaccatcaaggcgggagggcctgcagtgattcagcaggcccttcccattctgccccagagtgggtcttggaccagggcaagtgcatctttgcctcaactccaggatttaggccttaacacactggccattcttatgttccagatggcccccagctggtgtcctgcccgcctttcatctggattctacaaaaaaccaggatgcccaccgttaggattcaggcagcagtgtctgtacctcgggtgggagggatggggccatctccttcaccgtggctaccattgtcactcgtaggggatgtggagtgagaacagcatttagtgaagttgtgcaacggccagggttgtgctttctagcaaatatgctgttatgtccagaaattgtgtgtgcaagaaaactaggcaatgtactcttccgatgtttgtgtcacacaacactgatgtgacttttatatgctttttctcagatctggtttctaagagttttggggggcggggctgtcaccacgtgcagtatctcaagatattcaggtggccagaagagcttgtcagcaagaggaggacagaattctcccagcgttaacacaaaatccatgggcagtatgatggcaggtcctctgttgcaaactcagttccaaagtcacaggaagaaagcagaaagttcaacttccaaagggttaggactctccactcaatgtcttaggtcaggagttgtgtctaggctggaagagccaaagaatattccattttcctttccttgtggttgaaaaccacagtcagtggagagatgtttggaaaccacagtcagtggagcctgggtggtacccaggctttagcattattggatgtcaatagcattgtttttgtcatgtagctgttttaagaaatctggcccagggtgtttgcagctgtgagaagtcactcacactggccacaaggacgctggctactgtctattaaaattctgatgtttct

SEQ ID NO: 520 - DNA, 1249 bp, Homo sapiens
acataaagattagcttgccttgtattttcactggacagcgctggtctaagtaattaataagacccagctgacattagcatctatttctttctcctctagcgtttctcgaactggttctacagtagcctggggcaccgttaattctgccaaggcctggcgtgggatctttctgaatcctaagatcctgggtgttgggtaagaggatgatgagtaaagaactggctaactggtcccgtacccactgcgcatctcgcagagcgggctcccgaatctcctccggcagagcgtccccgagcttttgcacgaagcggccgcacagttgtagcatttcggtcacagcccgcttcgaggtgcagcgcacccgaaagtcttctcggggagtggcggagaccaaggcctggctctctgtgccagccgcgagctccttgtcccatggagggtcaaggaccaccaactcaggagaccccgccatttttcgtcggaactgtgggcggggcactctgggagcggaaaagcgggttcacactggtgtaaccagcatgcatccggctggaaactcaggacgctgcagctgaaacgttccggctccggctctgctggccggtctaaagcggcagccgccggggcgcaatgcgagcggctggcgtaggcttggtggactgtcactgccacctctccgccccggactttgaccgcgtatgtgagggcgatacgggaccagagggagcagggaggcccccgtcctttcccctcgtgttatctttgctctcctcccttgggacgaaaccccatatcccccgcccagacccttgtttatggccatatgaccttgcccctcatttccctattccctatttaacctcagacataccgatttttttttcctgattcagtagcggtaagctatctccacaaggcttttgtttgctcttctgagttcctggaatcgttccctcactccccttggctggcctgtttttcccctcggggctctcacctcctggctgagatgccactctttgtgggaagcggtcctcgaaacgcgttcaaatcggggagaggtcgggcgcgggctcacgcccgtaatcccagcactttgggaggccgaggcgggcgctgcgcatctcctgtgtccaggagatcgtgaccagcctgggcaacatggtgaaacctcgtccctacaaaaaaaaaaaaaaagccggtgattgtggcgtttgcctgtggtcccagctactcgggaggctgaggt

SEQ ID NO: 521 - DNA, 1230 bp, Homo sapiens
attaaggcattaactctgtctacaagggaataagacaaagctaaacattttctcatagggcaaggaaggggaataacaaacattgctggagacataaaaaagtcttcataaaatataaattaattgagctaagacagaattgcacgtaaaatttgggagagtagggtggcattgtttgtgtatgtttacctacaatctgcaggaaactattttcaaagcacaattttgttattatttgcttgcatcttatttttctatatgccattgcaattgcttactacaactgatccagatctcattcaccaaaatgggaagttagttggacaggacaaaacaggaagaagaaacatcatctaaaaccaatgctgaaccactttagagaactccaagaatgccagcaacagacaaattcagggcagcaacttccctgaagaaagcatcaggtttataactatttaaaaacattgcagagtgtctcctttcaatttctccattccttcttcctggtcttttcatcttccgtatactctgcaatacaaatgttccttttacattgggaggccatagcagaggatcacttgagcccaggagttggagatcagcctgagcaacatagcgagaccccgtctctaaaacaaaaattaaataaaataaaaaaaattagccagcatggtggtgcgtgcccgtagtcccagctactcaggaggctgaggcaggaagttcacttaaacccaggagactgaggttacagtgagccatgatggagccactgtactccagcatgagtgacaaagtgagagcctgtctctaaaagataaataaataaaataaaatgttccctttacagtagtccctctcttatctgcagtgacccacagtcaagtgcagctcaaaaatattaaataaaaaattccagaattaacaacttatgttttaaattgtgttctgttctgagtactatgacaaaatctcacacctttccactctgttccacccaagatgtgaatcctcccttcgtccatcatatccatgctacacgccaactagtcacttagtagctgcttccattcctccagaggcacagcttctccaccccaccacccagtcaccttacttctagccatgatttctccatctttctacatgccccgaccttcagtactaaattttgcttccaccattatgtgtctctcttctctcttacccagatcatgcaagtggaaagcccct

SEQ ID NO: 522 - DNA, 1222 bp, Homo sapiens
cctgctggatcattttgaggacagaggcatgagggagcacatctcttgtgaagttgcagccagatttgtaaccaaccctgaaattcatcagcttaattcatttatcagcttgattcattcatcattcattgcttatatccaaagcaaagacggtaagaaaatgaattcatcctgaaatataaagaaaagggtctgaaggaacaaacacgattctcttatattttggggctcatgagccttgatagacagtttcctctcgtcttcatttccacccctcatcctcagtagtctcctctcccccacgccccaccccaacttcccccccaagcttgagttaaagacagaatagctaaagacagtgctgcctttacaatgcagtaattgccatctttggggccgaaagacaagctctgtgttgtgcttttcttgaccaccccttatcctgggctctggagcttgtgtttccctgctggcgactgtaccttgggtatttgttgctacctctcctgtttgctcagtaggaccctgtctggtggcattgaggctctggaccagaccatctgtgcagttaaggctctaccctgattgagagaggatagcagacctagaaagagaaaggagttgggcagggcctttgaggattgtgtttttcaggcagggccttgatgatcattgttttttatttaaataagatgtgtgtgctggacagagacctaaaagttgaggtcactaagtcattggaaaggccatcaaggaaacagatggggaagctgatttatgggagctgtaaggcatttagctacataacaggggtcctggccaggaaacacatcaaatgtgacccccgctgtgctgatatcatcttcaggctttggtctgcaagatcagaattaatcccactcgggaccccatagtccaaacttggggccacttgatgaacgatggtagaattgtcattggcagagccctgtgcttctttccttttcttcataaaatccactcgctggtcagttatcttcactttgaagcccagttcttagtttcttcctatggcttcattggtcagtgtccttctgaatttccaaggatggtacacaataaatcatgttttgtacttttttcctcttactgcattttgggggatttatcattctatgtctaccttttcttgagtacagctttgatatgcacctgttgttacgtggtgatgggaagtcacagg

SEQ ID NO: 523 - DNA, 1247 bp, Homo sapiens
gtttgctttttgcagcgaatgtcaggtagtgtgcaaaagaacgcttcttttccttcatcttctatattctctttaggtaagccaaaagagaaattttatagttatgtttgcattatttgttgagtttaaaaatagatacttcatagttcaactcattcattattatgattacgtaactgctaaagctctaaatgtatgaaggctgctatacatataatcgcatagaaaacatttctttaaaacctaaattcagatagggcagaaagaattattaaaaactgacaggatatttattagagaaattaggtattaaagaatacattagcttttacatatgggtagtcatatggaactgtagttccatagagttttgcatttagacctttaaaaactagtcttcagaggatatcctgcaccctatccttttttatataatagtgctaatgtattggaatgcatgtgatacactcagtgtttctggatagactgtccatctgaagtacaaaaagcaagagattcagtatgtgtcatttcagttaataaaccctgaaaagctgattaataactgaaaggaataataattctgaaattcagatttttgctgattgttcatactcacagaagatgacagtatcatttgtgtgtgtgtgcgtgtgtgtagagaaacatgaaagataaaactatctttttttaaagtttctgaaattttttaaaatttggaggactttactaaattattctttggggaaatatagaactgtagtctctttcaagtcgttatatgtgctatgtatgcaagtatacaataccccaaggataatattgtggcttcataggcaatatagatcaacaaaattttatttgtaataggaaggtggatgggtaactgtttagttttttttttgttttttgttgttgttttttgtttttggtgcattgatgtgtattccgtttgcttcattgctgctgagtctaccttatgtgcctgttcttccttaacagaatcaaagaatcttcaggatggcagcaagtgtttacgagcccatatttggattggactatcgaacgagtagctttaaatgcaaaggtggttggagggccacatggagacaaagacaaaatggttgctgttgcctcagagagtagcatcatcttgtggagtgttcaggatgggggaagtggaagtgaaattggtaggaagaatcttgtttatgttgcaatttgatgatattaatattttgaagttt

SEQ ID NO: 524 - DNA, 1211 bp, Homo sapiens
atgcaggaaaggcttgttttggattcatgttttccctgcccatattgaggaacatcaaagatgttcagtggaaggtttagtctggagcataccatagaccagagagagcatcatccagtctagcaaccttatttggcagatgaggaaattgagcaattcagtgactgcctgaagtttacacagctagttagtagctgagattgcactgaagtcagcttctctcactcttaatccatactttcagtgaacagtctcaagctgtgctttctggagacttgatgtcacttcaaccaatattacattcttttgcctatgaacacccttgcctcttacatacacccatacaccctaactctctgtcagtcatcaaccccacactcagcctccatgcatcctgctgcttttcttgccttctctgcatggtccatcatttcagtttgcaggctgacttggattgacccactgatgggcttttcctttgggataagccacattgcagacaagctatctggtcgcattcgtgaaacgagccaacatgaggctgatgccgtcaaaaggaccgagggcatcagctccatgatgttgccacaacctaaaggcagagttgagctagatgttccctggagtgtacccctacggttgtcaaacgaacctcctagatgacctttttacatttatgtgtaaaacaacttatggaaatgcttaattcaccaaaagagatatgtcagaaatacgttaagcagaatagttgcatcagttattcggctacatgaactcctacattccaaaatgagtcaatacatgtgaactacaaacgttttagttatgtataaatacaatgttattttccctgcctacatttcagcatgaatttttgttgttcttgaattattgttttaaagatattaatatccatgaaagagatactcatgagctataatcgaatttgtctcagagtacttattttggattgctgtgttagtgctatgtgccaggaataacatctcatatatctagctttctctttcactactgaaatagacattaggatatctgagtagtctctgccctttaaataatgcactaaatacaatgctcatggacaccctttccttctctcatttgatttcgagatacggagaataaatgagatgttcactggggttttgctgtcttttataaaatccaccccattctggagtgaatgagcg

SEQ ID NO: 525 - DNA, 1198 bp, Homo sapiens
ggaacagccgcccttcagggaagcggtgacactcgaccaagtgatacatccagaacaaggcttggtgagggccgggggcagtaatctggagtataaatatcttgttcttactcttcttcttctctccaatctcctactgagttttcccaatggccagagccaagtggaagtgagaaaacccaggagccccattaccaatatttgtcttatttaaggctggagattgtcctggaggggcaggtggaagatgtctggcctggaagagaagggaagggctggaggcaggaagggagaaaacatcacaaataaaacagctcttgaggttgtgaatgactaaaacactattaacaacaataataatgatgataatggctctatttactgaatttttattgtgttctactgctataaggactttctatgcattaagttgttggatgctcacaacagcctgataaggcagccctgtgatcacccctagtcttatagatgagaaacctgaggcagggaaaggttaacttaactgtgcaagtttacagctagctagcaggaagccaaatttatctggacaagtttacctagtttatcaagtttatcaagtcccctgggactgtactgacagttatcctgctctactctctccaaaggcattctctgagggaaggtgggttccatgctgagggaagaaggtgagcaaacaaatagaggacataaaggtgcctggggtgtgaggaaaacatgaaacatgatggtgtagtcagacactaagggatctggagagagacaagaaacccttgaacagccttggagttgctttttttcctactggcagtggggcgttccactgcctgacaaagcttttgaacatgctgttcctataacgtgggtactgagctaatccccggactttagctgaactcgacatgctgaggttgaagacagctttattgttactcacaaatggagtattacggatccctggttctttttcacctttcatttcttgcgactgatgtaactttttgtatcagtagcaatagaaacagaaactcaaaatatctcaaggcagtggaggtaaaaatagaatgtaatagtaaagcaaagcaatcttcgtcacaaatcttgtaaagtgaacctgtcgggttttgatctcttcattcagcatacttgtcctcacggaggtgcactcacatggaaa

SEQ ID NO: 526 - DNA, 1227 bp, Homo sapiens
agctggtatttttaacaaatgctgtgtgattctgaatcatattgtcatgtttaaaagtgagagctgcttgtacatctttagaatggcagaccatatgtgtcactgtgagtgtcagaaatacttgcatgagctcattttcaccaactggggggaaaatgtaatgtttctattgatggtataatttagacactataataagttcagccatttgagttcttcaaaatggttatattaaaatgatatttttattaagcttcaataatgaaaaacaatgtgatttaatatgtgtatttttatattattgtatggattaattgttaattcagcatttaatggctaacttaaatatgattggaaaagaaacttcaagttgccattgcttttacctaaagtttttaaagtctgaaagatttcagcaaatgcattaaacaggaatgtgtgacatcttcttttagattgcttgtctaatttggagagattaaaaatggtaaaatgcaactttgagtctctttacctttgcatatttaaaggtacaatagtgtggtgttggtaattgtaagtaagcttttctgtgctatgtctttggagtgaaaattcatgttttttttctgaattacataaatgcttttgttttattttgtataatgactgtcttttagatctgaataagtcactttaaaaccttggcctatgaactttgccttatcaatcatgaatctagatgaatgctatctagttcttggttcagttttacctatttttatttttggttcactgcttgcttgagcatagctgggatttgtagcccattttctaggcttattgcaatctcactgtggtattttatagaagctattacaactgataggctagcttcatggtattgatgatacatggcttaaccatactaaaagctgctttccctctctaaattgtaaaaaggtgatgaagtttcacttgatggagacatactatatatgtgtgtttatcatggaactagtgcattaggccataagctgtttttctggtctatgttttttgtatttaaaactttactgaagacaatggactccttcgggttttctttctttcaaccctgaattgtccttgtttgaatttttaagtactgtaatttttttttttcaataaaatctctgacttgggcaagaaaggtaagagttccaatttgtgctgctatttctctgatttcatttgctaagttttcat

SEQ ID NO: 527 - DNA, 1187 bp, Homo sapiens
ggtgttaagccacctcttccctaatattcaggtttcaccaggtctcctgactcttggagggactggagatggtgatgattacagtcatatgtccccgatttattttacttccactcaaagataagatttctcccccaacctcttagctctctatttaggtgccaagttaggccaagtctttttcttctatgcacctagattagtaattaaaatcacctgtcacagggttacaaatgccttcatgctccattcatatgtgcaaaaaaaaatgtagcttctttattatgttacaaaatgctcccattgtcatcaaacgccaccattcattggaagcaggataaagcggaataaagcaaaaaaaaaaaaagaaagaaagaaaagaaaaacttagcttgcttacttttttcaggattgattacagtttaatgcaataattgaaataatctacatatcccaggcacttatgaatatatttcttagtctcctgctcttcaaaagcaggcacctgggtgtgcagtgggggcccacacaatagaaatgaacacgtgggctcctcacccgtcttttgctcctcttgtactgcagcaatgtcttgtctctcccgacaccaccttgtgttgctgccttctgatcctcaaatctcagctgacgggacaggtggtcctccctgctgacccccttcacctctcctgggaatgtgaaagccctgagatctcaatgggactcgaatttggttcccagccagatagtatgccctgaagttcacaaccacaaggcactttcacaccaaccactggactcccctcttgtaatcctagattctcagtaatattacatcctccatttggaacaaataggaattgctgagtcctgcccatgctacctgggagcccaacttagttaggaagatctaagctcaagtgctctctctgcctgtcagagcaacctttttggcactgatgccaccttctgctggtgccctaccagtctgcaggacatgcttcttctgtcagagtcccaaacctaaaactaggactgaaaccttgctgccctcatttccccagcacagctgccttttacacctcatctagtcttgtagctacatccagctgatttaaaaactgatttcatctttaggatattcactgaacactttagatgtactacatactgtgcactacacaggg

SEQ ID NO: 528 - DNA, 1164 bp, Homo sapiens
aggctggagtgtagtggcacgatctcagctcactgcaatctccgcctcccaggttcaagtgattctcctgcctcagcctcctgagtagttgggattagaggcatgtgccaccacgcccggctaattttatatatatatattttttagtagagacggggtttctccatgttggtcaggctggtctcaaactcccgacctcaagtgatccgcccgcctcagcctcccaaagtgctgggattacaggcgtgagccactgtgcccggctactcttcttttcactatttagagagcaagatgtctagggaatttcactgaagtgattgaggtgggtggggattccttggtggaatagccctctggactctgaggtggatcatatgtatgtattagtaaatatagcaaactggtttaattgatacatcctgataattaaatggtacataggttgactggtcagtaagttaggttaaataaatatgagctttgtcagaaaaacacaagttttcattaggtatatttatgttttatttactcaatacatttacatggtagtgttacagattatcttctgtgtacctgccattgcgttggttgcgtggtgttagtcgatttctgatattgaagtagcacagtcatacagaatattggcctaaagaaatgacagacaaactcagctatattgtctgtcaattcataggtcattttcctgtataccatttctgaatgatgactttaatcctcttccattattggatctttttggtgttacaaaacttgaatttaagaaaattgatattaattcttaatcatttgttaattttataaaacaggctgaaaatctttttttctgctggaatcaaatgagagtccaagtgaccacaattttctgtctttctttattatacctttatattgtagcaagttggtaaccatcaaaagtaacagcatctccactggaaattggtacacagtccacatggagttgctgttacacttgataacaccattaaacatataaggagattccttttgctcatcatgggagctgtacgatatctctaagtatacttgtttcacagaagaaagtctcgatttattcatgttctaaataagtttagggactggtagatttgaaacgctgatgttttattttgatttgaatta

SEQ ID NO: 529 - DNA, 1183 bp, Homo sapiens
cattgtcagccactgttgtttataggctaaatttaatattgcctgcttgaaatgttcattatgatggagagagatgaaatttcagattgttttttaggttgaagagtgcattctgaagaaatataagtattttgatggtactgatagacaaaacttggcccttgccaaagatggcccagaaaactctgaaatgtatactggttgagtcagggccattagtgcaggactccttataaatatctgaactcaccatccttgcccatgagtctccaatctactcctgaccctcatgtttcatccagccaagtagtaatatttgtgaaatagcatgtatgtgttgctttgtgatgtatcctcagtatccatcagctttcaagttaaaagctcattcaagttaatattgattcagaatctttggcaaagaatcaccagtgcattttttattagttttcccaaacagttttgggtgctgattcagaggccctcactgattcctgggaggcactttctcttgacactgagtactggaaactccttctgaaacagctggaggattgtctcatacttcagactctgcttcacagcaaagggaacactcagacctccaaagtgtcatcactgcaggctgagccacttccaaggctttctgttaaaaagttattagaaggaggaaaaggtaagctgaagtttatttgagcatttgcatccatttttttatgttacgagggtttcttttaatagaaatgacggaaagaatagagaaagaaaaatacactcagatttaaaaataacaataaccttctatatactacctttaaattaattttctctaaagtctcatttggtcagttccacgctcaggaactgctaggtgcttccctctgcctaagaaaattggcagtgattctcaaagagtggtcagaggacctcaggagtcctccttttttcacctacatgtctatatgagaccagattttcctcttatacttcaaccaaaacacagagcacaatagattgaatggcaaaactgattggagaatccagatataaaccaggcattacagagatttgcaaatatgtaaagtagtgccatatttctcaccaaatatcctttttttttttgcattgggaaatataactacttttttattattatactttaagttatgggatacatatgcag

SEQ ID NO: 530 - DNA, 1177 bp, Homo sapiens
tcttcttgcagccactataagagagcttactgtgttaggtactgagggtatagagatgtaaagacatgcttctctgttgtctgaaagtgtgagtctaggagcctggttagaagaaacacatgagaatggctacaatactacaacatagtaattgtaacagacaaggggaccagctgtagtgggagcagaggaggacacacttattgtttctccagcacaccatacacttttatccctagatctatgtgcatgtgggctagaatgcctcctctgtgtttgttcacttggtcaagttctactcattctatgcaaactggacactgggagagaaagagcaaggagaagaggaaggagagtgactctaaagaggctaaggatatctgacacacaggccatctttctatttactgcatagctcttacatggaatactctgtaataaaaacctattggtaaacatttcagtgtgtctacttttttgctagcataaaaatgctgcaaaattccaaagtgttaagttcagttcagggtagcttccctgctctgttaattaaactttggaacattgaaactggctagggaaaatgattggatagaaactattattctattcatttatccccagcctacaaaatgaaaaaaggtacaataaacgttattgtatgtacatctttatgtagaggtctggttaatttattcaacaaataaatgagtacctattaatatttgtgctagaaatacaagataggaccccaccctgataaagcttacgttttggtgatggggagacaaacaataaactaaatgaatatcaaactcttagtgggcatcatgaagaaaataagtaggttatggtagagagtaaaggaagagggtgctttaggtagactagtgaggaaaggcctctccaaggacatgacattcagactgagacttgaaggatgagaaggagccagctatggaaagaggtgtaggaagagcattctaggtagaggagcatcagggatataggcctgggagccttgaagacctcagagtgttcaagaaacagaaagggggttggtgtgacttgactgtaaagagtgaggggaaaacaggacaaggttaggttggagatgcagactggggttagatcacgtagggataaggagatccgattttattctaaatgcagtgga

SEQ ID NO: 531 - DNA, 1177 bp, Homo sapiens; identical to SEQ ID NO: 530

SEQ ID NO: 532 - DNA, 1198 bp, Homo sapiens
aaaactaaagctaagaaattgtgctttttaattattttttctcactaattaaaatgggatggaatagaaaaaaattattaatattgtaatgttacatacaaaagttatttgaaggccgggtgcagtggctcatgtctgtaatcccagcactttgggaggcagagatgggcagttcgcttgagcttacaagttcaagaccaacctggtcaacatggtgaaaccccgactctgcaaaaaatacaaaaatttgccggacatggtggcatatgcctgtagtcccagctacttgggaggctgaggtaagagaactgcttgcgcctgggagatagagcctgcagtgggccaggatcacatcattgcagtccaccctgggcaatagagctagaccttgtccctcccctgagccccacaaaaaaaaagttgtttgaaaaagatggtttggatcctgaatataagtctgtatatataaagtttataaaacataatcttttgtatttgttgtatttcttttgaaatgcaaaaggtttagaaacaaccactgatttgttcattatattataaaatattaatttaaatacagctgcttttatgggggtatatgcggaaggatttgagtaagaatgtcattttcaattactattcgtttagcaaatatttattaagtacttatgatacttttatgtatgtgtatgtgtgtgcacatacacaggatacacgttctctgccctgtaagagcctaatagttgtgtagacagggtgtacatttatgttagataagtacatgttaactaacaatgcagcaaatgacccaaaacagtatataattaagttctgaataagaaacacagtcaaatgctgtagtttcacaagagggaaagatcattggtggatgcaagaaaacttcataaaggattaaccttagtttggagaagttggatttggagaggtagagtcacttaggaggcatttagttaatgggtgtaggataggcaaaggcagagagtaagagagaatgttgtatttggagagtggtaattataacagctattaagggtgtctatgtgccaggcactgtaaaagtgctttgcatattttaactataacaactctgtgagataggtgcagtttttaactccatttttgctgaagaggaagccgaggcagtaagaaattaaataaattgcccaagatcatataa

SEQ ID NO: 533 - DNA, 1226 bp, Homo sapiens
agcccagtagtcttgaagatataggggaaatagtgtaaacggttgtcaagatgaatctaaaatggaaattaatcagttccctagaatagattgagaaattagctttaggaaaaagataaatttcacacacactgtaccatggaaggtacagtgctgattcagacagactgggaatggtctcatttttaagtggtgatgtgaggtacttcactgagcattgtgacaggcacgggcttgggaagagcctattaggaaatgggagaggcatgagactaaggagcacataagagtaatattagcagagaaattctttttgaggttgaaggtcatgaattttatggtataggaatagaaagaggggttaatccagaatgggatttgagttggaaagggaaagaaataaaggttttgggaaggaggttgctaatagaaaatgagaggggcaagggatttgaggtctcagtaaggagacagggatatgaggagtggagaggttcagaatagaaagccaaattagagttttgggatcaactttcttctcagtaaagtagtcctgggtcttcgtgagaaggaagtattcttcaggcataactgttctactattggttacttcctctttcattgtcttgtggaacacgatgaaacatttaagatgatattcatcttttgagccaataaataagggaaatagatagtttttgtgtttgagctaagtggagtatctcaggccattccaatgtcttcagagttttggctgtaatgctacctcttgagcaagtgtaggtagaggtaagctcttgacagaaaattttaaccctctcttcaaaatgttatatgcttaattaaataacttcttaatttaccttaataaatggcgtataaacattaagttagaaaaggttagtgtatatgaagctgtataatcaacattgtttgactttttttcctcagattgtaaaactgaaaactcagtatactaatactcttgtatactgtatacactcagtattagaaaatgagtacctttgatttctggaatctcggatgccaaaagaggtctcaatagatgaattatacatagatgattcatagacgatagttttagttttatttatttttcagggaaaaacatttgacaatgttcttgattcatttttttggtattaaattatgcagctaatcttagagaaccctgagtgatgccataaaagatgttgatgtggcct

SEQ ID NO: 534 - DNA, 1227 bp, Homo sapiens
tttttggaggttattacgagactgctaatagttgtcatttagtatgcatcattctagaattttttccagaaacataaaaaaatttatattttacgcttctgttttgttgttgttgctgttgtttgagacagggtcttaccctgtctcccaggctggagtgcagtggtgtgattgtagctcactgcctgctgccttgagctcctgggctcaagaaatgatcccacctcagctgcctgagtagctagtagtacgggtgtgcaccaccacacccagctaagtttttgtttttagaggtgggatcttgctgtgttgcccaggcttgtattgaacttctggcctcaagcgatcctcctgcctcagcctcccaaagtgctgggattacatcatgcctggacctaggcttctattttttatataaatgtggtcattctgtcttgatgactttctcatgtacgtaataacttaaaaatagatattgtataatagtctggatacagcagaatttacataataattctcctgttttggacatttagattgtttccagttgtaaatagaactctgctgaacttgtttcacgtatttttgtgcacctgtgatgggactatatgagatagatttttggaagtgaaaatcagggttgaagattgatatatattagattttgaaaaataatgctgtatcatccttcacaaaaactgtcagttacatgtgcccaccaacagtgtgtgaaaataaccatttcctatcaacaatggattatacctgtctttttattttttggcagttttattggcaaatcatattacattttagtatacatgtccctgattaccatgaggttgactatctccagtgatttgaaattatttgatcttatctttcaacccttttgctattgctgtctttttctttttttacattaattggtactctatgatggaaagtagtcttttatttaattatgtgttgacactatttttcccagtcttatgacttatatttaattttattatatagaatattataggttttgtttgtttgtttgtttgttttctgttttgagagtctcactccgtcgcccaggctggaatgcaatgatgcaatcttggcttactgcagcctccgcctcccgggttcaagcaattcttctgcctcagcttcccgtgcagctgggattacaggttcccaccaccatgcccagctaattttttgtatttttagtag

SEQ ID NO: 535 - DNA, 1177 bp, Homo sapiens
tatagtgacatgtataaaataaaaacaagttgaaggtatccacttaaatgtgtttgcatgaaaccgttgattttttttttttttgagatggagttttgctcttgttgcccaggctggagtgcaatggcgcgatctcggctcactacaacctccgcctcccaggttcaagcaattcttctgcctcagccttcccaagtagctgggattataggcatgcaccaccatgcatggctaatttttgtatttttagtaaaaatggggtttctccatgttggtcagggtggtctcgaactcctgacctcaggtgatccgcccacctcagcctcccaaagtagtgggattataggcctgagccaccatgcccggccaaaaccattgattttcaaatagtgtttttcactgggccaacataaaaagatgaagttcctcaggaaactagctatttaaaaaatttgaggggactggataagaaaaagtagggaaattaaaatttgaatatttggttattcttttatgtgtctgcataggaacttgacctgccaattttgaaagtggctgctccagagattgtgtctggagtatccggagagtctgagcagaagctgagagaactatttgagcaagctgtggtgagtcagttaatgactaatgccaggtggtcagacgctaccagcttatattaaagatcctgctttttctgatgctagtatttgttaacccactcactggccattcttttattaatataaacatggtaatttgctatgcatgatggctaaatatttaaagtagatttagtgataccagctgttggataaataacccttttcatttgaaatcaaacataaatgtaattggtgagaaattctgggccgtcataccctgtagtcatatgttgaaaatatattatccttatgatattttccactcacttttactttcctcaacttaagtttggccaaaaaaaacttgtaagcaatgtaaaaattgttatttaggctattataaaagcaaccataaaaataccagaataaattctgtcattccttactagtaaactagggcaataataatacccaaatctcacgtggctattgagagtattaaatgagagaattcttataaaaccttcgatatggtgccttgcacacagcacaagccctgtaaatattagctg

SEQ ID NO: 536 - DNA, 1355 bp, Homo sapiens
gatcggataggagtcggggtcgtggatggggtcggggcggaccccgccggcccgctggcctccctcccctgacccccgggacagcccccgatgcacgtgctgggtgacaggccccctataggttccatacctgccaccggaagtgagtgaggagggcagtataggcatttcctgtgacgcgagcgcctggactccattaggcagcagctgggggaagaatcaacacaccagggagcagagcggagcggatccgaggacagaggcggcagctgcctccgctgccgcccgccgccgccgccgccgcagccactgccggggctcagcccagcggcgggccccgcgcccccgcagccgccccgcggcgccccccggcgcgacccccgggccgcgcaccccgagctgcctccgggaggggggggggaaagggcccggatcctccttctccccctcctcctcctccccctcctctcaccctcaccctcaccctcctaccctgaccccctccccgcctccccggcccccctcaccccgaccctctccccggcccccgcctcccctcccccgcctcgccccaccggcttcccaccacggcctctctcggcgaggaaactctggcctccgcttcctcctcctccgactcggacaccggcggagcctccccgcccccgcggaagaaaccccgagcctcggcggcggagggagtaggagagcccggggcttcggcaggcagagcaggcctctcccctccgtcctcgtcgtcctcgtcctcctcctcctcctcctcctccgtggtggtagtggtgggacttcccccggctgctgcccctcccgccgccgctgctgtcccccaccgaagtagcggccacagcctggtcagcggcagcatcatgcaggccaatggggcaggaggaggaggaggaggtggcggcggcggcggtggaggaggagggggcggcgggggccagggacagaccccggaactcgcctgcttgtcggcccagaacggggagtcgtccccctcgtcgtcgtcgtccgcgggggacctggcccacgccaatgggctcctgccttccgccccctccgccgccagcaacaatagcaacagcctgaatgtcaataacggggttcccggcggggcggccgccgcatcctcagccaccgtcgcagctgcctccgccaccaccgccgcctcctcttccttggccaccccagaactgggcagcagcctcaagaagaagaagcggctctcccagtcagatgaggatgtcattaggctaataggacagcacttgaatggcttagggctcaagtaagtatcccttaccgccagctggtgatggacagaccgagggacg

SEQ ID NO: 537 - DNA, 1247 bp, Homo sapiens
tggcatttggttttttttatttttatttttatttttatttttgagacagagtctcgctctgttgcctaggctggagtgcagtggctcactgcaacctctgccttctgggttcaagtgattctcctgcctcagcctcccaagcagctggcttgtgccaccatgcccagctaatttttgcattttcagtagaggcggggtttcaccatattggccaggctggtctcaaactcctgaccgtgtgatccaccctccttggccttccaaagtgccgagattacaggcatgagccaccgcgccctgctggtttcttttttttttagacggaatctttctctgtcacccaggctggagtgcagtagcgcgatctcggctcactgcaaccttcgactcccgggttcaagcaattctcctgcctcagccttttgaatggatgggattacaggcgtgcgccaccacgcccggctaatttttgtatttttagtatagatgaggtttcaccatgttggtcaggctggtctcaaactcctgacctcgtgatccgcccacctcggcctcccaaagtgctgggattacaggcataagccaccacgcccggcccttttttttttttttttagtaaacatctttattaaagtataatatgtagaaaggagtatatacatccttaattgtacaactcagttttttctagtgaacgtacccgtgaaaccatcacccaggtcatgaaatagaacgttaccaggaccccagtagtatcttattgtagttttaatttgcatttctctgatgactaatggtgtgtgtatataaatacataagtaagtgtatgtatagtcctacatatatgtatgtctatatacattttttgctatttggatgttttcttttgtgaagtgccttttcaaatcttttgcttgttcctcctcttttaagattgtgttgccttttggccgggtgtggtggctcacacctataatctcagcactttgggaggccaaggtgggtgggtcacctgaggtcaggagttcgaaatcagcctggccaacatggtgaaaccctgtctctactaaaaatacgaaaattagccgggcgtggtggcgcatgcctgtaatcccagctacttgggagtctgaggcaggagagttgcttgaacctgggaggtggaggttgcaatgagctgagatcatgccactgcattccagcttgggtgacagagtgggactctgcttaaaaaaaaaaaaaaaaaa

SEQ ID NO: 538 - DNA, 1212 bp, Homo sapiens
aaaataggaaaccttgaaggaatcctagataaacttatttttttttagaattgcccctaatatcttctaaaatttattacagaatgtaaaatgcttattacccatcaaatgtatctgttatgttttgatttatttttaaacaaccatataaagaactttggaagagatcagctggaaatatatctcatttattttatgaataaatatgaaaattctctttagtatgaaaaaaaaaaagaaatcttttcttgccagaattgtttttctctccgttggtattattttcttgagatttaaactttatatgttaagtgcttatcctatttggtaaaagtagccttgtaccccgtctctactaaaaatacaaaaaattagccgggcgtagtggcgggcgcctgtagtcccagctacttgggaggctgaggcaggagaatggcatgaacccgggaggcggagcttgcagtgagccgagatcccgccactgcactccagcctgggcgacagagcgagactccgtctcaaaaaaaaaaaaaaaaaaaaaaaagtagccttgtgtaatatggcctttatagttatcttttctttttttttttttcttgaggtggagtgttgctctgtctcccaggctggagtgctgtggtgtgatctcgactcactgcaagctccgcctcctgggttcacgccattctcctgcctcagcctcccgagtagctgggactacaggtgcccaccaccatgcccagctaatattttttgtatttttagtagagacggggtttcaccgtgttagccaggatggtcttgatctcctgacctcgtgatctgcccgcctcggcctcccgaagtgttgggattacaggcatgagccactgcgcccggccatatcttttctttttaaagtatttaggtagatttgatgacaaggaaaaatattcacatgtattagtgaaaacaaacatatacaacatacacactatgtagtttgaagtttgaaaatatatgcatcgaaatattaacaatggttatctgtgggtggtaggaatcttgagtaattttactttcgtatatgtatatttctagatagtctaaattttgtacaatgcatatgtatttttttaatgttttttattaagtatacgatacctgcaaaaataagcaaacactcatgtaggcttcacccaacttaaaagtattcaatgtctcctattcatc

SEQ ID NO: 539 - DNA, 1209 bp, Homo sapiens
catggaacaaattaaaaaccatttatagaggaacatatcaaaagtaaattagtatcatacaagtgttgaaggatcacaggaaaaatgattgtaaagaaccactagagggtctctattaaagaagaatgttttcgcgtattttaaagattctctgagttagaaatagtgaaaaaagcctgttcagaattccaggtgtaagttgtaatcacacaaaggcgtaatcatgaaaagtagtaaaacatatgtaaggagggataaacagattcagaaaatcatgtagtattatagataagatattggtattgtctctgaagtcagaatccctacattcaaatactggttttatgcagtttttggtaagatggcagattagcacaggctcccaattctctctctgaaaccagttttggattcatcaaaccaatatagaaatcattataaatccctgaggtgacgtaagatggttagatcccaacaagaggaagcagcaacactgaacaaccctggacgccatgaataggagataaagtggaagaaaatatttaggtgtgtactttccccatcaactcaactctgaatgggctattgtccatcctttgccagttagtacaccacagcacagctaggggcaacaacaaaatgtcctattggcagggaagcctaactgggttagggagtaggtaaaaacatattttctcctactgccaccccccttcaaatcttaaaccaagatgattaaaaaagagagaccacacttagaacagtgccagagtggatacagattgttaacacacaagtgacctgctttgaagagtgaccacacacaagtgacctgctttgaagagtgaccactccctccccagattcacacttctgaattcatcagaagtgtaacccaggaaagttgcagtactggaaacaaagcaaaaagaatcagttaaaaaaaaacaacaactggaggttagaagtaaaaaaaaatgtattagttaaaataacataataaatgggttgaatgctggattggttagctgtataacagattagtgagagccataacaacagtcaaggaactctcagaatgcatcaggaagagctaaagaggttaaatattatgtattttaaatatacaacaaatatgtttctataatacagaaatatgtgtatatagttgaaagatgaataaaaattgaaaggttaacattcatataa

SEQ ID NO: 540 - DNA, 1771 bp, Homo sapiens
ggcgagaaatgaagagatgtgtattaactatgaggacagatgttttgattgtgatggattgttagaatggattcatcagtctttgagtagcttctaatttagatacgaccttctgccactttccagtgggattttacagacttgtttaattattctcatcattattagagaaaatgaagtaccttgtggttccatttttagagaatttgggggaaagcaggaaaaaatacattgtagtgataataaaaatatctaatactgtgtactattattatccacaggttttaaccacattctgccttatttctacataatttatttcaccatgttgcttgtccaccgagaagctcgtgacgagtaccactgtaagaagaaatacggcgtggcttgggaaaagtactgtcagcgtgtgccctaccgtatatttccatacatctactaatgctcttctggcttttctacaaaatactcctgcaattccagctgccatttgcaaaaacaaggaaaaaaatccgaaactttcttttgttgcactgacagggtctgtacttttttttttctttttgagtcaggactatggagccgagtagttgatcttttaatatagccgtgtttacttgtattaacttacagttaacataggaaaaatacaagtaaggatgtgagaatttgcattttaatgggaaattttcaacccttaatctgaaaacagaagacagtcttaatataaatgtactgtgaagaatgctattgatgtttatggtttctgattacttttcaaattttgatgtttttttgccagttggcttttcttaaatgaaaacactgttccatttaaagtacatttatgttttattcagtaagagaatagaattttcatttgtttttctttaaatcctttactaattatataatttgaaagcaaaaagaagggcctatattaaatgctgaaagtgaaaagtgatgacattattagcagacactgcttaaaggagaccatttgtagcagttggcttaacctcaacttctaaaactacattgaaaatgtaaatacatagcttagttttttgtaatatatggtgacttcagatttttttgtacagtattttgaatgtgagatgattgtcaggactaactgtctttttaacaaaacattttcagtattttaaataaaattttgtaaagtaatgtgaattaaaaattttggaacaattagaattcattcactattgtatagaagatgctgttaaaacataggaagggtatttttcttgatccaaagtttgtgaatttggctttgctacctcaattgcaggtgtttgtttgcctttataaactgttgcaaatagaaaaaaaatagaataagtatatatttttggagtaacatcaatatttaaacatttttacacagatcggtgtttgaaaatttgccatttcaggctaatatttttatatatttttgactttttaaaagttcatcagtgtttttgctactgttaagcttatgcagtttatactgtattttttatgtatcctttatatttaccaaacctgactccctgtaaaggagtgctgtcttaaaaacaactgaaggggttaaagtcgtttcttttagtttaatagatgtgcataaggtagctttagcaattaaattctagtgaagttgatatagtctcatttttaattgtcctgtaatggaacagtagcaaattcactaaacttttgtgttcagagttaaattgttctcagtactttcaatgtaggggaatgt

SEQ ID NO: 541 - DNA, 1414 bp, Homo sapiens
cttcatgcaattttgtagattaaaacataaaatttgtccagaacttaaagatttagatgccttcctaaattgttacaatgctttaccaaatctatgacttctacataacacaaaccagtggtcaaatgtaaacactatattgtagatttactgtaggttttcaaccttttttagatttatgcatgtggacatttttataatgtaattacaatcaccacaaggttagcttttttaattgcagacagtaatgcatgtcacactaatatgtagtggccttttcaaggcctagtcccagggaaaacattttgtagagtataggggagtgggaggaaggggaggaataattttttatttaaagttgatttctgcactatctttttctcagttacctgcatgaataaataatgagaaatattttgtgactttaattggtaaatatgttacaaaaccaagtacttaatcttttacatcatgtcttcagctatttgtattttaaccagtaatttcaatggtctgaaacatgattctgagcttcacataatatcttaactgtggaactcaaaagtttgatcactgaatttggcagttattattacctaggtacccccgctgttacacaggtgtttagatacgtgttcctgaatgaagctgcttttgaattttgttatgttgaaatgcaagaaataacaatgatggcagcaattaaggtcacagaaatcattaggtaaaggaaaaccaatgaggagttctgcagttttcttttaataagtaaagtgagacttgggtggtgggaagaaggaaggtgggaagaaggaattagacactctgcctgccactctgcgtgtgtgtgctctcgcgcacgtgctgtctatatggaagccactcccttttctttcctttgaaactggtaaggttaaaataggggagaaatcctacatgttggaatgatagctttttggaaaatttaagaaactctccaggctctccatcttgatttatgcttgagttgttatgtgccatatttgctttgaactctgattatcagaagttttactaaaactttgaaataattcactttcatctgctttctagattttgtacatctcagtccataaagcaaagcttgttgatagtgtagttttctaaacgctgcaaatttgcagcctttaccactacaaagaagtttggatgagggattttttttttctttgtcaaaatagttcctgtttctgtagaaatttcatttttagattaaactgtgatggatgagctatcataattcaagtatacatttcttttttctatcagatattcattgtcatgcagtagtagtaaaaacatcaaagatgcagcaagcttattaagtattattttctaaaagaaataggaggcattttcatctttattattgtac

SEQ ID NO: 542 - DNA, 1268 bp, Homo sapiens
ctctttgatatactttatgacagttcctcaatctttcataatactggcatttttgaagactgtaggacaattattttgcctgttatccttcactttggcttatctgatttttcctcaagattagattctagttatgcaggggttgttttagcaggaatattatcagagcaaagtcatgcccttttcatggcagcacaggaagagatacatgatactgtttcattgcattcttggtgatagtagttttgataaactcttgttgatatataaagtcatgctaagaatctattggttcttaaagcttaaaaaataatatttaggttttttaaaattaatgctgatgtttccttctgttttagatgtaatatattaataaaaatatggttgtctaacataggagttgattatgtctgtatattctcattaagatggaggatacctctttcccaagtggagggaatgctattggtgtgaactccgcctcatctaaaacagatacaggccgtggaaatggaccccttcctttagggggtagtggtttaatggaagaaatgagtgccctgctggccaggaggtaaggaatttcattataatggacatgcccagaattgagaggattttaattgtattccaaatacaactaactagatgcacttctttcctcgtagagaagtggtttttatactgaatcagataatatttttaaaaatcggatttgccttctttgtaggagaagaattgctgaaaagggatcaacaatagaaacagaacaaaaagaggacaaaggtgtaagttaataaagatagtctaccataccttaaaatatggaattcaggcacagctcattcaggaaatagtgtcagcatttatttaatttgggcttaattagtttgaacttatatttgctaatttttaactatgcatgtgaagtggcttgttttgactgttatttataaatttttaatggcagtcttagtaaagtgagttgaatatgtgaaattatgggaaaagcattgaagttcaaacctgtggagtttaattctgttccttaaatgagtgaatgacatttcactacttttttcatctcttagaatctcagttcccttgcattaatttaaaaggaaggaattcgcctaaattcatatgtttcccttaggagcttgatggttattggctgtgccccttcagagtgtaaccttcatgccctcctccctgattcagctgggcaaactctgctttgtctgtgctgtatattggtgtgcaacaaa

SEQ ID NO: 543 - DNA, 1158 bp, Homo sapiens
ctctgtgtcctcacatggtagggtgggtatgggaatcctggggtcggggagatgaggggggatttctctctcctcctcatttcataaggccattaatcctattgaattagggccctgtgcttataacttaatttaacattagttacctcctaaaagccctttttccaaatagagtcacattgagggttagggtattaacatataaattttaggggaacacagttcagtctatagcagaagataactacattttttttttttgtcagtgcatacaactttggaagaaaataatttgtttaatatttaggtgaactttagataagttttgttttaagtaaccagaagttgtttactaaagaagataaattaggggggttgattgatttatacaagatatccgttaaattttctagaaatctctttacactgggaaccttctattttacaatgattaaagtaagttttattaacaggcaacttttccaaagactactttgggtatgaggcaatgtatgtatatctaagtgtagagattgaatggtgtagggtaaagaggacaggctttgaagttaactctgggtttgactctagtttgacatttactaaataatttatttttgagtgggttataaacattttttgggatcgaatatactttgtgaattatagagctgttgagaaaattaaataaaattctggcataacacttggcacacaaaatgagcttgataagagtaaatcccccacttttatgaaagtctgacatctcttaagtttatgttaagaatgtgaaaaaccatgtaagatggtgcagctgctttagaaaacagtttggcagttcctcaaaagttaaacatagagttatcgtatgacccagcaattcctttcctagaaatgaaaacatttgtccacagaaaaacttgtacacaaatgtctatagtatcgttattcataacagccaaaaagcagaaataacccaggtgtgtctgatttcatgaatagatcatcaaaatgtggtatgtccatacaacagaataatatttggccatcaaaaggaatggaattctgatacatgccacagcgtagatggaagcattatgctaagtgaaataagccagacacaaaaggcgatatatgccatgattccatttatatgaa

SEQ ID NO: 544 - DNA, 1187 bp, Homo sapiens
cctcctcccgggttcctcgcggcgatcccgactctcctcccgcggctgcagcagctgccggttgcacacggcctcggcggcggcgcggcgagcgcgggcctgtggagcggcggccgggcgcgcggccccggcgggcacccctcagagggcggccgaggaagctccgggaggaggagcaggaccacgaggaggtgggaggcggcggccgcctggggaccagctccgcgcctcggcctctccgccccctccccagcctttctctcgccctcttctcccacactcccggccggcgcctcggctttgtgcgaggagatggtgtagccccctggccgccgaaggaggagccggacacttgtctcccgtctccgagctgctccccacccctggaggagagacccccccctcggctcggcgccttctgcgtctcccggctggtggggaagcctctgcgccgccggcaccatgaggtgaggggcgcgcggggcgggggccgggcgggccattgtgccgcgggagccgcgacccccgttctcctcggaccccgccttccctctcccggcccggcgcgtctcccctggtctccggtctgttcctcccccctccgccttttgtcccttccaatttctctttctttcttggaaacctccccaacccgtgtggtttgggggtctcgcttcatcgttctctcatttttcctcaaatgctcttctttcacccaggatttcccttcctaaatttaatttgcgcctggctccctcccccaagcctttgcaagcgaaacccgggagatggggaggggttcgagaatcgaagcgtgcgtgttgctgggaaacaggtattttttcgtatatatgtaaaaatttcatgcacttttgcctccgaactctcgtgtttaattaaaaaaggaagaaaagtttgaaaggtctgaaatctctgcgggtaataaagtgcctctggtaggggtaggtgaaggagctgtgaaaggtgaaatttcacgatggtgggggaagggaaagaattgattaggttcacgtggtgggggcagtaaaagactgggataagtaagttggtaggggtgtgtaagcgggggcggggaagggatctgtttggaaaagccttttctcccctttctctgtagcagcctgtgttgcattgcagcagctgctttttccctttgctctgtactc

SEQ ID NO: 545 - DNA, 1199 bp, Homo sapiens
tcctcctcaccttttatacagaaagtacatccctgtcttccggactaaaagggggccgtaattcgtacagttaaaaattttattattggatttgtttttagatttaaaaaaaaccgaaaacaaaaccttcaacaacgatcaattctggcttcctggatgccctcctccccgacttgacttgaaatgaaattgcctcgccagtattttatatctactttttaagggaggtgacttcaagaccattgggaatgacgaaaaatttaaaattatcattagttcctctctctccccgccccctgcccgggattccctctttgctaatgacgctggaaagcggctccactggctgcgtttctcttcttccactcttgcggcaacacactgttccgcgcgcgtctcccggcgactgcgtttccccgagagtcggctgcgttcgtttggggatgaagtcatccctatacctagtgtgcacatcaactcgttccatcggcgcagcacgctgggattcctcgggaagaaaaggagcgaagggaacaatgatgaccatattttccatttatatgcccctcctcaactccgcaggaatcgctgggcgcagccgcggcgagggcgggcagttgggctgaccgggatgccccccgattccctcatccccgtcctgagaccgcaacagggcgggctgagcactcgccccgcgcgagggcacccggccgcgagccgacccggagtctcctggcccggccctgtgcccagtcacgcgtccaagctccccacgccggtgcctacgggtctggcgcccaggaggtctcggcgcctcggtctccgcaccgtggccgtgggggaggcctcggagctccccaagcctctggggagcgggaggcgacggggagggggccgacggtcaaggacaaccacgggcgaggaaccccggccgacaactggccggaggtgttgggcgggaggggggggtggtggcccgcccgaatcccagaggggtgcagggggcggggtagggaggcaacaaagagcctctctccgccgccgccgccgtcgcgctcgctctctcccagcctcgctctccgcagtccggcgggggcccggccgccggcgcgggggagtgcgcccggccccccgcctcccctttcctcccctccccccgcaccgccccctcgcccccgggggaaggaggggaggagggc

SEQ ID NO: 546 - DNA, 1656 bp, Homo sapiens
tttctgtgtttttttttccagcataactcagttacttatggctgggagaaaatatgtagggagataatctaatacctaattcgaaggaagaaaatatctaattctaagtcttgagttcttctcatcagaccatagcaggatttaacatttaacatttttcagaagcttctaatagacttcattcagttttttgtccacagcagtggcatttaaattactgtactttaagacatggaattgctggaggcttggaaacttgagtgcaatttccctagtacgacctccaaggagaatagagcaaaacagtggtaggaaaaactctcaaaattttacccaattgtatgttttctacattgtcagtatctagttttatatagttaatatgtacttctaaaatttctgacagtgtttggtgtataaaacagaccaagctcaagatgtaaagaagattgagaaattccacagtcaactaatgcgacttatggtagccaaggaagcccgcaatgttaccatggaaactgagtgaatggtttgaaatgaagactttgtcgtgtacttaggaagtaaatatcttttgaattagagaaagtgttgggacagaaagtactttatgtaactaagtgggctgttcagaagcttagaggtcattttttgtaattttctttttaattactttagagagctagggatgcaaatgttttcagttagaaagcctttatttacttttggaaattgaacaagaaatgcatctgtcttagaaactggagattatttgatgttaggtaaaacatgtaattgtttctctggcaaatttgtatcagtaatttgaaaatgagatattaggaaaaaccaattcttcttaaatttagttcatctttctttaaaagaacattaaatgtaaccattttgtcagatccatgtattttggagcataaaatgtatgctgttgtgaccaataaatataaaatatggtaattggaattaactccacaccatagtatgcattgttatacatactgtgtacctaattatgtatagcagtgtagtctcaattatatctgaaagtaattgtgactaacaagtatgctttgccttatttccacatttaaactacctgttaatataagggatttgtagtatcagcttgttgagcaatgactttgaatctagttttcagtgatcagaagcagcagttatttgagtgtatgaatggaatgatgatcactgtgctataatgtactgaaaccaccatattacagaaatatttactacatattttccatctgtagtttctcagaagggctatggattagtttgaactgtcaaatccttgcatacttctgtgacacccctgcccattttctgtctttaattaaccaaggtgttaggtgtgactgtcacaactgttatgttttccagtaaactagaagtacgatatttgataattatatttgtatttcaccacctaaatgtaatgttgattcctcaagaatgaaatgaaggcactacattgaaatatgttttgtataaatttgtcatgttgaacagcattttagcatggtaagttcccttagctatatgaattttggcatgtttcagagagatcagtaaataaaatattagataaaatatatattgtttgtgttgaagttttta

SEQ ID NO: 547 - DNA, 1207 bp, Homo sapiens
agtattcactgtgggctgaggggtgctggccacacaacctctgtgggaggcatctcttgcagtgaagctgttggtcctcagttcagtgcccactgagggtaaccaggccccagctctgcacccccagctccctgcctgggatcccagccctgatggcaggtggtttccctctcagcaatgacctcctttggctgcacaccatctttgctgtcatttacctcttcctcactgtgggtttcatgcggcaccacactcagtccattaagtacaaagaggagaacctggtgagtgaggcgggacttagggacatgtgctgggagggactcaggtgggagtcggagtggaagggcctcccaggctctgccacaggccctgactgcaatgagctctgggagggcctcaggagccccgcttgcttattcttgctcacacttggcaccatctttaaaaaaaacagtttcctggtggattgtttcaagatttggacagttactggtgctaagtaaagaaatttgggttgagagcagccctttctctttgccgcccacagcttcacaggggaggggagcttctgtggcttggttccaggcctgggtcctcctctgatctgctgtgtgaccgcatttgagtcacttcccctctttctcagtctcctgccatgcaaagaaggctcatagagttgctttggaagtggattctttgtacagcctggaagaagacgctgtgtaaatgacatgctttgggggctcccccggccacagaaggagaaaactggagccttctgatttcctgttgtttactttccagaggctggagttgggtaggaaacctgagcataccggcacactggcttgtgggtgacttctctccctgctgtatttcccggacaggtgaggcggaccctgttcatcacaggactccccagagatgccaggaaggagactgtggagagccacttccggtaagcaggtggggtgggaggggagctgagccccctccacgtaggaccaacacagccccacccgcagggcgagcaccttaggtgagcgccttctgtctctcgcttgggtatccaggtgagatctgagaaggacctggccctgccacacgtgtatggagtggctcctgtgtgccagccctgctggtgctgtgcagtgaatagcgccctggtggcctatcctcttcaagcagcctgtgcacagtgtcc

SEQ ID NO: 548 - DNA, 1219 bp, Homo sapiens
tgctgccataacaaagggcaacagcctggatagcttaaacaacagaaatgtattgtctcgcattctggaggctggaagtctgaaatcaaggtgtcagaagggctgcttggtcctcagagagctgtaagggaatctgtctgtggcctctctctttggctggtaggtagccgtcttctccctgtgtctctttgcaccatctttcctctatgcatgtctgtcaaatttctcccttggataagaacaccagtctttatacaatattgtttagaaaaaaaaaaaaagaacaccagtcatattggattaggggcccaccctattccagtatgacctcattttaactaattacatctgtaatgaccctatttcttattttttttaaataactaattacatctgtaatgacctatttctccttccttccttccttccttcctctttcttttttttttttgacagagtctcactctgtcacccaggctggagtgctgtggcacaatcttggctcactacaacctccacctactaggttcaggcaattctcgtgcctcagcctcccaagtagctgggattacaggcacgcaccaccatgtctggctaatttttgtgtattttgcaaagatggggttttgccatgttgctcaggccagtctcaaactcctgagctctagcaatcctcctgccttggcctcccaaagtgctggaattataggcatgaaccactgcacttgtcctgtaatgaccctatttctaaatcacgtcacattctgaagtgctatgggttagaactttaacatgtgaattttgggaggatgaaattcaactcatttcatagggatttgactctgatctctgatgggatgaagcctgagggccatctaattgtacatgaaggaatgatgcttaggaaatatgtggaaaagattgaaataactcaagaacccatcagaataagtaccgttgctttgtatttctggcagcatagaaaacagactttctctaaaacagctgttcatatgtttatgtttctgctttggtgtgccacatgtggcgtggctgggacatggtttgtttgtccccaccaaaactcgtgttgaaatttgatcccccatgtggtggtgctgagaggtgggcctagtgggaggtgtctggatcatgggggggatccctcatgaatggcttggtgtaagactggattagttcctgtcggaaaggattagtt

SEQ ID NO: 549 - DNA, 1232 bp, Homo sapiens
gacgtcgtcagtgcccttgctaagagagttcccacgcggggcctcaggggcggcggggccgccttcccccacggccagcctagggagcttgggaatcgcgacccaatgcacagacgggcagtgctcgctctctcttcacaggcgggaaaccgaggcacaacgacggctagcacctgccccgaggtcacacggcgacccaactcggttctctggccggcggccttgttggttccggtctgggaaagggaccccgcaatcgtccctccggccgccagcagcgccaggcccccccccgcaggggccgggggtggcgggcccgccgctgacctcccccgcccggcctgggtcccgcgctccgcggggtgacagcagccgggcgccctctggtggccgccgcgcgcagcaggcgggagcgcggagcgtcggggcctgcaaccgggcggggatgacgggggccggggaccctgcactttgggacgacctggcctggtggccgcgcttccttcgctacaaaaaggaagcacatcttggaaacaccgaacttctgtgacaccagtagttacacctggcctctgaatcgggcgagcagcgccctcgcgcccccagcgctgagcaggggcgggcggggagcggaaacggtggctgtggttgttgccgcgcggctgggcgcctggggagcccgcggaggggcgcggccgccagaccccgcccggcccggaggtgaggagacctcagccccggacgccgaggccccgccccgccggcgatgcaccccccgcccacctccgcgcccctttgttccgcgaccgcagtcccgccgagagccgcactgaagagccccagcctggccgtcccgcggtttcccgccgcctcaccagtctcgggcgggaggggccccggcgctggcgtggccgcggctcccacaacgcagccaggactgcactcggggctgctggggcccgcgtgcgtcccgggcggctccacgcgtcggggtcgcccccgcgcctcccacccccggcctctcggggccgccggctcgcgcgccttccaggcgaaggccagaggccgcagtgaggggcaccgagtggcgggctcctccgcaccacccccgggctttataataaaagtcgccgttgtttaagagccaggtcggaggcgccgctttctgggcggtgaaagccgaagcgagagcgggcaattcgctgcggcggcggccgcttcctgggcgtcgg

SEQ ID NO: 550 - DNA, 1232 bp, Homo sapiens; identical to SEQ ID NO: 549

SEQ ID NO: 551 - DNA, 1175 bp, Homo sapiens
tttggcttcatagagtatctcaaattgaaacttttctgcacaaagaataaaattaaggattttataaactcaaattggcacctactgaattaaaatacataaaatcatttaaatataattcagcatatgggaagtaacattgcactaatatggaaatcactgccagagacagtctattttcttttaatttgttactacttagtcacaaaccccacattattccagtttggaattacttattaaggagaattggaaatacatatgcccatgcttaaattttatagctttaatttgtgttatttctttattgacgggaagaggtacatctttttttccttactgaaaacaaatatggattaattgcctcaaatttgtataagtgattggctagtgattcttgttttcagaagggagagtggtatagatagaaaatgacaaagatggcaatatacacttaatgttgttattgtatgttgttactgaagtacttagatttttaaaatttcaaatcctaaatcacttcttgtaggagggttttcattaactgcagtatatacagttcactacatatgggttgtttgagttttttgtgtgctgtatttctttctgttttttaatacctggttttgtacatatctaactctgttctcttttggttgttcagaaactggattttttttttcttaagcagtgcttaatttgtgttttttaattttgattcagaagtagtcccagctcataggtgttcatactgttacatccagaacatttgtcaggctctctgtcagctttcatgtacatatggtatagaaaccatggagttaggcacttcctggattttttttttatgagaaaaatactgtatttaaaatgtaaaataaacttttaaaaagcaggcactaatatatatttcttccagcctttgattacaaatttgtccttgcacatgttaagatgaattatctcctaaaaatatcattgttcttgggagcagtgtatgttactttacatagcagcggttcctgtcatgtgttcatgtcagaatatttttggttttaaactttcttattgcctttggctgttgattagtacagtacaagtgcgatttcaaaaagatcttgaaagtaatatatttaatcaattaaaatgtttatctgtaacttgttgatgtttca

SEQ ID NO: 552 - DNA, 2112 bp, Homo sapiens
gaagtggccgctttgaaattctattgagccgaaatgtgatcctgtagggagggtactgccactgttctcattaaactcagtgaaggttgatgccctgggaactttggtttattgccttagttttatatctgaagaaagatagagcatgtctttaaaatgagcacatgaggctgggtgtggtggatcacctgaggtcaggagttcgagaccatcctggccaacatggtgaaaccctgtctctactaaaatacagaaaattagctgggtgtggtggcgcgcacctgtaatcccagctactcaggaggctgaggcacgagaattgcttgaatccgggaggcggaggttgcactgagctgaagtcacaccattgcactccggcctgggcgacagtgagactccatctcaaaaaggaaaaaaaaaaaaaagaaagaccacatggacccaacatcaaatagagctcatctccctggaagctttgccacatctgtactcacagttcatgtcacttgtgacttctgtttttcaggtttgggcaaaactacccctgatccttcagctaacattagtctggatggtgtagacgttcctcttgggaccgggatttcatctggtgtgaatgacacctctctactatataacgagtatcctttcttgagtatgctgtgtgagcacaaagggatgttctcgagctacagagtcacttatgtgctgtcagattacctggggcagacaaggattagaggctgtcctgtagtgtgtcccatggtgactgtttcccttctgtggtccctccctgtgcatagcctggcttacagggtatgagccttcccccagtttccagaggatgatctcctctcctcagtctgcctgaagaagacttagagtaactttcaggctggcattgagcatcctgccagccccggggagatgaggcaacccagccccatgaagaggccttagagtgactttcaggctggcactgagcgtcctgccagcctgggggagatgaggcacatgtacataccctctgttgtatggctgttggctccttaacaagcttcccctcaggtacattgtctatgatattgctcaggtaaatctgaagtatctgctgaaactgaaattcaattttaagacctccctgtggtaattgggagaggtagccgagtcacacccggtggctctggtatgaattcacccgaagcgcttctgcaccaactcacctggccgctaagttgctgatgggtagtacctgtactaaaccacctcagaaaggattttacagaaacgtgttaaaggttttctctaacttctcaagtcccttgttttgtgttgtgtctgtggggaggggttgttttggggttgtttttgttttttcttgccaggtagataaaactgacatagagaaaaggctggagagagattctgttgcatagactagtcctatggaaaaaaccaagcttcgttagaatgtctgccttactggtttccccagggaaggaaaaatacacttccacccttttttctaagtgttcgtctttagttttgattttggaaagatgttaagcatttatttttagttaaaaataaaaactaatttcatactatttagattttcttttttatcttgcacttattgtcccctttttagttttttttgtttgcctcttgtggtgaggggtgtgggaagaccaaaggaaggaacgctaacaatttctcatacttagaaacaaaaagagctttccttctccaggaatactgaacatgggagctcttgaaatatgtagtattaaaagttgcatttgaaattcttgactttcttatgggcacttttgtcttccaaattaaaactctaccacaaatatacttacccaagggctaatagtaatactcgattaaaaatgcagatgccttctctatttgtgtattgcgtgtctggtctcattctgactacagatatggttaatcttcacagtgcaaggtcccaagagactttggggggattgtttctacccttaatctgtgaaaccccagaacgtgccaggcagcaaatagcattgcttaatgggaatgccccacctaagggtgggccaagcaccaggcataggagac

SEQ ID NO: 553 - DNA, 1231 bp, Homo sapiens
tatgtcaaagaaatctgttttggggtaaagtattaatattttgatttccttcacctgcatactcaagtcctgaggggaggtggacgacaggatggacaccacacaggcctctggatctctttctctgtcagcctctcccccagcctcctctgggcacacacttcatcttcagggctggtgcaagatggcagccccagttcagcctcagtgagaaggagaatgttcacaggaaaaaagtgcaagtagaaaataaaatcctaaggccctcaaccaaatgaacagaccccattttggccaaggggatcccagataaaccttaaaaacagtgcccagctgtgacaggacaggaggtcagacaagcctcattacaccccctcccttttgcggtttagacgcaacaactgaccagcattaatgataaaatagagattacaagacagacagaagaggctctttttggcaataagataccaaattatacataggacctaaggccatgccaggtaagggttaagcgtgcacagtttattaaagaataaactatgttctcagatgtgagggtgatctggctgcgacacctgtcaccccatggatcatcagggttgattcggctgatccggctggctaggtgggtatccccttcctccctctctctccaagtacgtccctcccaaagctgcgcactcaaagaggatgaccatccccgatggaggaggacccagctttggtcaaggatgtatgagtagccatgctcccctgctagaacctccaaacaagctctcaagaataagctatgttctgtcataaggtttttctttttttctagcagctgaacaagcaatggcctcaagataagcaagatgaaaataatcatagctccccgccagatgctgactgaccctcttcctccagccacaactacagctttgactggacaagaaactgatggctgtgactttctcttgataagagaccactgaccatgagctggttctagctggtttacagagcttgtgcacttgagtgcccccatatctctgcttcaccttttgatatatagggcccaactgtaatacatttacgtgttaagtctctgcctctaaatgaacatgggtcatatgtaacatgcatttttattcagtatgcaggtgttcatgaaccaccttcatgaatattcatagctcctcctatcatctgttgaatatatatacttggccaacccattcaacat

SEQ ID NO: 554 - DNA, 1183 bp, Homo sapiens
tgctgcctttgaagggctcacagccagtgcagggaagagagtgtcccttcttgggactgctctcccttcaggaattgtcctcattgtgtcgggtgacatgattctagtaaataggaaagcaaaaagcaaagcaaacccggttaaaaaaaaaagtgaaattgtacccagaaatctagtacagctcgagaccatggagaagaccaggaatgaagcctcgggaagtctccagggctgtgggaggctatctgctgtctcactcaccctgccagctcttcacacgaaacagtttctcacacacacacacacacacactcacacactcaggcacacatagactcgtgcacgcatgcacgccagggactgatgatgatggctgaaagtcctttacccatggtgttcttcgctgccagagggaaagctgagagcccctcgggccccagggccattgtcttcatgggagtaagggcaactgaaagggagggggggccagcagcagccgctcttactgtgacagcatgcactgcttttggaggctttagtcagattccgactcaggggctgtcctgcagtcttctccccagacaaatgggttgttctgtgggggggatggttgttctatgggatgaaggagacagaggctgcacagaggagacagtagggcgggggagagtgagtgcaaaaacccaaagtcactgccttgcttccaccactagcccaggcaggtgggagggcctggcctacccttttctttgggggaggtctgccccctcggcctcttccctgacacgcagccttactttttcattgtgatgagatagtatcatgagaggcggccccagactgccctccccgtgggcccaggatgctggaccttgttggaccttggtggaggatgatgccgtcaaaaagacattgctgtttgcaccttctcaatatctcaccatcttgcttctgtgtgctttctcaaaatgtctttacgcgtcatcatggtcatgtagtctcttttcaattttttctttatttttaattttaaaaatgtttttaaaaaactgagataaggtctcactatgttgcccaggctggtctcaaactctggccctcaagtgatcatcctgcatttagtcccccacaccaccgccccaacccccagctttttttttttttttttttttttgagaatgca

SEQ ID NO: 555 - DNA, 1242 bp, Homo sapiens
gcaccaccgagaagatccacaacctgattcccgtcatgctgaggcaccgtctcgtccccccacccgaggaaacctactccctgcacaggaagatggggggctccttcctcatctgctccaagctgaaggcccgcttcccctgcaaggccatgttcgaggaggcctacagcaactactgcaagaggcaggcccagcagtagggctgcgggccacgcccaggccggctccgcgggaactctctccctcagacaggccaaaaaccagtagcgaggtcgtggtgatgctctttttaactcctttgcccaataaggggggtggctgcctggagccccgtagccagcgctttccacggtttctgttgctaaatggttgtagggtgagaagtgcaagaatgaagatgaagccccactgctcggtcagtctgcctccgtgtgtcctctgaaataagcagatgaagatgaaagggcaactttgttttcttctttttcctgatgtgaatgttaagcagaagggagagagtccttactcccttccaatctctgttcagtgcaaaacccagaaacatgaacagatacgattgtgggattttatcatctgtgtagtaggtgtgtgtatgtgtttctagagtgagatttgtgttttctgcccttttcctctccagccgatgggctggagctgggagaggtgctgagctaacagtgccaacaagtgctccttaagcctgcgaggcccaggcctgtggggctggttctcacctttgacagctgaatgttcctaaagaactgctgccccacagtgagggtgggagcagcggaacagggaatgccagacacaggctcgctgctgctggaaggcggggtgggacttccttcctctgtccggagaggcacaggtgtcaccagttccagccaaaggctcctcacaggcgctgtgaatttttgtacaagtcttgtaattatcgaatcaacaacttgtttcaatttaataaaaatgctcatgggaagtgctttggcgcgtgtaccctcttctgtattctggagaatgacgacccgtatcttctagctcgtggtggtggttcttttctgacctgacggtcagcaggttcagtgtcacagcccatttgcaagggttgggactggttcagcgtgaggcccttggccctgaacctggaaggctcagccccgttccctgtaagaagggaggtgggaggggtggagaacaggaggagaggttgcggtgtca

SEQ ID NO: 556 - DNA, 1229 bp, Homo sapiens
tgtcccaacattgccttcctcttcctctgcagtccccatacagtgaccagcttcctgggccactctctttactcatgctcaggactcgtgcctttccacccagccgtatacacctctgggcagcgtgcctgagtcctcagggtcagaaggaacgcctatccccctgcatccctgcactctgactgctgtggctcttcgtgtatggcatcccacgctgcagctctgtccttcattcgctccaccctagacagtgtagaagtactcagctaggagacgggaagaggggagccccccaagccctgacctgggaaggcttgggtctggcaagggagcaggcaccagtatctgcaccataggaagggggtggccctggggccctgcctgggagtctgccccctctgcccgggggctttatggagcaggtaggctgcaggcgacatgtaatgctgtttcctcggggagacgcaccagggggccgccctgacgctggctcctgcgcgtgccccgcaggccatcgccagccacatgcacctcaagtgcaagtgccacgggctgtcgggcagctgcgaggtgaagacatgctggtggtcgcaacccgacttccgcgccatcggtgacttcctcaaggacaagtacgacagcgcctcggagatggtggtggagaagcaccgggagtcccgcggctgggtggagaccctgcggccgcgctacacctacttcaaggtgcccacggagcgcgacctggtctactacgaggcctcgcccaacttctgcgagcccaaccctgagacgggctccttcggcacgcgcgaccgcacctgcaacgtcagctcgcacggcatcgacggctgcgacctgctgtgctgcggccgcggccacaacgcgcgagcggagcggcgccgggagaagtgccgctgcgtgttccactggtgctgctacgtcagctgccaggagtgcacgcgcgtctacgacgtgcacacctgcaagtaggcaccggccgcggctccccctggacggggcgggccctgcctgagggtgggcttttccctgggtggagcaggactcccacctaaacggggcagtactcctccctgggggcgggactcctccctgggggtggggctcctacctgggggcagaactcctacctgaaggcagggctcctccctggagctagtgtctcctctctggtggctgggctgctcctgaatgaggcggagctccaggat

SEQ ID NO: 557 - DNA, 1225 bp, Homo sapiens
ggcctggctctgcccaccaccctcaggtcttcttgcctcttcccttgtgctgctgtgaggggttgggcttgtgggaaagtgtccctgcagcacagtgccctgggtattgtggaggtcgggaatcaacctgatttgtgcaggccgaggcccgggggcagggcctgaggggtgggatcactgggcctggcccaggcctcctgcgcccctttgctgcccccatcacctacgttgcttgccccttgggcagggcgtcctcactgcctctggaggctgcgatgggcagatctctcccccagggctgcacctgcgggggctacgaaggtccccaaaagcggtgaccctcctgcccccaaatttagtccctttttctgcctggggctcccttccgaaatctcacctctgtgaagctgtggcagggttgtctgtttaggggaaggacgtctcccaccctacaggcatctcagatactcttggaaagccccagggagggttgtggatgcctgtggaaccttctggttgtgctgcctctccctgctcagccagagcggggccatgtgcggacatttcacgggggttacatgtggttatggcctctttagggctgaagggacctggctttggttctctgctggcagagcgtggccaggggtggctccagggtcactgagcggggattgtgtgggaaccagagcctgcctccccttcctttaaaatactttttatttatttatttatttttgagatggagtcttgctctgtcgcccatactggagtgcagtgacacaatcttggctcactgcaatctccgcctcccgggttcaagcaattctcctgcctcagcctcccaagtagctgggattacaggcgcctgcccctatgcccagctaatttttgtatttttagtggagacagggtttcaccatgttggccatggctggtctcgaactcctgacctcaggtgatccacccgcctcggcctcccaaggtgctgggattacaagtgtgagccaccgtgcctggcccctttaaaatatatattttttaatgtgaaaaaatgcagacaggaaagagtgtatgtcagatacatgcacagtttaaaaagtaataaaatggattcctgtatagccagccctagggttaagaaatgtaccttccccagcctgggcaacataatctctacaaaaattttacaaagatagccaggtgtggtggcacacacctgtag

SEQ ID NO: 558 - DNA, 1364 bp, Homo sapiens
ctgtgttgggagagccggccacgcccttggctttagagctgtgttgaaatccattttggtggttggtttttaacccaaactcagtgcattttttaaaatagttaagaatccaagtcgagaacacttgaacacacagaagggagaccccgcctagcatagatttgcagttacggcctggatgccagtcgccagcccagctgttcccctcgggaacatgaggtggtggtggcgcagcagactgcgatcaattctgcatggtcacagtagagatccccgcaactcgcttgtccttgggtcaccctgcattccatagccatgtgcttgtccctgtgctcccacggttcccaggggccaggctgggagcccacagccaccccactatgccgcaggccgccctacccaccttcaggcagcctatgggacgcagggccccatctgtccctcggtcgccgtgtggccagagtgggtccgtcgtccccaacactcgtgctcgctcagacactttggcaggatgtctggggcctcaccagcaggagcgcgtgcaagccgggcaggcggtccacctagacccacagcccctcgggagcaccccacctctgtgtgtgatgtagctttctctccctcagcctgcaagggtccgatttgccatcgaaaaagacaacctctacttttttcttttgtattttgataaacactgaagctggagctgttaaatttatcttggggaaacctcagaactggtctatttggtgtcgtggaacctcttactgctttcaatacacgattagtaatcaactgttttgtatacttgttttcagttttcatttcgacaaacaagcactgtaattatagctattagaataaaatctcttaactatttcaccggctctccagtgcttccacacaggcatgctgcccccaggagatggtgggtgcatcagccagctttactctaggaagtacaggtgactgcctagggccgccacctcagtccacaccctccccatgttccctcctgagtgtgcaggcacttctctgtgtctgtgtgagaggctcttccagcatggttgcccacagtgaccttgatctcgtttgcagtcctgtcgggcccagccaatgagacctgggccatacagggcaggggtcagcaggcaccatggaagacctcagcctccgtccttccctccatcggcctgctgctgaaccccactttgtatagctggctatggggcagggccactgctagcatacatagggctttgtgccaaccagggaatggtccctgcctgagtgggcacagcccccacctctcctcaagatgccatgcagcagggggctgccagtctgggggtacctgtttctgg

SEQ ID NO: 559 - DNA, 1192 bp, Homo sapiens
aggcctcagaatctgtgtccccagctctccccagcagctctcaggccagtgtccttatgtcatgagactagagcaggcccatgggctgagttgaccatggtgtgtgccctgcagtggctgagccgggggtggtagggacagtagcatgatgtccttggggtgtgggtctggggtctgggtccggtctcatgtgaggacccctgtctgggtggtagggacagtagcgtgatgtcctcgggggtctggggtccgggtctggtcagatgtgatgatttctgtctgggtggtggggacagtggtgtgatgtccttggggtgggggtctgggtctggtctaatgtgatctgctgactcctctgtgggtgctgggccatgggagggcccggcagtgactggagagcgtgtactgggtggtgggggcttgtctctgtgctctgggccctagatctctgtaagcctgtgctgggccccttggtcatcaccatgtgtccacctgtctttctgatatccatctcccttccaccctgtccctgagctggggacaacagaccacactcagcttggcaccctctttccaatggccctgccaacactccgctgcctctgggctggcccaggttgctggtccatctctcctgacccttcacgtcctactgcctgtggccctgcgtggtggggagggctggcgacaggtgagggccccagggccctggaagaccgaggcagggaaggggccgcatcctgttcccaagggacatgatgatggtgctgccaacatgcagccttagacctttggctctggtagtgccggggggagctctgtgcgtcaccgtgcactgcttaatgatggacagccctgcctggctgtcactgggctgacacatgggctgtgtctgctctggagcctctgaccctgcatccctccttgtccatcccagagcccaaggtggtgtttgccaaggagcagccggcatgcagggaggtgcaggcggaggcgggggccagtgccacgctgagctgtgaggtggcccagggccagatggaggtgacatggtacaaggacgggaagaagctgagctccagctcaaaagtgcacatggaggccagcggctacacacggaggctggtagtgcagcaggcgggccaggcggatgctggggagtacagctgtgaggcggggggccaacggctgt

SEQ ID NO: 560 - DNA, 1170 bp, Homo sapiens
ccatggaggtgcagctgtcgcatgcggacgtggatggcagctggactcgtgacggtctgcggttccagcaggggcccacgtgccacctggctgtgcggggccccatgcacaccctcacactctcggggctgcggccagaggatagtggccttatggtcttcaaggccgaaggagtgcacacgtcggcgcggctcgtggtcaccggtgcgttggggggccggcagggcacagcacagagcacgcctgcctgtcccgagggggccccgggaaggtcggtgggttctctggggacctagatgagccagctccgtataactccgtccagctggggcactgccccacccctgtccctgtccccatcctgaaggcttctccaagccctttttctcttcccacctcctccttcctcctccccagagcttcccgtgagcttcagccgcccgctgcaggacgtggtgaccactgagaaggagaaggttaccctggagtgcgagctgtcgcgtcctaatgtggatgtgcgctggctgaaggtgcctccctgccgaccccactcggttgcctcctcccctcctctcatgtgggcgggcccaagcagaaccccagggctggaccacctgagtgcctgactcggcctctgccctgcacaggacggtgtggagctgcgggcaggcaagacgatggccatcgcagcccagggcgcctgcaggagcctcaccatttaccggtgcgagttcgcggatcagggagtgtatgtgtgtgatgcccatgatgcccagagctctgcctccgtgaaggtacaaggtgagggctgcgtggggcatgtggggcatggcaggtatgggcacctcctcctgtcctccgtgtcccccagccaggggcttggcagctctactttcacctgcacaacccttggcatgctggggcactgggtggggggtgctgggagcagctctgtgtgtccgggtgtggcagggcctcccttgccaccctaggccgcaacatccagatcgtgaggcccctggaggatgtggaagtgatggagaaggacggtgccaccttctcctgtgaggtctcccacgacgaagtgcctggccagtggttctgggagggcagtaaactgcggcccactgacaacgtgcgcatccgccaggaaggttcgaggacaggcgg

SEQ ID NO: 561 - DNA, 1167 bp, Homo sapiens
ctgttctctgttcccagggcactgtttcacgtccacatgtccatgctttaattcctagtttcctccagagcgggagtgtgtccttgctgagtgtccccaggtgtctccagagggcctcatggtttttgtgtcctctccagccttgccagccaggttcatagaaagtatgaggcctgaggatgcctcaaaaggggccataccgtggtgctggtgggctggaccgtgggaagccgcagtgcacagcctgtactcagcacaccccaggagcagcccatgttcagatggcttccctgtcttctcagtgttgtccatgtcctgtctcttctgtgggctcagagggtgtgactgtggccatctctttctgatccctcagccctgccagccaagttcacagagggtctgaggaatgaagaggccgtggaaggggccacagccatgttgtggtgtgaactgagcaaggtggcccctgtggagtggaggaaggggcccgagaacctcagagatggggacagatacatcctgaggcaggaggggaccaggtgtgagctgcagatctgtggcctggccatggcggacgccggggagtacttgtgtgtgtgcgggcaggagaggacctcagccacgctcaccatcaggggtaaagatcatgtgtggccttgtggacccgtggcttggtgtctacatgtcactgagtcatcctcatcttccaatgtggcacagcccctgtggcaatcccggggttgtcttttctccaactgaggtcctccggttgtctcccgcctactcttcttgtccaggaggtgtcctcatgctcatgttcatccctttgtgttctctgttcttcccgggccatttgcttcctccccgtgtgaatgtttatttgctccttcacatgtggtcctttggcggtttgtgtggctccttgtgggtgtccatgtcccgtccacagagtcttccagacagtctgatgatctcagcgactgcttggtccttcccagctctgcctgccaggttcatagaagatgtgaaaaaccaggaggccagagaaggggccacagctgtgctgcagtgtgagctgaacagtgcagcccctgtggagtggagaaaggggtctgagacccttagagatggggacagatacagcctgaggcaggacgggactaaatg

SEQ ID NO: 562 - DNA, 1163 bp, Homo sapiens
tgagttccctgattcaccaggcagatttcagtttgtccccattgtctttgaggaggggacagggtgtcaggtgcaaaagggcaggcttctgtgacaggactcatgtctcatggtcctgcctggcctctcccgcaggcgaagctggagaagtcactggagcatctccggaagcagatgcaggatgcgttgctgttccaagcccaggcggatgagacctgcgtcttgtggcaggcaggtgctggggctcccagggtcctgggtggcagggtagggggtgaaggtcctgtataggagaccccagggggcgatgctggccaggcacacttgcccttggcgccccaggaccagtcactgcttcagcctggccccaccgagcccactgaagggctggtcctttcccacgtgcacctgtcctgccaggtcgtgggcgtgggctcccatactgcaagggccccatcctggggtcccagcatgcttgggtggcaactctcaggtgtatttagggtctgggccctggaggtaaatttggaggttttgagggactaggtcatagatgtgggattcagccatcctgaggagtagatttgggatctgtccagttctggggtagatttggggtctgggaggctctgggtggtggatttgggatctgggaagccccaggggagaatttggaggtcaggagggaccctgggtggtagatttgtagtccagctggccccaggtggtagatgcagggttctaccaagccaatgggtggatttggaagttggggagggactagatagtggatttgggatctagtcggccctgggtttagatttggggtctagccagtcctgtgtggtagaatgggatttggctctccctgagtggtggatttggggtttgggaggtgccacaggtgggtttggggtctggccagcaccaggtggtgggtttggggtcctgccacacctggtgctgtgctttggctttagcaggccccgggggtggggttgggtgcagccaggcctctgggtgggcttggggtctgaccaaacttggggtctggctgggcctggggtctggcctcagctgtccttctccctgggctccacagaagatggtggagagccagcggcagaacgtgctgggtgagttcgagcgtcttcgccgtttgc

SEQ ID NO: 563 - DNA, 1254 bp, Homo sapiens
tcctggtggtggtggggtgtgtctgggtttctctcagcccctcacacccaggatcaggccgccgcctctagtgccagcccggggcaaagcagggccaaaccctgaaccgctatagcccacgccctcttgccaatagaccgggtcttggtcgggacaagcgaacgttgtgggggcgttgtgagaaaaacccccgcgaggctgggccggctgttcgtccttgggccagccttgacggctctggttggttggggcaagatggggcctcgcaggatcttctgagcggcgagggatccaaaacgatacatccgcgacagggcggaggaatggaaggggtcccaggatcgtgggccctgggccgtgacgcctcggagcactccctgttccgagcgggccggatgtggcaggatcccgggagctcgggagccacgggaaggccgcgggcgagcggctcgagggtccacgatccgagccccgcggccctgggcgggcggtgacagctggaatccggccggcaaggctggccgggcacttgggggagccaggctcctcttctggcgcctacgaccataccaccctgaacgcgactgatctcggaagctaagcagggacgagcctggttagtacttggatgggagaccgcctgagaataccaggtgctggaggcttttttttttttttttttttaatggctttttctttacttttcttccagacagagtctcgctctgtgacccaggctggagtgcagacgcgccatctcggctcactgcaagttccgcctcccgggttcacgccatactccggcctcaggctcccgagaagctgggcctacaggcgcccgccaccacgcccggctaatttgttctatttttcctagagacggggtttcaccctgttagccgggatggtctcgatctcctgacctcgtgatccacccgcctcggcctcccagagtgctgggattacaggcgggagccaccgcgcccgcccggcctgctgtaggcttttttgggtttcccgctgcctcccttccccctgcagtcgccatgcttccgaaccttctctgactctgctctccctttatagcacacctataccccagcggcagccggggacatcctacttggggtcccagctactcaggagttcagaggtgtcagggcccagggcccacgatcctgggacgccctccggtcctccgccctgtcgcggaggcagcgttttggatccctcgccgcacaggggctcctgcga

SEQ ID NO: 564 - DNA, 1253 bp, Homo sapiens
gtggcggtggggtgtgtctgggtttctctcaggccctctcacccgagatcaggccgccgcctctagtgccagcccggggcaaaacagggccaccccccgacccgctacaccccacgccctcttgcccccccggccgggtcttggtcgggacaagcgaccgtggtgggggcgttgtgagagaaaggccccgcgcggctgggccggctgttcgccttcggccagccctgacggctctgggtgggtggggcaagagggggcctcgcaggagcccctgtgcggcgagggatccaaaacgctgcctccgcgacagggcggaggaccggagggcgtcccaggatcgtgggccctgggccctgacgcctcggagcactccctgctccgagcgggcccgatgtggtggaagctcgggagcgcgggagccgggggaaggccgcgggccagcggctcgggggtccccgatccgagccccgcggccccgggctggcggtgtcggctgcaatccggcgggcacggccgggccgggctgggctcttggggcagccaggcgcctccttcagcgtctacggccataccaccctgaacgcgcccgatctcgtctgatctcggaagctaagcagggtcgggcctggttagtacttggacgggagaccgcctgggaataccgggtgctgtaggctttttctttggctttttgctgtttctttccttttcttccagacggagtctcgccctgtcgcccaggctggagtgcagtggcgccatctcggctcactgcaagctccgcctcccgggttcacgccattccccggcctcagcctcccgagtagctgggcctacaggcgcccgccaccacgcccggctactttgttctatttttcctagagacgggctttcaccctgttagccgggatggtctggagctcctgacctcgtgatccacccgcctcggcctcccagagtgctgggattacaggcgcgagccaccgcgcccgcccggcctgctgtaggcttttgtggcttcccggctgcctcccttccccccacagtcgccatgctacccaacctcccctgactctgctccccctttaccgcccacctacacccccgccgcagccgcagccggggtcctcctgctgggggtccgcccctactgcacgccggcccggcagcagcatcccaccgcttccgcctcgccgccgccccgccaggagcccggctccagcctgggagggcagggggccggaccccaaagg

SEQ ID NO: 565 - DNA, 1251 bp, Homo sapiens
tcaagtgattctcctgcctcagcctcccaatagctgggattacaggtgtgtaccaccacatctagctgatttttgtatttttagtagagaggggatttcaccatgttggccaggctggtctcgaactcctgaccttaggtgattcacccttctcagcctcccaaagtgctaggattacatgcgtgagccaccgtgcctggccggcaagggagaatttaaggaattataaaaaattatagtgagctgactagtaggggatagagtacacaaaactcattttccactatttgagtgaacaattgtttactcctctgaaagcacctgtgggcttcactggcccgctccactgaccggcactgcctccacccagacttgcgggagtgctcacccacctcagcgtgactgtccctcccctctgtactcttctctctattccccagttcccaagagttatccctttcttttttttttggttaccaaatttctttatttgaaggaatggtacaaatcaacgaacttaagtggatgttttggtacaacttatagaaaaggtaaaggaaaccccaacatgcatgcactgccttgaagaactttgccaaatactttcttcaccaatctcatgaggagagggaacatgctgagaaactgatgaagctgcagaaccaacgaggtggccgaatcttccttcaggatatcaagaaaccagactgtgatgactgggagagcgggctgaatgcgatggagtgtgcattacatttggaaaaaagtgtgaatcagtcactactggaactgcacaaactggccactgacaaaaatgacccccatttgtgtgacttcattgagacacattacctgaataagcaggtgaaagccatcaaagaattgggtgagcacgtgaccaacttgtgcaagatgggagcgcccgaatctggctcggcggaatacctcttagacaagcacaccctgggggacagtgataatgaaagctaagcctcaggctaatttccacatagccgtgggagtgacttccctggtcaccaagagttatccctttctaacatattgttctccccctctccctcctctgctccatctccctccctctgtcccttccttccttctgtccttcctccctccctccctccctcccttccttcctttcttccttcctttcatttgagtattgtttccaccccaccctcaccccacaaaatgtgagctgtacaagagcaaggattttgtttgtttgtt

SEQ ID NO: 566 - DNA, 1251 bp, Homo sapiens
ttgtgcactgtggacacagaagctcatacacggtgaagttctgctgccaggtgcgtacacctttaaacatgctgcgtcttcttggtgaattgacccttttatataaaaaccctctttatctctggtaatttcctttgctctgaaatcaactttgctattgctttcttttttgattagcgtttttatggtcctttttcattatttttattttttttgagacagagtcgcccaggctggagtgcagtggcgcgatctcagctcactgcaacctccacctcccaggttcaaccaattctcatgcctcagcctcctgagtagctgggattacaggcatgtgccaccacaccaggctaatttttgtatttgtttttgttgttgtagagacagggtttcactatattgaccaggctggtcttgaacacctggcctcaagtgatcgaccctcctcagcctcccaaagtgctgggattataggcgtgagccaccatgcccggcctggtccatctttttctgtcctttactattaacctactcatatggttgcatttaaaatgaatttgttgtagacatcatatagctgaatcatgttactgtcttttaattggtgtgtttacactatttacatttaatgtagttactaatgtgtgtggtttctgtttgttctctgttttttgttctttggttcccccttctgttttcttctgggttatttgaactttttgttgttgtggtggtggtggtggtggttgttgttgagatggagtctcgccctgtcgcccaggccggagtgcagtggtgcgatcttggctcactgcaactaccgccttctgggttctgggttcaagtgattctcctgcctcagcctcctgagtagctgagactacaggcacctgccaccatacccggctagttttgtatttttagtagagacagggtttcaccacgttggccaggctggtcttgaactcctcacctcagatgatccacctgcctgggcctcccaaagtcttgggattaacaggcgtgagccactgcacccggcgcatttgaacatgtttagtattccattttatctgttatgattttgactatatctttgtataaagttttgaaaggaaaacagcctatttagaaccgtttttgtcacttaaatatgcttggaatacagaaaccttcccaccatgtgggtccctttactcgcccctctttctgttacagttgtcttatatattgcatctacataggttggaa

SEQ ID NO: 567 - DNA, 1218 bp, Homo sapiens
gcaggtgtacagagagaagccaagatgagagatgatgtggcttgagaaacggttgccattcattctctggttccctggagacccagctgcacttcctacagctgggttctgttacatcgctctgtgtcttgtacaataaaccttttgcttgagctggcttgcgtgggtttctgatccttcaacaaaaacttcctgtgattctagcagtcccaaatcgatttctccccagatctttcagctgacatgatttcttccccttttgttacctagtctatgagaatgaaggagattctgtcggcatcagtgattttctttttccagctattgcaaaggtattttacatttgctaggggttagaggcaatgactcggtactttctccaacacagggggagcagattcatcggtgaagtcaatgatggccacttacaagcagttccacataagcagtgtattgtaacacagaagtattgaataattgaaagcataaccatactaataggatctttgcctggctacatgatagccatgagaaatatcagaccacgagccagggagacaaggtgcatagttccaaccttgcctctaattggctgcgtgattaaaggcatcaggggcgttcagtgcaccttggggtttcagcggcctcctccccttgctcacaggctcaaatgagacaaggtatatgaaagcagtttgaaaaggtacagagtgccttaccctgagatatgtgaaggactatatttagttactgggagctggaagggcctaatgtctttcccacatgtcctatcaaagacacatgtgcaggacagctggtgaatacagatcggtgaagtgctgaccctggctgtgctttggaatcacagtggtgctttacagacccagaggggccgccttacccagtctctctgaatctgaagcttcttgagcaatgcttggcagccagggctgagaatctcttctgctgccctgtctccaagttaggcgccgaactctgggagtcagcaggcctatgttggcttctgacgcttggatgtcccgcccagcccctggaggtcagagcccagtgaagagacagcaggagccagagccccaagctgagcacagacacttactcatcctccccctcgctggccacactaatgggaatagttgggagagaaactcttcagtgctaacaggctgcagctgctgttgtggcagcagccaggtggtg

SEQ ID NO: 568 - DNA, 1203 bp, Homo sapiens
tgtatgttatgggtcatttcctctggctgctttttgtctctatatctgttttttttttttaacaatttgattatgatgtgcctagatttagttttctttatatttatcctgcttcaagtttgctgatgtaaattgaatatgtaagatgatgttttccaccaagtttgggaaatgactggccttttatttcttcatgtatttttttctgactcattcttgaacttcagttgcacatatgttataccacttgttattgtcctatagatgactagacttttcccccttaattttttctctgtccaccagatggatctatttctgttgttccatcttcaagttcactagtcattctgccatctccattttgctactaagaccagtcagtggatttttcatttcagataatttcatttttaagttctggaatacccatttgattcttttttatagtttttatttctctgctcagattccccacccattcactcattaaaattgttgcctttgagttattaaacatatttataatagctgcttttaaatcctcccctgctaattccaacctctgggtcatctcagggtgaacttctgatgactttttttctctttgatgtggtctccattttcctgtttcttctcatgtgtagtggttttttattttataattgacattgtggatgatatgttgtagaaacactggattatgttatctttctctaaagagtattcatctttgttatattgggcagttaaattaccagatgatgatgctgaacttctgtaggctctttttgtactttgctaggatgagtatggtttttttttttcgtttgtttgtttgtttgtttgtgacagcgtttctctcttgttgctcaggctggagtgcagtggtgtgatctcagcccactgcaacctctgcctcctgggttcaagcaattctcctacctcagcctgccgagtagctgggattacaggcgcacgccaccacgcctggctaattttttgtatttttaatagaaacgggtttcaccatgttagctaggctggtcttgaactcctgacctcaggtgatctgcccacctcagcctcccaaagtgctgggattacaggcgtgagccaccacgcccggccatgagtttgtttttatgagtcccttattcttgatacatagtctatattcctatgtgtggtctttctgaagtt

SEQ ID NO: 569 - DNA, 1206 bp, Homo sapiens
aatcctctttcttgctggttttaaacttctgtagagtaggaaattataaaattcggtagaaataacctgtctaataaggatggaataggctggacatggtggcttatgcctgtaatcccaaaattttgggaggccaacacaggaggattgctcaaggccaagagttcaagaccagcctggtcaatgtagtgagacccctacctctgcaaaaaattttaaaaaataaattagcagggcatgatggcacaaccctgtagcctaaactactcaagaggctgaggtaggaggattgcatgagcccaggagtccgaggttacagtgagctatgattgtgccactacattccagcttgggtgacagagtgagaccctgtctctaaaacaacaacaaaataaaccctaatttaaggacgttcattcaggataaagtgcttgggcttaattgcatgaacactgatacccattttggattttcttatgtctttttggtttacttttgcattctgaactgtcttctatattttcatgttgcctgaatacaactgattgctggctcaaaagagcttttccaaacaggcttgcagatatttttcctcctactctgcagatcatgactcatgagttaaaagttgttacacaaaagggcttaaagagcatctggaatcttagaagttgtcattcagctcttcttaccatagaggacagagctaaagaccatggaagactctaatctgtgtccgataatttgtctattttaatggttcaaagttatctttcaggttaattttgacatctttgtgtatagatgccaaattttgatttaaaagataaaatcaagaaaaaaaatcacattgcaggaaaagcaacatctgatacaacccagaatgtgaaatagtgacaaggcagttgctgcagtcatagttcatcagcctcctgcttgactggacaaagattagtggcacctcagctggttgactttgaaccccaccgcataatatagggggtcaaggattgcagcctgctgagagtaatttttgagtggagtatggtgaggtggaattgaagagtcaaaaacattgggattttagggttggtcattggtattcttcctgattacatgtttgggatttctagattctgtcccctctgggacgaattaatgaagcagtgaatgacctcactaaagctatccaactgcagccctcag

SEQ ID NO: 570 - DNA, 1180 bp, Homo sapiens
ctttagtgtatattttgagtagcgttttgactatattttgaatggaagaagtaggaaaaagactgtcattgcgttatagtggtttgtattatccacagttaagcattatgttaatacatttgagtccctgtttttgttcttattaggtaattggcagtaaattcagcactcccaggaattgagatttgtgatgctatttgggtatttctcataacattcacagtaaaaaatcacattgccatgttatgtggacattatttaggcttattactagcttttgtgatagctaggagacatcacaaagattatttgggatttgaaaatgaatgatggccttagaaaaagatcagtatctcttgtaggcagatattttatagatgactttaacaatttaaatctagatggaactggaaggctgattagcaagtgtggagtggtgaaagtagaagaattcagtgacaccttattaacttctaggttttctttaactgcttccagtgcttggagctgcctttggagatttaccaaagcatttagttattgattctagttagaactactttattctttcctttaatatttttgtattttgtttcatagctattgcttatgtcttgattggcagtggtctgtatgatgaagcaatacggcatttttcaacaatgcttcaggtaaattttcttcttatttatgtaattttgagtttatggtcatgacaaaaatatggactaatgaacagctgaagtgctgtaatacgacatgtttttaaattatacaagaaagtgaaagaaattggtatggactgagcactttcttgctgccaggccttgtgacatgctttcatttaatcttttaaatgaaagattttaaagaaaacttcattttaaatgagaaaagggaatctaatcaggtcaagcaatttactcatagtctcccgaccatcaaattgcagagatgggattcaaatgcaagctttaaaaaaacattagcttcagttcactttcctctctaccacaatatctcccatgagatacagacactggaaattcttgaaattccagcttaatttcacacaggagttgatcttcatgattaacttaatttctactcataggtatgtttctcaccttaaagtataattatgagactcctcagtgaagtattgggtctttactgattg

SEQ ID NO: 571 - DNA, 1196 bp, Homo sapiens
ggtcctgtccgccgggctgcggccaggcgccctggccaccgagcactactcgccgctctccctgctcaagcaggagctgcagcaccggcagcagcaggaggccccggcgggcggcggcggctgcagcccgcagtccggggactggggggaccagtactctgccgagtgcggcggtgagtgggcggcggcgggcgtccgagtcggccggggcggcggggcagcggggctggggtcccgggccggggtacgggtcgcccgggcctcacgcctccggctgcggcgcgcgatccgcgggagccggctcggccaggggtcctggcgggcagcttcccgccgctgccacccacgccgccgcgcgccctcctgcagccgcctttgggcagggcggcgagtcgagaaatgagctgacagcatgctcctggggccagggcggcctctctcctgagtctgaagcaactgttggaagggtggcggaggagatggcaggtggcccggggcagccctgttcccgccgccggcctcccgaggatgccgaaggggcgagggaggggcgggcggacgagcaaccagcccggcggcttgcggagcccgcccccggagggagacgcctggcacatcttaggcctggaaatcaggcttcctgacctcccgggttaatgtctcgtatacaacagttcctaaaaattggatccctggaatggaaaaaaagagcaagcccatcttatctgctcgttgacatcttgcttccagttgtttaagatcaacctgcgatctgtcaggtgtctcccagagggaaaaaaggcccctgcaggccttgagcctgtgtgtcagtgccgtgtgtgtattggagctacgccagctcattcattaagaatgggcgctattggcttcagtttaataaatcatagcagatgcctctgggacaaaatacgtgtgtacatttttttgttttgaagttctgtcgtgggtctttttacccatcaatctcctccctttctctttcccccttctctatgtgagttcccttatggcttgctttgggaaggaccggggtctaccgaacccactgggagatggttgcttttaagacttggcagtggttttcttcggcattgtgtacctgggaaaacaataccttttttttttagttgagatgagacgtcaagattagcacaatctgatttccttttagtaca

SEQ ID NO: 572 - DNA, 1433 bp, Homo sapiens
ctgtccagagcatgaagggcacatattggtctgttgtcaggctcagcagcatggctgactaaagacattgacatcatgacattgtcatgttgctctgctgttgcccctggctctagctggcctacttgtaaagggagtggtgcatggagaagcacaaggtaacctcccagtgagcacctggcccacagaatcccttcttttctataattctattaggtatctcttatgtattttaatgtcaaagtataataatatcataggggtgtcttacatttatgaaatctttcttaataatgtttgagtttaggccaggcacagtggcttatgcctgtaatcccagtactttgggaggccgaggcaggaggactgcttgaggccaggaagtttgtgaccaacctagccaacatagcgagaccctgtctcataaaataaaataataaaatataaatgaaaaataagcatgtttaagtttagatctttatagaagatttcaagatctgcaaataaatattatcccctcttttttagacttcctgggaatgaaaatggttggtgagctgctacgaatgtcgggtgcctttttcatgcggcgtacctttggtggcaataaactctactgggctgtattctctgaatatgtaaaaactatgttacgggtaaatgcaaataattcccaactactcttaagccatattttcttcactgatgtttgctcatttaaactcttaacttctgaatagaacacttagctattttgctttccctcaagaactgcttataacctcagcaattggtttaatctgtgtgactctcttgtttaattttcactgtaagctgtgtttgttcaggaagcttgggagggagcttgggaaaaggaatcaaaagaagcatttatcattttgagagtaggcaatgggttttgtgttttgtttgttttctctttaaagaatggttatgctcctgttgaatttttcctcgaagggacaagaagccgctctgccaagacattgactcctaaatttggtaggtcactacagattaaaaggaaaaatacaaacccaaagacatcagctgctacataaaacttgacgctttatttaacaagatattcttttcaagtgtaaatgtataactgttgatatttacgggattagtgtataatgtatgcttttagtattttccgtttatgtgctcatgtttgctctgctcttcaatatgttgatgaagcatttctccctgtgttttgcaggtcttctgaatattgtgatggagccattttttaaaagagaagtttttgatacctaccttgtcccaattagtatcagttatgataagatcttggaagaaactctttatgtgtatgagcttctaggggttcctaaaccaaaagagtctacaactgtacgtgagcttgattttagcttaattgagag

SEQ ID NO: 573 - DNA, 1238 bp, Homo sapiens
cagaagtgtagtggcaggtgggggagacttgtgagtagcaggactctgtcataaaaaatgttagagaacttaaatatcctcttaagttctgagttttctttgcataatcagaaatgtattctcttgctatttttacaacaaacctttaaaaagtttcttaaactaacaataataattaagaaatgctttttccctgtatcacctttcagattaagacatcaaataatattgaaaattgtggctatagaatatagtttgttgttgttgttgttgttgttgtttttgagatggaatcttgctctgttgcccaggctggagtgcagtggcacaatctcggctcattacaagccccacctcccgggttcacgccattctcctgcctcagcctccaaagtagctgggactacaggcacccgccaccatgcccagctaattttttgtgtttttagtagagacggggtttcaccatgttagccaggatggtctcgatctcctgacctcgtgacccgctggccttggcctcccaaagtgctgggattacaggtgtgagccaccggcgcccggccagaaagtagttgttttaaaacacttggaaaagtatagtactgtagacatgtaacaaaattgcacttgtgccctttacatttatataaacatttttaaaagtatttaagttacattttgatctttaccaaaatttactcttcaattcaagggttgtttctgtcttgtacaaaattgtattgcatagctctcttttttttttcttaaactaccaaagcagaaaggagttatctagtcttagatccattttgaactatgaaaagataaacggtattttgacacttacctacattagttaaaagtgattttgcctattaaaactttaagaaagatccaaattattattattattattattatttttttttttttgcgacgagtctcgctctgccgcctaggccgcagtgcagtggcatgatcttggctcactgcaagctctgcttcccgggttcacgccattctcctgcctcagcctcctgtgtagctgggactacaggcgcccgccaccacgcccggctaagtttttttatttttagtagaaatgtggtttcaccatgttagccaggatggtctggatctcctgacctcgtgatccacccgcctgggcctcccaaagtgctgggattacaggcgtgagccatcgtgaacggcccaaatgattcttaattttatgt

SEQ ID NO: 574 - DNA, 1238 bp, Homo sapiens; identical to SEQ ID NO: 573

SEQ ID NO: 575 - DNA, 1166 bp, Homo sapiens
cctgttaaattgttaaatatgtgtaatatgtgaaaaactcctggcaaatatacctactaatatccatttccatatagttcttttatataaaaggtagagcagtatatgtaaaccttctaataaaacacttagctataactatgaattctcatgtgctcttcctgctgtcagcctctcctcctgctgttaaatctttgcaaggcctcctctagttgttatgttctgaaaagattcaagtttgtatcctagacttcaaagttatgtctctcctatgtggtgtgtagtgtatcaccctgtacttggaggtatgtgatacaagaaactaaggaactaaaataattctttttttttttttttttgagatggagtctcactctgtcgcccagtctggagtgcagtggtacgatcttgctcactgcaacctctgcctcccgagttcaagcaattctcctgcctcagcctccggagtagctgggattacaggtgcccgccaccatgcctggctaattttgtattcttagtagagatggggttttaccatgttgaccagactggtctaaaactcctgacctcaagtgatccaccttcctcagcctcccaaagtgctgggattacagacatgagccactgtgcctggcccctacaataattctttaatgtgaggaaatatcaaatgaaaaataagaaattctaggtaaggaaagaaatttatttagtggaagtataaaagaagtttaaaaagttgaagaaaattttggttttcaatgttgatgcagcgtcctttgtgaatctttaaatttgtgaatgacacttttgaaaacttacaccttattctaagtgtctttgttcactttacactgtactgtaaagaatcacaagagtgtctcataaataactttctatataacatatgtatatttcaaaataacatgttatatatataatacatacaatttttgtcaattaaacagtacattaaaaagacaaaaataactttccataaatgagctcaagttatttcatccacagtgatagaatgttccccatttgatgcaagcagttaaacttaatttccattaagacaaacacacaaataacaatcctccttcccaaacttgaaatcccacttctctttttgaactctcttcatgaagtagtcccttttc

SEQ ID NO: 576 - DNA, 1239 bp, Homo sapiens
agagcacatttggtgacatatttagtgattttgtgcctatggttgtgcgtttttgtgttttgatgactgtttctacaatagtgtctattattgaagctgatgaagaacagcttcccgaagcataggaaacagcagatggctagcttgctggttcatctgcagggaacctgaagttgtagggccctagactcttgctccatggagccctcctggatgaatcatttgcagaaatgaaaagggctgcatgtgttttgatttaaaatatgtatttattatattttagctttattttacaatcttgtttaaatgacttttgctgtaaaatgatactacagtgtatgtacttatacctttatttagggtcctgtgaagagccaaaactttcccctgatggattagaacacagaaaaccaaaacaaataaaattgcctagtcaggcctacattgatctacctcttgggaaagatgctcagagagagaatcctgcagaagctgaaagctgggaggaggcagcctctgcgaatgctgccacagtctccattgagatgactcctacgaatagtctgagtagatccccccagagaaagaaaacggagtcagctctgtatgggtgcaccgtccttctggcatcggtggctctgggactggacctcagagagcttcataaagcacaggctgctgaagaaccgttgcccaaggaagagaagaagaaacgagagggaatcttccagcgggcttccaagtcccgcagaagcgccagtcctcccacaagcctgccatccacctgtggggaggccagcagcccaccctccctgccactgtcaagtgccctgggcatcctctccacaccttctttctccacaaagtgcctgctgcagatggacagtgaagatccactggtggacagtgcacctgtcacttgtgactctgagatgctcactccggatttttgtcccactgccccaggaagtggtcgtgagccagccctcatgccaagacttgacactgattgtagtgtatcaagaaacttgccgtcttccttcctacagcagacatgtgggaatgtaccttactgtgcttcttcaaaacatagaccgtcacatcacagacggaccatgtctgatggaaatccgaccccaagtaggttgcattaattaggtaaaagcataaaacactgctgtagagattagtatgtgaaacagtatggatttatgattttatcttttcctggtgatgaca

SEQ ID NO: 577 - DNA, 1214 bp, Homo sapiens
tgtgtagtgggtcgcccaggaccacatcccacccaattcctcgctgccaaggagagaactaaatcccatgtgccttcattactggatgctgacgtggaaggtcagagcagggactacactgtgccactgtgcagaatgaggagcaaaaccagccggccatctatatatgaactggagaaagaattcctgtcttaaactaagtgccttactgttgtttaagcatttttttaaggtgaacaaatgaacacaatgtatctacctttgaactgtttcatgctgctgtgttttcaaaagctgtggccatgttcctaaattagtaagatatatccagcttctcaaaaaatgtatatgattgctgttagccatgtctattgtttttcctctggattcttttcttataacttggaatacacaaaagtgtaaaacaagagatgtgcaccaatgaaaactatgctgggtcgaattaccttcagcacaatgttaatgtttttgttctcatttatgcctttgtccatttgcacacaacagaaattgtaatgagcttcactatttttgtttctttccttccttttttttcttttttcctttctttcctttttcttgtcttgtttcttgtttttttttcttgtagtttcttttcttaattgtcatttttgcaacaaaaagccaagaaagagctttagtttcttggcaagaataatgtgatattagtaagtaaaggtcttaaaagtctgacgactggaatagatataaagtcctgtttaaactacctaaccttggctgtgggccgataatgcatatgtccagttctcacttaaattatgcaatgatatttctctctgaggaaattatacggaatgtaacttataaaagctttactgaatataagttataagcattttattcattagaactccaaaatagatgttcaaagttcagtccttgccatttgactgagaccacatggtgtgccccttgagtgaggctaatctttaggtttttcctatagaaaacattcttcctccatcagtagccctttatttgatattcagaagtggaaagctttttcattctccagtagaacttttaaaaattgttacagatacctagctcttcacagatatcatgtactgtaaacagtcatgtgtcttaattttattttctctatttgagtgcataattatcctaataatcccaaagacactgacaactca

SEQ ID NO: 578 - DNA, 1249 bp, Homo sapiens
aggattgtattaacatggtaagttttgccctaaggaaaacgatcttgcattctggattcttgcagcaaagtctcagatacttaatacgttttcttgttttatcatctgttctatgattcggcttcactttgtgtggttattgaattatgtaacagagatttggttttcccaaaatgttatcacatttgaaactatgattgctttgtgttcagtccttttggaacacgtagcttccagcttaagggtagagaaatatatacctaaaatcatcaatacatgaaagaaaaaggatggaaactatgtcctcagttttacttctaccaaaacatccctgtatgtgtgtgcatgtatgttggcgtgtgtgtgtgtgcatgcatattagtaaatgtgtgtttgcatgtgtgtgttggggagtgtatgtgatctgggtgtttgtttatctctgttattattcccctttagctttattttagtcaactctacattatgatgaatttcaaaatgaagctgtattaaaataattgtaatataacaattcaatctcacatgttactgcagatagttaacttttgctgcaatctattgtacatttgcaattttctgtgttagtaaacttagcagaatctggttatttatttttgtgtaggcttaatgttcactgaaagataagtcaattactgttagtaaaaaattaaggtactctcactgcagagatttaaggcctgggcctaatgtgctgtattatgaagccttgtgactgaaaaatatgtttacatatgttgtctatttttttaataaacttttatagctggtctatttgctcagtagctttgatcctctcttgattattgtgactatagtttgcaatggtttattttgtattcaataagaaaaattgtgttaataaagattattgtttaataagccaggtattaacctgctaaatatattaaactgaaaatcactaaatgagtcattcaattaaatacatcaaaaaaggtagaatgaaatgttttatttcaaatttttttggtttacatatgcattgaaaagttatatttcatggtgagcgttttgcaagtccagcttttcagaagacacacttttgcagagtgaaatgagtatgagaaaaaaatctcagtgattaaggagacatgttgattttattgtttaattttatgtttaaatcagaggaatttcaaacaccacttaacatgtagaaattcttactaagtgataaaagcttgag

SEQ ID NO: 579 - DNA, 1220 bp, Homo sapiens
ttgattgaaaactaaatacattatgaattttatcaaataaatccttcataaaaccttcaggtatttgtaccccctttaatatccacttggttagtaggaagagttgtagaattcacaagctcaattagagacttcattttttgcttgtgttttttgaggttatatgaaacgttttaaatgtgacctgggagaagagtgaaatagagttttaacttaaccaggatgcatgattttaaaaatcgaagtaggcctgaatttcctgaaaattttaaaataatctagtagtgccagcatgaaccttagtcacttaggcaatagagaaggttttcatggaaatccattggtctgttttaaataaataccttgaatattaatagtataaaagagcattatctaagtaatactgaagcttattatcagctgaaactttcttgatcatgatggttagccatttacgctcacatctgttaacaatggtgattgctttcatcaggaaaacaacctttagatatgcaaatagctctttctgaggatccggcaagatggcagaagtagagcagaagaagaagcggaccttccgcaagttcacctaccgcggcgtggacctggaccagctgctggacatgtcctacgaacagctgatgcagctgtacagtgcgcgccagcggcggcggctgaaccggggcctgcggcggaagcggcactacctgctgaagcgcctgcgcaaggccaagaaggaggcgccgcccatggagaagccggaagtggtgaagacgcacctgagggacgtgatcatcctgcccgaggtggtgggcagcatggtgggcgtccacaacggcaagaccttcaaccaggtggaggtcaagcccgagatgattggccactacctgggcgagttctccatcacctacaagcccgtaaagcaatgccggtccggcatcggcgccacccactccttctgcttcatccctctcaagtagtggctcagctaataaaggcgcacatggttccaaaaaaaaaaaaaaaaagatatgcaaataagtgtggtagctaatattctgtctcctttccttcacacctcatagattttcaatccccagatgtattttcatctttagagaaatcaaaggtgtgtttcctaattatgttatacttttgcattaagtttaatgagttaaattataaaactttttccatttataccagtggggttagtaaat

SEQ ID NO: 580 - DNA, 1423 bp, Homo sapiens
taaaacataatttagcaatcacaagcatgaacagatagaccacaaaatttaccgagcatttaagcaagatcaacactatgaatgaagacattaaaccaaaaagtcagaggcactaccatctaaggaaaaggaataaattataaattaaaagaacataagagaactaaaataaggtgtaattaatgttttcaaaagatagcataaaacaagagcaagaacaaattgctttatcatatgggatctagccttcagctctgaatgggagatcctattactgacaaagtctgtctttccaaaatggggtctttctctgttcagttcagaagccaatacacaaaaacaaaagtgagcatcaagcagttcaggtttcgttcgatggccatagaattgagaagtgggagcttggctcacaaatcaatttcatagctcttgcaagtgagtatatcacaaatatagggcatctttaatgaaggggttaagcattaagagcaagaggaggaatattcatgtcttttctgggaatgggcagagaaccgctcaaaaccagagtgcgctttcctttttgtcctttcatggtttcctctggctgttgtcagggtgattgtcaactgtcatggcactggtgggagagtcgtttagcatggacattagactataatgaagttagaggttcttcagaggtcaagtgagctgccatcttggatccagtcttagtaagttagatcacaagggggaaattcagacctcaggcatcctgtttcctaaagataagcagggttaagacaggatagaaattcacctaggtcatgtaggcattacaatgtgtaacaatcctaaatatcaactctcatgactggcctaggaccttgaaacaacaggaactatgtccaaataccatgaaactttcatgtagtatcagtgttaatgtcagtatgtagattctttggcttgcagggaggacttgcgtggcagaagtgctttggtaacagaaaagaaaatttaacttgtgagctctttcttctcaggtagcacgaatgtaacagactcctgtatgacaaaatatattttcccaggaatggcaagcacccatttttgtccaattcatggttctggaggtacttacaaattagtgtgatgttcataatagttgctctcagaaattgcagaacagtttgcaattttttttttttaaaaggggtctcgctctcttgcccagggtggagtgcagtggcgtgatctcggctcactgcaacctccgcctcccaggttcaagagattctcccacttcagcctcctgatttgctgggacaacagacatgcacgaccatgcccagctaatttttgtattcttttggtagagacagggcttcaccatgttggtcaggctggtctcgaactcctgacctcaagtgacctgcccgcc

SEQ ID NO: 581 - DNA, 2512 bp, Homo sapiens
cctttcctctcttcagctcaatcagacgctgcagaagccccacgcagaggagcagagcagttatgctcaccccttggagtgcagcaggtacagggaaggttaaggcttaaaaatccatttctgttgttgtcaccgtgagttcatgattgcccaacattgcttataaagttatagaattttggggctgaagctccattcaggatgaaagtgtggtataacattattcatctctgttactggagacttgctgacttttctgcatctagttttcactgaatcatttcagatgagcaaaagtacctactttcagagaagttagaaaattaaggtttatgtggtttccttagtttttggtagataggctgtttgataatgaccatttatatctgtacactgcccccccccccccacctttagaaaggatagtgtgctacgtgcaaaagacgtggaggcaaattggggaagtatggcctagtaactttattttttatttcagtgttttggaagaatcgtcatcttcccaaggatggggaaaaatagttgcacaatatattcatgatcaatgggtgtgcctctctttcctgttgaaaaaatatcacacccttataccaaccacagggagtgaaattctggaaccgtttctacctgccgttcagatgccaataaggactttgcagtctgcactagaagccctcacagttctttcttctgatcaagttttaccagtgttccattgcttgaaagtgttggttcccaaggtaagatagagtgaaacatgaattgaacagtaactataggagtggcgatcaagtttttgaaataagtatgtatttttttttttcctaccagcttctgacttcctctgaatcactctgcatagagtcttttgacatggcgtggaaaattatatcttctttaagcaacactcagctgatattctgggctaatttaaaagcttttgttcagtttgtttttgataacaaagttcttaccattgctgccaaaatcaagggccaggcatatttcaaaataaaagaggtaactaactttcttttctttttgcttttcttttcatgtgtgtgagcttcagcacatgaggaacatgagagttgtattcacaattagatttttggctctttattccttcagtcaaaaatatttttgaaccttcttaaatatcaagagtaagaatgagaaaatctgacagatgtagaagagaaggtacaaaacggtagcctggagccacatctgcctcagaaacggtttgtttggttcatacagtgtttaaaattttgattacctggcaacttttaattgttgggaaatctggccaggcggggtggctcatgcctgtgatcccaccactttgagaggctgaggcgggcggatcacgtgaggtcaggagctcgagacaagcctggccaacgtggcaaaaccccgtctttactaaaaatacaaaaattagccaggtgtggtggcgcacgcctgtaatcccagctactcaggaggctgaggcaggagaattgcttgaacccaggaggcggtggttgcagtgagctgacatcacgccactgcactccagcctgggcaacagagcaagactccatctcaaaaaaaaaaaaagttgggaaatctgtatgaaaaactggatttcttggaaatgaggtaatctagcaacactggtcattcttccatgacaatgtaattgatcgctcggttgagtaggagttggcatgctctttccacaatcagtctcatttcacccggatacttgaaggcaaatgtcaggcgccatttgtcattgcactttggctgaggtttttttttgtgtgtgtagagaaatatttttctgactgtaacccttatcaaaaggtcttgctggtttctggaggtattttcatttgcagctactgagataggaacataccaaggtggagttccagtgtacctcctgatccccaggggaacagggagagtcagattccgttatttctctgcagccctgtgctgcctttcttggtccttttctgccccacagtacatagttagagacgctggtctttgctgcctcagccaaaggaaggccactggcaaaatgcaaacaaaggaagctgaatgtgtgtggggtgaggtgtttttcccctttgattctactgctttggcagttgtttctcttgaagagtcctggatgaatatcactatcagtaaaattttatttatttttattatcaagagatgaaatagcattctctgattattgatcatctcgcaaagttattctaacagtaatgaatttaacagtttttagactgttcatgattatgttgaaactaagtaacagtttttagcagcactgattttttaaaaactaaatcaaggataaaatgacggttgtattttattccagattatgtacaagataattgaaatgtctgctataaagactggagtcttcaatacactgataagttactgctgtcagtcttggatagtgtctgcttcaaatgtgtcc

SEQ ID NO: 582 - DNA, 1183 bp, Homo sapiens
ctcggacagtgtttctcttttaaattaatatgcagtattttaatatgcacgtatgatagaaaataaacttgtgaggagggtaggaactttgattataacttaaatttcaaattctacattctctcaaagataaaacttcttgttttagcatgtgaagctggaagaagttttagttgaaggttgtaagttgttttatgtaatgcgttattttttatagagatctttacctcattaaagtgtacattttatataaggtacattagaaattcttgcctgttaatgaagtttatacattctttgaaggagattagaaaacacacacacacacatatgtgtatatatatatatatctcacatatatatatcacacatacatatacgcatacataaatatatatacacatagtttttttgtttttactgtctgtggaactcaagtatgatagtaaatggtttattactttgtattcgattatttaaatttggtttatcgtgaaagaaagaaacgtggcttaaggagattagaaatcctttgtttggttaggtttttaaaataaagtaataactgttttcttttccagctgtgtgactggctacgtgttaatgaaagctattttaagccatcccctacgtgtagctccattggacttcacaagacatctttaaatgcttatgtaaagagcattgttcaagagtatgttaagtcatctgcttgggaaagtaagtctgcaatcatttttatggattgatataaccaaaatattttcaaagaacttttaactagtttttcagactgagagttaggctttacgaaatatatgatgatttattgatgccaaacttgtatttcagtaaaataatgtgaaaaaaaagtaaagatactgtctcctaacttgtattaatactttatctgttctgagacttgagattctaaattattttatgtttaaggaaactaataagttgccagagttaagaagtggatgcaaagtcatttatttattctgcaattactgggtccttgtgaactagatactgcagatatggttttggagcctctgtagtggaaatatatgcattggaaatacgtgtttatctttttcatttttaaagcacgtttagtatgaactgattatgaaaaacaattttaaacaaaggctgtgtttaaaaggatagttttgtt

SEQ ID NO: 583 - DNA, 1225 bp, Homo sapiens
ctgaggtcaggagttcaagaccagcctggccaacatagtgaaactccgtctctactaaaaatacaaaaattagccaggcatggtggtgtgtgcctgtagtcccagctactcgagaggctgaggcaagagaatcactcgaatccaggaggcggaggttgcagtgagccaagatcacactgctgcactccaggctggtgacagagcaagactccgtctcaaaaaaaaaaaaaagaacacaatttaaaatagccacagaattttctacaattaagagataaggttaattttttaaaccgttgatgatggagaatttcaaacatttatagaatgagaagagtgtgtgtgacgcacctaccaccctctttaataacgatcgtctcacggccagccttgcttagtgtatcctatgtagccttccctgttcccttcttgctaaatggttttgaagcacatccctagatatcctatcattttatctgtgaatatttcagcacatttctttaaaagataaggactcgtcgatagggtttcaatgatgacatagtctgtggttttaataattgctctttttttttgtttttgagatgtggagtcttgcaatctgttgcccaggctggagtgcagtgggatgatctcggctcactgcaacctctgcttcccgggttcaggcaatttttttgcctcggcctcccaagcagctgagattacaggcatgcgccaccacacctggctaatttttgtatttttagtagagacggggttttgccacgttggccaggctggtctcaaactcctaacctcaggtgatccacctgcctcagcctcccaaagtgctgggattacaggtgtgagccaccgtgcctggccaataatcactctttggtatgaatatatctttttaactggtttccattcttattctcttagtatatcttttccagtgtttcttaagttttcagttattgttctgtatcttgtacttcttaggaagagaaaattccgggatataatttcaaatgtgtttataagcccttgatcactatattatgagagctttttaggagatacacaatgaagctggagcttcctaaatgtattttataaaattaagtttaatgaaatagctaaatgcagcccaatagtgttttggcctgtgttcatatgaatgataaaatgccacattattgtgtttacacatgagaattaacctaggtaaatggttttt

SEQ ID NO: 584 - DNA, 1170 bp, Homo sapiens
tgttccctggtgcaagagatgaggcaggggcttttcatttcttccactgcagccttgtatttaggccccatgtgtctgagcgtcagcattcctgctctttcgctgtctgtgctccctctccagtggcaataatcgttgcctccaacttaggggtgcgtttaggttcctggccctaacctgtggcagctgcattctgcgtgagtgtctgtggtaggtcttgggtgtagcgtcctgccctcctccagcacctgcagaccagctttgtatcagtgcaggatatctggcagtagggggtttgcttccccttccacagaataagatgcattcgcctagtgtcagtgccgagtgaagggagcaggttctatccctgccctagaggcaggcaacttttgcttgtatcaaggcagggacaagggtgagagtgtgggaggggcagacagctttggcttcctgtcggagaagggtccagggggacaggcacgttttggcagttgatcaccatcttgtactcctgcagggcatggctgggcctctctagttagtcctgctgccctgggtgcctgcgcctctgaagatctcctgccctggccacagtctctctcgagagcaccggggcaggcttgaagaaaagagctggtgaatggatgtggactccctcagcaagctgtgaggctagcccaccttggtctttaaaaacttgtcaaaatgccatttttaaaactgctttttgggtgaccatgtcttgctcctgtgccagaagtagaacagataagtggcctttccattcttggagcgccttccttccttttagaattcaggttgcattgtgacctcagttctgatgctccccccacccaccgcacaacagtttaggattttgtagatttttcagcctttcctctttgtatgacaataacgatctcctatggttttctatgtcctaatgagcaactgaaacgatacatatctaaatgcctttattttgtcctcatatttcattgatggtttgactgagggtagaattcgagcctggaagatatttccattcaaaattttaaaggtatctatctattgtcccagaagctagagcttccagtattgctgttgagaaatctgaaaccattctgaatcctgtttatttatacaggaactgtttctctctatggaagt

SEQ ID NO: 585 - DNA, 1176 bp, Homo sapiens
ccgggcgtccgcagctggcggccgcgctggctgaggaggcgctgcgcgatctgctcgccgggtggcgcgcgcctggcgccgaggctgccgtggaagtgctagcagccgtcgggccatgtttgcggccccgcgaggacgggccgctactggagcgcgtggcggggaccgccgtcgccctggcgctgggcgggggcggggacggggatgaggccgggcctgccgaggacgcggcggcgctggtggccgggcgactgctgccagtgctggtccaatgtggcggggcggcgctgcgggccgtgtggggcgggctggccgcgcctggggcgtccctggggtccggccgcgtagaggagaagctgctggtcctgagcgccctggccgagaagctgttgcccgagcccggcggcgaccgcgcccgcggcgcgcgcgaggcgggcccggacgcccggcgctgctggcgcttctggaggacggtgcaggcggggctgggccaggcggacgccctgacgcgcaagcgagcgcgctacctgctgcagagggcggtggaggtgtcggcggagctgggggccgactgcacctgcgggccccaggaaggaaacggtacctgcctctttgccccccagcctagtgctacctacttggctgccccagaggggagtcttcctgcttctaaaaactagcttatcggggtcgtcactccgatccatgcagaatttggttattccgcgttgctcccctaaagcctgaaaacctttggaaccccttctcgagggtgttctttgaagtcacaaatcactgcggttgggaacgttctaacccagagccggtggaatacagcacccctggaatagtttaggaagataatggagcccgtgcaagattttacagacccaaatctgcactatatcatggtagattcaacccaatagaaacggttgatatctatcaagttgaaagaaaaattatttgttatttatctgtactgaccagtgaattagtgaattgagtgttgagtgttagaattaagcgtcatagaggccatcacactcttctgaaatttcccctggtaattaggaacaggatttactaatatttgttaaacatgtttcttaagtcgaccttttgagtgtatttttgccattgatttaatagaatgaatcagattttattttttaa

SEQ ID NO: 586 - DNA, 2075 bp, Homo sapiens
aatggccagtcccccatggcagccctgatcttagtagcagacaatgcagggggcagtcatgcctcaaaagatgccaaccaggttcactccactaccaggaggaatagcaacagtccgccctctccgtcctctatgaaccaaagaaggctgggccccagagaggtggggggccagggagcaggcaacacaggaggactggagccagtgcaccctgccagcctcccggactcctctctggcaaccagtgccccgctgtgctgcaccctctgccacgagcggctggaggacacccattttgtgcagtgcccgtccgtcccttcgcacaagttctgcttcccttgctccagacaaagcatcaaacagcagggagctagtggagaggtctattgtcccagtggggaaaaatgccctcttgtgggctccaatgtcccctgggcctttatgcaaggggaaattgcaaccatccttgctggagatgtgaaagtgaaaaaagagagagactcgtgacttttccggtttcagaaaaacccaatgattacccttaattaaaactgcttgaattgtatatatatctccatatatatatatatccaagacaagggaaatgtagacttcataaacatggctgtataattttgattttttttgaatacattgtgtttctatattttttttgacgacaaaaggtatgtacttataaagacatttttttcttttgttaacgttattagcatatctttgtgctttattatcctggtgacagttaccgttctatgtaggctgtgacttgcgctgcttttttagagcacttggcaaatcagaaatgcttctagctgtatttgtatgcacttattttaaaaagaaaaaaaaagccaaatacattttctgacattgtaagattgccttactgtctgtcattccttattgctggcccctttctcaggccggaggccaagtggtggagaaggaaaggaaatgatcgaacgggcatgttgtcaagtgggcatgccactgggaaataccaccagtttaccctgaaacattgtcctcagaggagtaggaaagtggattttgaatctctattttgctcaaaagttcagttcctgagatactgatgactgagagtgctgctgggaaattttcaggattgtgtggtcttttggggttttttgtttttttttttttaagacaaagttgaccgctgttcactgtccacgtgatcagttgtaagattacaatgctgcatgctagttggttacataagatacaattccagtgatggaaggcggttataatggatggtggtgtgtacaagatggcactgccatctttgagcagagcccagctctgcagcgccacttcatctttttaaacaccctagaggtctgtttgttgttgctgttgtcctttattttgaaagagttgcaagagaagttacagtccaggtgaacttggagattgtgggattggttttgtttctgttttgttttgtttatcatttacctgtagtgctattgctgttgatactatcacctataccctgtttctagtgagtgctgaatacagtatggtacaatgacagtaacagccgcgtggtgctgccaggactgcccttgggcatatcagtgacagcccaaatgtgggtggaggaaacctgtaatttccttcttaacatgtgtttgaaataccaagtgaataatactgttctggaaaaaaatgataaactagtggaaattaaagaaattaagggttttatataatagacaggccccacctctcaaaatatttttagaagtctttttgtaaactaatttcttttgatcactattttgcatcagtaaaatgatttttttaaaaccaataaatcatcaattattagaaatagttgtctcacagtgatactggtttttcttttgtgctgttatgatttaacattgacaggaacactattttaaatccttacgttcaggtgtttgtaacttggccttataattaggctgaattatggcttcaaggtctacaatttatgtgtatggttcacagcctagcttctatttacatttgaaaatacagat

SEQ ID NO: 587 - DNA, 1099 bp, Homo sapiens
gacaaatgcaaagcaccagtgacggatttcatgctatgtgtccgacattgagctttcaagtataactcctaaaaaaccagaactgtgaaccacgctagacctaaattccccattctcaggagactgacggaaaccaagtgacaaagtgtccttgcataaaagaaaaaaaatgatttttagcacgatttggcccagaggcacaccagaggaaaacatcctgagggtggtcgggacagccgggtggggcgcgaagtgagggaaagtggaggaaaagcactcgatcactttgcgcggtgttccgaagggaacaccggcgctgcgctgctgcgctgccccgcgggcgggcgggcgccgcgtagccggctctcccggcagcgctccttcggcgcgcggggggagggggagcgcgcgcgcgggagggcgggcacgcgcacgaggggagggggcccgcgcaggcgccgtgcgagactgtcgaagaatcaagtctgtagaagtggagcggtcgcggcggcagcagcagcagcgacggtggcggcggcggagctgaggcgggctggccgctgacgctggcgctggagagcggcgacgccaggagctgtgagagagcggcggagcgacccggggcccgcgccgcgcccgagctccacgccgcccggccgccgccaccccggcgcggcatgccccgccgctcgggctgagcctgccccggcggccgccccccgccccctgcccccccggcctccccgccccccgccccgcactccgtgccggccgccgccgcgacctgctgcgctcccccgcgcccgcgcggcccgtcttcgccccggtctggaggcccgccgcggctccggccgagcccccaccgccgcgcccgccgccccgccgcgccgcgccgcccgcccgtgcccgggccggccggggggaactgctgccgcggctgcagcccctcacctcgcgcccgccgcccctcgtgcaccgggggcgctgcgcgggcgccgagccttcgcgggctttgccgccgccgccgccgcctttgcggccgccgccgccgctggtgggggagacgcggggttggggggggaggagggcgcgcgtggtg

SEQ ID NO: 588 - DNA, 1182 bp, Homo sapiens
aagtttggggagggtagaaacgccgtttccttgggaactggagtgcagtatgagctgggtgtcacttggctctgaacatactggctttgctgtaatgcttgaaaaggcgttggtatcttcattttacagttcattaacccaagtacgttttcttatttaaatgacaactttggtgctttaaaatgaggtaccactttttaaagctagctgtgtcgagttaaagaaaaaatcagcagttttttctcccagaaatgtaattgccaaacactattcatccccatcttaagttttacaaggtgatgtaatcagcttgttgtagtgatgctggccaaatggtgctcagcaggtgagaacaaaaaaaccccagatctcagtgaactaatacacagcttgagcgtttccatgtgctaatgttgcacacttactaaaaaactttggaaatggaaaataatgtattagtgcaacagttgatgtgcttctttgggcaaagatatagttttgttccacaatttgtacttaaaagcgaaagaacattgaaaacatagacttactggctgtagcaatgctggcctgttaactgataactagaacttaggttcacgtttatgtaaagtgtgtaaaacctagtagagcttgcatagtcggcactcagtaaatgtttggttccttttgccccttggtaagtttattttaccatcctcccacctgccattctgactttattaaatcaacatgtggaccagagtgttaatgagatgttattgcagaagagattgagaaaattggtatatcatgcagataacatacaaaatctttttgtaacgtaaaaaatgcagttttattattgcttgtgcctcaactgtttaagtgaatattaaagggcttggagaaaactttggcttggcgtatgtttggagaagtgaactctgctgaatttattgagtctaaagctgtgggttttttgttgttaacgtctttgaggatgtctagggccgcaggcttccctgccagaagaatgcacatttgcttcagattccaggtgaagaaaatccctgtggtagtgtcagcgcctgagggcttccaggtggtggtgggcccagcgtcaggagatagcagtcacctgggaggcccgttacaacaggttcgtgagaggagcccagtggtggtggtgctgacgtgcga

SEQ ID NO: 589 - DNA, 1615 bp, Homo sapiens
ctaagattcaattctttgaatacaaagagcattttattttgaagttagaatcctaattaaatgcttatgacactttaaaaaattattttttttttctttcagagaattgtaagtgctcagagcttggctgaagatgatgtggaatgagaaacaaatgtcaacataataaaatctcagttaaaaatattttaaaaattcttggtagttgagcagctctgggggaataagggcaaatatgcttgttatgaactacactgaaatctaccaaagttaatgtttactttgtgtagatccatttgtctattttatttatttttcccagtgaaaagtgtattttgatagagaacttttcattctataaatacactatgagttactaaaatatcatggattttgtttattcctgaaacatagttacatagttaaactgtacatatgacatggcttatgttaaaaatacccagtgctcagttttgaaagataggcaaaaaaaaaaaagtataggagaaactgaagaatgtacacttttttagagggcacattttgctgtaaatctggaaatttgatagacttgactgtgtttgtgaaaactgagcattaaaggttttgattgatcctttctttccatttaatctctgagacgtaaatatgtgaggtgtgctgctgtgctgggttaacagcttccttccctttctgtgtagcagtcttgaaatgttctgtttaaatcagtaggcttaatgtgttctgggtatttatctccttgtattttaaatatatgtagttgcaaatagcaccaggaattagatttctgtacacccctaatctagccttgtgagcttcgctagttaatgtgtgctcactttccctccatttgttacgtgagagaatgcgtctgctgatcactgaagtgtcccttttagcttctgattcattgggttctgttgggcatctttaaatccaccttaacctgaggaatgtatgtgggcaaccaggccctgcatttttttatattctgaattttgcatgcttgcctgacttagtatttctgaattgatgttttttttaatggtataactatcttgattttcactgaaattatatggttctgtcactactctgtaaattaatccgaaacttttaaggtaactgggatgatctgcttgtaaaaatgcttgttgccttttgctttatcttcagtgtacctccttaatcctgcttcaacttgattatcttgtgaaacgatgagagtaagttgcaaccttgtgactgaaaacttgaaaagagtggagcaggtgggacctcttattctcaaatagtgacatattctccgtagtcacagtttcagaactgagtaaggatccttggtacttggtggcatctgttgaactgaggagcatttctcattgtaaagattgcctttgttctgtctaaaagtctggagaaatcccaaagacttttcctatgtactaggcattttattttgattgacttacaaactcttcttaatcattatcaatctcggtttttttgtggtgcagtggaaggagaaataggtctagtttctgcctctgattagccgcacagccttgaacaaatcacatttcatctttgaact

SEQ ID NO: 590 - DNA, 1123 bp, Homo sapiens
atttttcccgttttgttttccccagacactttagccgtgcaaatgcactcttgatttctgttgcaatctcgggtgtgtgtggcctggggaggaggttgtctctttttttgtcgttcatctttttaaacctctactcttaactaaaaagtcgtgcatttttgtcgcaaattttagtctgaggctaaatccgcatgctcagtgcagtatcattgttgcattcttttttttgagacggaatctcgctctgtcgcccaggctgtagtgcagtggcgcgatctcggctcactgcaacctccgcctcccgagttcaagcgcttctcctgcctcagtctccccagtagctgggattacagtcgggcgtcaccacgcccggtgattttttgtgtttagtagagacggggtttcaccgtgttggtcaggctagtctcgaactcctgacctcagatgatccgcctggctcattgctgcattcttaaaccctcttggtagcttcgttctaagtgcttccaagatatgagtgaatgctatagaaattgcaggggagtccaaagggctgcgcttctcccgtggctcagtcttatttcatacctgcgacatcttttaagagaggtctaccagaggggaatcgtgtcatgaaaaccgttgtgatccaccttgaattttcggagaatcttcattcgcatcattgaagagcaaatttgttgcaataagaaatattttttggcttatcttggttgttcagccaaattagtttttggaattaaaattgatacgtaagttactaaagcccaaggggtacaaagaagggattattgtttacttaagtaacagtggttacggtttaattcagctatactaagtcatttcaagtgttcagtagccctgtgtgagcagtgactgcagcgctgatcttactagcactaagaatcagacatctagttccagctttcttatgttttaggagggaagggatatagacataatttgatttatgactaggcagactaatagaatactgttttacattcagaccttgaatttctagggccaggttagcggcataatttggggtttctgaatcctaatttctgtagttgtaaaatcaggtaatgccacctacctc

SEQ ID NO: 591 - DNA, 1180 bp, Homo sapiens
agtagaatgaaacgctatatgtaaatacaattctgctaaacaaatatttaactgtggataggcacagtgactttataatgcagatagtcattttcatatatatggatatatataaatatacattatattcatatatatggatatatataaatatacattgtattcatatatatggatatatataaatatacgttatattcatatatatggatatatataaatatacgttatattcatatatatggatatatataatgtaatacggtaattgatttttagactaaatatataagttgaaacataacattttctaatttttggaaaattagtggtgttaattctggagactagtaaaaataaatgattagagacgaatacacttcatggtaacaaacatgctggtgatacagctttaaaactttatggaaatttacaacatacaaaaataaagttcactgatgttttacatattcatggcctagcatcaccagttgccaatattttgccatcttggtattatctgtttcactctgctgcccctcttctctcctttctccctcaccatgtagcattttaaagcaaattccagatatcatttcacccatatgtatttcggtatgtatctctgacacacttgaactttcctttcatagtacaactgtcataccattgtcacaatgaataacattaacattaattccttaatggcatctggtagcaagaacatgttcagattagcctgtctctaaaatgtctttgcaatttgttcgtttacattaggacccaaataaagtcttcatattgcagttggaagatacggttctaaatggtctcttaaatctccacccttttcatgccctttatttgatgaagaaactgttatttaacctgtagaatttcccacattctgtttggctgattacatctttgtggtttggtttaacccctgtaatttcctgtaaactgaacattcgttctagagggtatttttttttggtgagcattgtttataagaggtgctgtattctttctattagttaccatcatgaggttggttcactttcagtattgctgggattggtcagtggttttagattatgttggcttgatctatcctttataaagttcttatcaactttcacacaaaggttttcgcagcatctgaggattgttgactaga

SEQ ID NO: 592 - DNA, 1226 bp, Homo sapiens
ctgggagtcagtcagctccaccagagcaggcgcctccaggcagacctgggggaggcgacccagggtacctggtgtagtcctgaaactggcctatgcgcaagtactcgcatgaattaaaagtgtaggccaggcacggtggctgacacctgtaatcccagcactttgggaggccgaggttggcagatcatgaggtcaggagatcgagaccatcctggctaacacggcgaaaccccgtctctactaaaaatacaaaaaaattagccaggcattgtggcatgcacctgtaatcccagctattccagaggctgaggcaggagaatcacttgaatctgggaggtggaggttgcagtgagctgagatcatgccactgcactctagcctgggcgacacagcgagactccatctcaaattaaaaaaaaaaagagtgtaaaactgaaattcttttttcttttctaataaacccctgagttctgtcaatgttaaaaagaagggtgaaaactagatcttgtccctctcaatttgattattttctgcatgtgctatggaggaaggacaaggtgcaaaacgcaaaggacatgttagaaaaaagctttgtaataggcttgtttttatgtcacatgaacatagattctccccgaggagaggcggagagctgagcttgactaccgaaaagcttttggaaatgagtggaaacaggctggtggacataaggatccggaaaaaaacagactcagcgaagaattcctcacagcccatcccagataccagttcctctgcctgagtacgtgcgtatacactggtggccttcaggtggtggatttccagctggaacaaagttttttcttgggtatcaaaagaggttctcagtgttgcttttgcccttcttcctttcctgggcttcttgtattcatctgaatggactataggcactttcctggggcgagggcggcagggcaagagcagtatctttcagcaggaggaacctgggagactgtttatgttcttgaaatggagaggtttgcatttggggaagggaaagcaattcttttatttttaagagatggagttggccgggcgcggtggctcaggcctgtaatcccagcattttgggaggctgaggcgggtggatcacgaggtcaggagatcgagaccatcctagctaacacggtgaaaccccgtccctactaaaaatacaaaaaaaaaaatgagccgggcgtggtggcggg

SEQ ID NO: 593 - DNA, 1523 bp, Homo sapiens
gtggggtcctaattaggaacaaggagccaggctggtgggagcaagggaaagcagaaagaaaatacagataagctataaatctgcgtttcttcatagtctaggacacatagcccatctgcgcaaatgactcacgatcttcctgcacccagatatcaccagaccctcggttgatagaaaaatgcaagttagttcacagccaccttgacattatcaatactgcacttagccctctccagcacacagaacaagctccatcctataaaatccccaggaagcctttgtctcctccagtcagctcctctcttgctaactggcctattgctttcttgcaacatatttccatgcttttgctaataaatctgcatttctgtacctatgactgtcttggcaaattctttttactgcccgtgccactggccccagacagtaaccactcgtgacacaagggcattgactgggaagctttacagagagtgagtcttcctggtgcaggggtggagggtaattttgagactagctgatccctcaccctccctggaggagtggggactagttagtgaccagtggaactaactgtgccatcctgtaggaccccaatctgagctctctctgatttcgaatcctcccatttcccaccatgaacctttcctaggaccagagctttatttttctgcttctcacatttggattctcgtctttttatccttccctatttgcttataaagactgtccatgagctgggccatgtgtacatttttcttgctttttatggccttatcctggttggacttctcccatccagctgcttcttcacccaccaccaggtgactcctggttgagaggagaaataggctgagcacagtggcttatgcctataatcccagcactttgggaggctgaggtgggaggattgcaagaggccaagggtttgaggccagcctgggcaacaaagtgaacttctgtctctacaaaaaattttaaaaattagctgggcacagtggcatgcacctgtagtcccagcagcttgagaggctgaggcaagaggatcacttgagcccaggagttcaaggctgcagtgagctatgattgcaccactgcactccagcgtgggcaacagaatgagaccctgtctcaaaaataaaaattttttaaattttaaaataaagtggaaagagaaataaccagagccagcctccctggcagactgtcttgctcggaggcttcccagcactgtcccgccatatggtacatgagaagttctgtcatttcaggtgaaggggtgctggcacagagggcagatcttgtcatctgtggcttttttggctcctgggaagaagtggaacttatccctgcttgtctccatccccagcctgccattcataccaccagctctgctgctcagggacaagtctccatgaacaaccatatcgcagggaccagcagcaggctgtcactcattaaaacaacaacaactgcgtcagactctacatcgtttttcctggaaagtatccagattatttcca

SEQ ID NO: 594 - DNA, 1128 bp, Homo sapiens
aattttgtgtttaatttcatatgttttcatgtaatgaaaattctattttttttagaattggttttgtttttattctattatcctttatttccagttgtcaaactttaaatggctatgtctgcattctaataacactgttcagtctgttatggaaaaggagaactagggaacaaatgttgctcagggctggtgtcagtgagaaaaatttatcaatgctttttaatgtgtttttacccttgcctcactgtgtgtgtgtcactttctataatataaagaaatactataatatttctagaatctggaactgtcaccatgatgaatggccctttcaatgcatagttacagaaattcctgaagattccccaggacttcaatttcattggtttttatttgcagtttttagttgctgtaattgttgctgtttccagtctaaaggacctcctttggtaaaggtgaacaagacctctcccctatgctacccagccagattttgtgtgtgtaatgggctggcccaagagtgttcttttacttagaactccttttgattttgcttttctctgcccctagaaattttagggacaaagacattttggaaattgtcagttacttttagaaagaaaacactgcagaaatatttaacagattacttcttgataaaatttaaatgggattatatgaatttataatgccaattgaaaatattatatacacaaaatttgctattttcacttaaagtaagcatttttaaaggatttattttagaatacaatctatgcaatcctcgaactcagtgtgcttttccctgacaggatatataaaaaggtagattaggtcaaccctcctttaagcttactctcccctcaccttttcttttcactgtatataaacggtactttctgtgattcataccaacagaggactttctgtgattcataccaacagtcctaaactgtcattttctaaatctgggatttaaaatctttagacaatatttaaaatcttgattttttttaaatgtcagcagatacaatttggaagattgcatctgtgtagaagtaatgcaggtacaagatctagagtttttccttagactctttagtcttttctgaattaaagaataagtgctct

SEQ ID NO: 595 - DNA, 1253 bp, Homo sapiens
cagcttgtctttcaattttgttagctacttcatatcttttcttaataaaacttctgttttgtttgttagccaacaaaaataccctacctggaatacctaaactattactttttcatttgaaaaatgtgactaatattgagaaaattttggtgtgaagattaaacgagatattcattcaaacattcaaatatttgagtacttctactgaccaagcctgctagggatagagaaacacaagatacaaacccaaagtgaaggagtgaaagagtgagggacataacattatgtagagatgtgaactggaccacttgtgaagagatggtttttgatacaagaaacacttcccccactgtattacattgagcaatatgaaactggcatgttcaaccatttttgaaatataaaagtaaaaatttcatatagttcaatgttatggtagaaaagaaacaagagaaagcagctacaaatgcacttagatttatagatttagtggtggaaatttaaagaagcacctgtctctccaatggcttctcggccttttggctaagatcaagtgaagtatctgttaatacctgatatgtcctctacccgagaacaatatattacatggatttttggagtagggagatggaataggagcttgctccatccactcctcgcatcgacctggtattgcagtacttcaggaacggtgcacccctccgggggaaaaaaaaaaaaatgaaagaagcacatgtcttattcatatgtaaaatgcctagagtaacagacactcaatagtctatttaggtatagattactctttgaaataaattcatgaaatatgctttcctaaaggattttgtacagaggagaaacatacatcaccttttttggatgttcctggtgctgataagagagatgtgttcccaaatctttaattctcttatttgttatatttctgcacaagatactagtttttaatcatcaaaaatatttaatttgaccagcctagccaacatggtgaaacctcgtctctactaaaaatacaaaaattagccaggcgtggtggtgggcgcctgtaatcccagctactcgggaggctgaggcagaagaatcgcttgaagccaggaggcggaggttgcagtgaactgagatggagccactgcactccagtctgggcgacagagcgagaccctgtctaaaaaaaaacaaaaaaaaattaatttagctgacgtaagcctagaaaacaaaaagacacatggatagataga

SEQ ID NO: 596 - DNA, 1177 bp, Homo sapiens
tcagaaggtctcttcagagctgctgtgcccagtggtgcttcaactggtatctatgaggtcctagagctccaggacaatgataagactcgctatatggggaagggtgtctcaaagcctgttgagcccatcaataaaactattgcacctgtcctggttagcaagaaactgaacgtcacagaacaagagaagattgacaaacttatgatagagatggatggaacagaaaataaatctaaatttggtgcaaatgccattctgggagtgtccctcgctgcctgcaaagctagtgctgttgagaagggggttcccctgtaccaccacatcgccgacttgtctggcaactccaaagtcatcttgccagtcccggtgttcaatgtcatcaatggcagttctcatgctgtcaccaagctggccatgcaggagttcatggtcctcccagtcggtgcagcaaacttcagggaagccatgcccattggagcggaggtttaccacagcctgaagaatgtcatcaaggagaaatatgggaaagatgccaccggtgtgggggatggaggcgcgtttgctcccaacatcctggagaataaagaaggcctggagctgctgaagactgcgattgggaaagctggctacactgataaggtgatcgtcagcatggacgtagaggcctccgagttcttcaggtctggaaagtatgacctggaattcaagtttctcgacgaccccaccaggtacatctcacctgactgtctggctgacctgtacaagtccttcatcaaaaactacccagtggtgtctactgaagatccctttgaccaggatgactggggagcttggcagaagttcacggccagtgcaggaatccaggtagtggaggatgatctcagagtgaccaacccaaagaggacagcctcggccgtgaatgagaagaagtgcaactgcctcctgctcaaagtgaaccagattcgctctgtgactgagtcccttcaggcgtgcaagctggcccaggccaatggttggtgtgtcatggtgcctcatcattctggggagactgaaaataccttcatcactgacctggtggtggggctgtgacctgggcagctcaagactggtgccccttgctgatctgagcgcttggccaagtacaaccagctcctcagaattgaagaggagctgggca

SEQ ID NO: 597 - DNA, 1257 bp, Homo sapiens
caaagtacatcccaggactaaatgggaaagaggtaatatttctctcttcttctccccaggactcctgaagaaaagaatttcttacaaatgctttaatattcaggcgtgggttcaagtgtagagcaatatcctttgattttcctgctagtaggtcaacattaaagcttttgagaaagaaagaaaaaaaaaaaccttaattaaccaagtaggacagagtagtggcaatttcagcaatgttagtgaccagacttgaactatgattctaactctatgaaacacacgtatccacatggacatgggaatgcaggtgaagttgaaattttaaacccagtcagcattccactaattcgttacttgcaaaataaaaatacgaaaaaaaaaaccctttaaaatcagcgttgaggctgagatgtggttggacagaaatggaaggtttaacgctaaactgaatgactacttcaggctgcaggagcctgggatcctctcaagcaggtattctcttttcatcatctacccgtgttccttccttcttgaaagtatgccactttctaggaaatagctctaatttcaagctttcagaaggctggacgtctgtggaaaaagttgttaaagcagaaattttctaaatcacatgacaagaggggccctaaaaaatgttgcctgggctgggcgtggtgactcacacctgtaatcccagcactgggagggcgaagtgggcggatcacttgaggtcaggagttccagaccagcctggccaacatggtgaacccctgtctctactaaaaatacaaaaattcaaaaagtagctgggcgtggtggtgcgcctgtaatcccagctactccagaggctgaggtaggagaatggcttgaacacccaggaagcggaggttgtggtgtgctgggattgtgacactgcactccagcctgggtgacacagtgaggctccatctcaaaaaaaaaaaagaaaagatgttgcctgatcttacggggctgctctggagttctacaaggcaaggataggcctcgtggacaaaaatgctactctcttgtctggccagaaaaagccgaggtcagaacacggccttagtcggctctgctgcccactggctgttcacaatctaaccacctcctgcttgaatcatctcactttggaaatgaagattctgacgctagcccttcttccagctcacaggaccgttcacgggtggaaggcggtaacaggcacggaagtatctgcactgtgactggtaccgaagg

SEQ ID NO: 598 - DNA, 1240 bp, Homo sapiens
tccatcctgggtgagagagtgagacttagtctccaaaaaaaaacaaaacaaaacaaaacaaaaccaaaaaaacaaagtgtagcaagtctgtgcaaactagaaattagagatccaaaaatgaaagagagaagtatcttgcaagtgacttgtagggcagtagtaagattgtttttaataaagcaaagaaagaacagtgctgagaaagccttgggatcatttgattataatgcagaaaataaaaatgtgcttttgctgtatgtgttccccatttagcacagtggaaagaggggtcctaagtaagtcagatctatttggggtcattttaccttcagagcagatgtgttcttgacactgcaatttataacttacatgcacatattaggaatttatttgtttaggccttcatcttgtcattctttaggctagttcttaaaggtggtactagctggtctacccccctccaaatctgactagggctttaaccacttatacctatgtttattctttggaacacttgctgtgaatcagaatattgttagctagaaaataagatgttaagggcacggaaaaaaaccccacaaaatatattggctaaatccactcaaaactggagaaaatactgtgtgatctcttaggctcactagccaaggatgttccttgggactctcctctgcactgcggttatttacatatatacattaaacataaaaatatttctgaaatagtgttataactagtcagctaagtaaaggaactgcaaaactatattcttatatttactgtgaaagataatcagaaagaatctgctttatttagaacttgactagtcagtagttaagtatacagaatgttctagacctaatgaactgaatacagataaatacaattttgttgttcttcatggaagagtgacatttcagtagatccccactctgccaggggaaggaattgtcaaggtgacttattcttttgagcaagttctgatagtaattggaaactggtgaattagaatggtaattaaagcccagtgaaaaatgacctcctactggaaaaactggaggaatacagaaggctaaaaatagtgaacacttaataccaacagattttctgaaggaagacttcttagtttctctaaatgggaaatcttacattatcctctaaaggaaaaataagcaagtagttgaggaaactatgtttttttttttccccctttttcttgagacagtctcactctgttgcc

SEQ ID NO: 599 - DNA, 1197 bp, Homo sapiens
actgcactgggccaacccaagacatttctaacaaaaattttacctaggagtgattgaacactttttgtttgagactgaaattgctcaccagacaggtttcttctctgacagagttggtgtaagagcagagacaaaatctgcgggcttgcagccctttatcacagagagtgacttctactcaacctgtgacctctctgcatcagtgtggcatgtttctcacagccatctcttaaccggttgattgaaatgagctatggaaagaatgatatgtttcagagatgttgaatggggggtacatgttcaagaaattcatacgccttccctctcactcctcagctcatacatgggaagtggaagttacgtggcaggtgtttaggaacagctgccttcagcttacttgtttaccttctgtccctgccacctttctttatttggtttcttacaaaagatcatgttcttaaactatgcattgtaaaccagcaatagttcacaggtgccagacctacactcgagataccctagggccattcagaggatattgatgactgatgtgctgggtgtgatttattttttgcagcatttgatgagcttgttgaagcataccaagagcaggccaaaggacttctggatggcggggttgatatcttactcattgaaactatttttgatactgccaatgccaaggtgagttaagggagaaaaaacagacaaggctggggtaagggctgtgggtgagtcccctaatgtagggagaagataatattagccattatcaaagttaaataaattacctgtatttgctccattttattcttgagtatttttaactgaggccagtacaataagaaaaactttaaacctgcttttgaagcttttaaaataacttttttctaattatgaaaataaatattttcatatatagctagtataaatgcatatatcctgaggtaatacatgctgctggttctaaatttgaaagatacataaatatatggagtgaaaagtgaatatcctttcctttcctagtctctagttatccagctccctttcctgatacaaccactattaccagtttgggggtcctgacagatgcgatacagatataggcatgtgtgtatgtgtgtgtttgtgttccttacatacatgcaaaggcacataagtgtatatggagagagaagcaaatatccttatacatac

SEQ ID NO: 600 - DNA, 1287 bp, Homo sapiens
tggatttcatgggcaaagtctggcttgaagataggattcctttttttgggaattatttgtacatgctatttaaaatagtgagactggctgagctcaccaaaggaatgactgtagagaagtcctaggactaagtgagtcttagagccacagtgcttagggcactggggagaagaggaaacaccatcagaaggatatgagaaggagcagcctgtatggtaggaggggagtcagaagagagagttcccttggaagccaagtgaagaacaatcatcaaagaaaagggcatgttcagctgtttaaagagttgtagatagatcaagtgggatgagaccaagagtttaccgttggatttagaaatggggtcatttgtgatcttgctgtactgtttccaaggagatgaaaactttattggagtgggttcaagagagaataggagaagaatagaagcagcagtataggcaactttttacagttctgccataaggggagcaaaaaaatagggtggaaaccaggggggaaatacgaggttcagaaagggcgtgtgtgtgtgtgtgtgtgtgtgtgtgtgtgtgtgtgtgtgtgtgtgtgtagatgctgtgacaacatgtttttgtaagctaatgagaatgatctgggagagagagggaggaactgatgcaggagataaaggatacatttgccagagccatgaccttgtgagttgagagagatggcagtcactgtgtgagtggaggggtggctttagatcagtagctggacagtttgctcaaagtacaaaagagaaggcagagtaaagagtgcagatctgcaggcatgctggttgatgtgctggcgggagtctataattgcttctgttttctcagtgaagttggaagcaaggtcaactcagagtgagaatggaatgttgtgccttagggatctgtggtgcttaactaggagtgcaaagcagactcactctgacagggaaggcagtcactgctggagcttttgaaaaatcgtacacactcctggacttcagcccttgagttttgactcatttggtctgggatgaggcctggctttagacattttaaagccttggaggtgattctcatgtatcttttggttgaaaaccaccagcagaggttatttcgtttagtcttcagagtgaccaccgaggtggcggccattgcattttacagtggaccagtgtcatatctaggacatggtggaaccaagtttttacctttggtcttcctcatttgaagactggtgtatgtttccacatcctgtgtttactctgtgctt

SEQ ID NO: 601 - DNA, 1486 bp, Homo sapiens
tggtatgtatggaatactccagtaacataaatgaaagaacaactcagttggatgggttggatcagctaaagctcaaagaagaggtaacatttagtttgattactaactgtaaaatagaagctcttggggtacgtttattaggagaggtcattctgggcagaggatgagaagaagcaaaaatatgtaagagtgaacatgctgaaggttaaggaattcagtgtaaccgtaacaaaggatgccttccagaatgtggctggagattaagatggataaaaggtagaacaagtccaagttgaaaaggtcttgtgtgccatgtgaaaaggttagcatctattacatagacaagggaaatccattggaaatttgaagaaggggattgagcataatgaaacttgttttggaaaaatatgttgttattaatgtggaggtgggcaagaatgagaataatcagtagcaatgaggtgtcaataatttgatactgtctacatggaagacagtgattagagccatggaagtcagaatgaaaaatgataaatgtgaaaacattctagagaagaaatgaatacgcgaaggcccgtggtgggtgatgacatgatgtgatttctgcccagtgctctgaatgtcaaagtgaagaaattcaatgaaggacgggtaaacggcgggagtaactatgactctcttaaggtagccaaatgcctagtcatctaattagtgacgttcatgaatggatgaacgagattcccactgtccctacctactatccagcgaaaccacagccaagggaacgggcttggtggaatccgcggggaaagaagaccctgttgagcttgactctagtctggcacggtgaagagccatgagaagtgtagaataagtgggaggcccctggtgcccccctgtcccagcaaggggacagagtggggcaaggccagaggtgaaataccactactctgattgtttattcactgaccccgtgaggtggccccaaggggctcttgcttctggcgccaagtgcccggccacatgcacatgccaaattgtaaagaccatcgatgctaggaagaaactgcgtcaactaatgagcaaaataaccagctgacatcataatgacaggatcaaattcacacataacaatattaaccttaaatgtaaatgggctaaatgctccaattaaaaaacacagactggcaaattggataaagagtcaagacccatcagtgctgtattcaggagacccatctcatgtgcagagacacacatatgctcaaaataaagggatggaggaagatctaccaagcaaatggaaaacaaaggcagggattgcaatcctagtctctgataaaacagactttaaaccaacaaagatcaaaagagacaaacaaggccattacataatggtaaagggatcaattcaacaagaaaagctaactatcctaaatatatatgcacccaatacaggagcacccagattcataaagcaagtcct

SEQ ID NO: 602 - DNA, 1936 bp, Homo sapiens
cctctaaattggtaattgaattacctccctgtagctttatagtttgtgacatttcttgaccttgctagttctttcattagatctgcgcaagatctagtcatctggttaaggattttaagcagatgcaactataaacccaagaaactgtattactattactgttggtcatactaaacctgtctatttcctgaagtatatgacccacaaggatgtggaataactaggagaaactgtttttgtacactgtacatccttagtatttttacacgtatatgatagggatgaacatgattttccttcgtacagacagcttaaataaagcactatgtcaatctgctacttctctgtttattgttgttggatgtggttctataatccccccaaattaaatcttctttaatgaaaacatgatttttaatagccccagctggtattaacctaccttgtataaaatgtgacaggaaaatatagaaataattccttgtagctcacacacacacacataggggatcatttttacttcagtgaaatggcagtagtgcggttgtgcaaactttgatgaacggctgcttctgaggggaaacgctgacctctcagcactggatttaggatggatgtactgtgaagccagggatgaaggaggtctcagaccctggggacattcagacccgaatcatctatacaacacacggtttggacccagaatctgaaggaatgtagcttttcattaacgtcttcctgataatgtactgctctgcatatttcctttcttagagtgtatttctaacaacatgtcatggcaaattaacaaacttagacgtgggtgatgtagatgggtaggatggctggactgcagtctgacttcacgttgaatcattctggatggggcctttttctgattttacctcataaagctactattgtagaaacttggctttgctcctgtgacgaagccagacagaggaatggcttttgggaccagagtgagtcaagcatgtatgtgtatgtcacacggccaaatttgagggcattctcacatgtgctcttctctcaaaaccactggggttgacagatccaggaggctaaaaaaaagtgacctctataattctttaaaggtgctatttttagaatattgtataatttattcacagtatatctaaaacagaattaaggacaattaaaatatcttatgtgacagcctttatgtctagcacatttgatgaaataaaaaacttctgaatctgaatagaagttctactgtttcaggcttgaaccttttacatgctcaagagattcaaatggtctctgtgtgtagatcatgccaccgcctccaaagcctaatccacatcacttctgagaggcaaggctgagcatatggtgacatcagctctgtgttgagatggtgatgaggatgatggctcgctggccaggcagggcagccgaaggtcagggacctgtcctaactaactgcagccttgcctttagtgtttgtcattctcagatacaacacggtatgtccagtgtccgtttttattactttaaagcatttgagggcttaattgtgtatagtagaaatactattttagacaaataattatctgtgtacagatatttgatatactctaagtaaattttctaatttcactaagtacgtttttaggctcctctcaaatactgcgtattgaagaaaaaaatctgacaccaccgagccaaagatgcttttttgtctgttttcgttgtttaacagaatggaaagagtaatgcatagtgcttcctggtgtctcctgattgattgattgtgcacaaagtaggacgataaataaataaaatggagtctgatgggacattgattaaaggtgaaggatgattgatatatagatcatgaaaagaaaaatgaatggcaggaaaaaaagtttggtccttaatatactttggc

SEQ ID NO: 603 - DNA, 1176 bp, Homo sapiens
tgtgtattatctttgtttcaacaactgtggttttatttcccctcagtatttgattttcatcaagcagctgatggtatccaggaacaacagagacaagaacaagcaggaaaaaagtatgtgtgggtttttgtttttttggtacagtttaagcatatgcagacctttatattttagttctagaccagaagtttaagaaaaataagtattagaatatcctgttttagagaaaatcagtaggattatgaacatatacttagcaagaaataacataaacagaaaatagtcatatgtaactttattcactgcaatgatctgaccaggagacctacatctttcttgtctgacttaaagcttgtttggatttgtttttaagtttgggtacaacaaaaaagggcattggcccagtttattcgtccaaagctgctcggagtggactcaggatgtgcgaccttgtttctgactttgatggcttctctgagaggtaactaacttgtgtttcaaaatggaaggaatgaatgcattttttgattttttttaaaatctagggtgcaaaatgatacagtcggtattctagttaaatagtggtggttggcttttttaggtttgaaatattaaagttatttttattacattctaattcatccttggttacagattaacttcatgaaatataacatgacggtgatttaatagaatgtcctaagaagacaaagccagagttatatttaagaattgaaatatggaatggtttcctgagaaatagaatgattccaggggctgtggctgtccttgggtggttacattctaaggtcttgatccttgcattttcaggcctagagactccttatgtcctcccacccagaaatcattagctctcagatactggtgaattattgtataccaagctcaacttgaaatcaacagatgctacgttaacacatgctttctgtagccagatctccttgggaaacctagtagtcatcaaaaagctactcagtgactcaatgatagggagttggttgtgtataataacaagtggcatcaaagctataatgacattgtatcccctttcgatcaaccactcaacatttgtctgcactggcagtgcacctttactgaagaatattagattgctaatgtctgcctctctctcttttagaagtatcatgtaaactg

SEQ ID NO: 604 - DNA, 1253 bp, Homo sapiens
gaacatcccatctgtgcttaaccagaatccagcaagtcagcacacaagtgattttattgttattttgttgtatttacttgcatttgttgtatttactttcatctgcagcatttggagtttaaaaataatgtaaagggttctagtagaaatagtgtcctaaggccaattacctaccatactaacaatcagcagataaaattctggacgtgagattccttataatctaattatacctgaggttgagcaagaaatgtcttcctttagaaaatctcattcaagtcaggttcttctctacagttcaaaattgagaatggatttaattaactagcatttagccagctttttcttgcccttggagaaaaagaatcattctcaacctgataatctgttaagaaaaatcccatatgaacaatctggtcattaacatacatatgatacggagtctctttgttgtcaccaagtgaacatacttctcatggtgggttggacagtaatacatgttagagggtcagaagcttctggtttctgctgtttgctttaaatacccttggggtttttttttaaacccttacaaggggagcatcagctttggaaagtgtgactctgtaggagtgtagaaggcagtggtgtatgatcttagcctcgtcctgatgcctgaatccagccagctgttgctctgacccacagcaatagagcaagttacccatcaccagcatttgtacagagcagggaattctggttttagtccattggtagcattgtgtgtatgaggagattcaacaccacagacagctgcaggactcgatatccatggcttctttccatcacaaaacgggtagaaacacattcactgcttcagggttctaatctgtgtgtctccttatgactccatttctgtaagctactctgtaactttgatatatgctgtattttctttctttaaaagatttagatgttttttcagcaagctagccatacaaccattgtatctctttctcttcagtatggtttagagcccagatcagttagtaggctttcgttgtcttctctttcaatacatgtacatctttactgtttgaaaagtgttacagctgtcaaagaatcttcatggacctgaagataatttcttgtgaagttgaatgcaagtgtactgtcattcatagtgtttatatcaaaataccaggaatcttcacttttgctaccttgatatagcattgggctatcatgttacaacattgaaatacattgattta

SEQ ID NO: 605 - DNA, 1070 bp, Homo sapiens
ataaatgtcttgttttcaaaagtggatggaacttggctgggtgtggtggctcacgcctgtaatcctagcactttgggaggccaaggcgggaggatcacttgagctcaggagtttgagaccatcctgggcaacatagtgagacctggtctcttgaaaaaaaaaaagtggatggaacttgtagcagagaattttatctacttctcaacctgcttcagaatacccatttgagatgttcccctggaaagatgaacacaatactgcatctgaagccatttcttcccacctaacattcttaaaatgattagagtctaaactttgtcattcattcctaattctggagctctgaggttgaggtgttcagagtttggtgaataattgggtttaagttttaacattttagtaataataaaagcaaacacatacatgttaaggcctgacaataggttgcaatacccatgcattgggactcatacccagcataaatggtgagggactgaacattagtgctttgagcaagaattggttaactacctgagatctctaaaacagtaatttgaattactaatacataaaccacaagtctcttcgaattgttaattgcctaaatttaccctaaaacttagttaacgctgcagtgcctttattaaagcttttttttgggggggggtgtgggcacagctactccataactttaaattttaaagcatgaaggtgatctagctagtgttagtgcttgagttggtagttacataggctgctcttgaatcgtcctgttttctttgcctagtattagcaccacaggtacatatttgtaaaataagcattaaaagtactttgtccagctaactcatgttggagtgacctttgtcttactaacctttgttactaaacttgttaattagaataagcccttgagaatttggaagtgagctatactactaatgtagtatatatctcttgagtgtgttggagtagatgaaaaaccaggggtccccaagggtatatttttgaaattgaacagaaacaattcatcttaatatttagttttcattatgtttagcttaatatgt

SEQ ID NO: 606 - DNA, 1366 bp, Homo sapiens
tatcaccaaggatattattgaatacccaaataaaacgaactgatacatatttctccaaaaccttcacaagaagtcgactgttttctttagtaggctaactttttaaacattccacaagaggaagtgcctgcgggttccttttttagaagctttgtgggttgattttttttcttttcttttttgtacatttttaattgcagtttaaaagtgaatcgtaagagaacctcagcattgtgcacgataagagaatgtgtcagtatttcagggttctacattttatctgtaaaatgtgacttttttttttttttatcacaacagaagtaaaatgttgctttgtacctggtgtcttttattaagaatttactccccccatttctcacagagaataacagtcgggagtcattgtcacaatataatagaaatgttagcaaccagattcatgtaaggactaagtggtcctcatgaattgcattaagactctgtactgctcatattacactccatcctctctgtagtttgctgggtagtggagggggtaagctaaatcatagtttctgacaataactgggaaggttttttcttaaaataacaatggaattggtataattgggattgaaaactaaaacttggaactaagatagagaagatggagtgtatgtagaagggctgttaaaaatgtaaaacttggttgcattatttgtggaggctcaaacttgtgaaggttaataccataatttttccatttgttctgcattttgattctgaaaagaaagctggctttgcccatttcttattaaaaaaacttgttgtaaatccagttgtctaatgggatctatatgaagttagccatgtctgtatgcccttctcccacaaaatactgtataactagtgtgcttgtagtagttaactccaccatctttgtaagctaatgaaattgtgagtcacccatttatatcttaatttttaatcatgtcagttcttgaatgggtatctccttagcctgctgatttctttttctttctaaagaaagtgggtggagaaattaatttagacgtttgtttgcaataaaaagaattcattttactcttgttttgggattctcgccatcaaggttcaaaatccctttatataactcccaagaggagaaatttattaagtgtgtgctttctggacagcttattctttactctgcatagaacatttaggttttaaaaacttaaatgtatactgacaattgatacataattatgaagtaaagttgaattcttcccttcccctcccccccagacaacttttaacatatttaatgaggggaaaaggtactggctgggagaagttaacactgagtttatcatctttacagaat

SEQ ID NO: 607 - DNA, 1188 bp, Homo sapiens
gagcaacaaaatacaccagtccctggattagtgtaaagacttcattcagcagttgaattgggaaaacacaggacatttttgaggaactcactaattcattttgactgaaaacagtgaacatgaaattgacctagaaaattcagtctagcttctaggtcagtattgtttctggttctggagatacgtgcttcatggtttacaaccatcagatttcttaactgtgtagcccttaaaggccacctaatagttctttaacctgtagcttccacaggataagctttgctcctaattttaattcttagttttttagaaagtttaaggaagcagattttaactgttgaatttttttctgtgtaacagaactttgaaagtgatgaagtagaactctcgtatgctaagaatggacaagatcttggcgttgccttcaaaatcagtaaggaagttcttgctggacggccactgttcccgcatgttctctgccacaactgtgcagttgaatttaattttggtcagaaggaaaagccatattttccaatacctgaagagtatactttcatccagaacgtccccttagaggatcgagttagaggaccaaaggggcctgaagagaagaaagattgtgaagtaagggatttttttttttttaactgtggcatttgaatattgcttgcctggcacaaaatgacatttagaagaactagatgattagtctgtttcatttactttgtgctgtgcatattgctcttaagtaattgtttcccccttatgttgactgttaatctttccataaacaaatttttgtccgttagtgtaagggctatgaaaacttagatatttaaattggccttaacaatatttaaagaattattaggtggtgtctactgacagtgaaatgacatttcttttcttttcactaggttgtgatgatgattggcttgccaggagctggaaaaactacctgggttactaaacatgcagcagaaaatccagggaaatataacattcttggcacaaatactattatggataagatgatggtaagtaaaatgtttagggcctgatctcagtgtttaaaatagactgggagaggctgggcatggtggttcacgcctgtaatctcagcattttgagaggctgaggtggatggatcacctgaggtcaggagtttgagacccacctggccaacat

SEQ ID NO: 608 - DNA, 1186 bp, Homo sapiens
atcatgcagtgagtcggttgaactgaaaggcggtttccttttcctccatttgctcagtcccaattggaagcgcactgcgcggcctccaccgcgctctcggcccgggttcggcgtgggggcggggaggtaagtacggtaatgggcggggccgagcgcgggcgcgctccggctttcctcctgcgcagtgctcccgtcagcgcagggggcggggcgcctatattacgtgcgcggcgccgctcctgcgagaggacgttgcgtgctcgctcgcgccaggcgagtctccgcgtctccctcgcgaactcggtgaaaggaattggcgccgttcgacaccaggcggatccgctctgcagcacgaacccatctccagccgcagccgcagccgccgcccgggccgaggagcagccgcagcagccgccaccagtggccgagtgagcggagccgagtttgaggcagcgcctagcggtgaatcggggccctcaccatgagttcctcgcctgttaatgtaaaaaagctgaaggtgtcggagctgaaagaggagctcaagaagcgacgcctttctgacaagggtctcaaggccgagctcatggagcgactccaggctgcgctggacgacgaggaggccgggggccgccccgccatggagcccgggaacggcagcctagacctgggcggggattccgctgggcgctcgggagcaggcctcgagcaggaggccgcggccggcggcgatgaagaggaggaggaagaggaagaggaggaggaaggaatctccgctctggacggcgaccagatggagctaggagaggagaacggggccgcgggggcggccgactcgggcccgatggaggaggaggaggccgcctcggaagacgagaacggcgacgatcagggtttccaggaaggggaagatgagctcggggacgaagaggaaggcgcgggcgacgagaacgggcacggggagcagcagcctcaaccgccggcgacgcagcagcaacagccccaacagcagcgcggggccgccaaggaggccgcggggaagagcagcggccccacctcgctgttcgcggtgacggtggcgccgcccggggcgaggcagggccagcagcaggcgggaggtaagaagaaggcggaaggcggcggaggcggcggtcgccccggggctccggcggcgggtgagtgctgcgtt

SEQ ID NO: 609 - DNA, 1346 bp, Homo sapiens
ggtatagagagaaacatatggaccaatggagtagcacagagagcccagagataaattcttgcatagccaaatattcttcaacaagggggccaagaccacttgatgaggaaaggacagtttgttcaacaaatggtgctagaaaaactggatgtccacatgtaaaagaatgaagttagacccttattttataccacattacattagttaaaaattaacctcaaactctaaaataccttcaagaaaacataggataaaaacgttatggcattgaatttcccatatacaataatttctcatatacaacaccaaaagtacagttaaaaaaaatatggatgtgagggtgatctggctgtggcacctgtcaccccattgattgccagggttgatttggctgacctggctgactaggcacgtgtccccttcctccctcgcctcccgaagctgtgcgcttggtttaagaggacaaccatcccagatagaggaggactggtctccggtcaagggtataagagtagctgcactccccggctagaaccttcaaacaagctctcaaggtccatttgtaggagaatgtagggtagttaagcttccaagactccagacacatccaaatgaggtgctgcatgtggcactctgcctttcttaaaaaaggaagaaagaaagaaaaagaaagaaaaagaaagaaagaaagaaagaaagaaagaaagaaagaaagaaagaaagacaaatgagactacctcaaacttaaaaacttgtgtgcatcgaaagacacaatcaacagagtaaaaaggcaacctacaaaatggaagaaaacgtttgtaaatcatatatttggtaagaggttaacatccaaaatattcacaattatttaatatataagtaatttctacaactcaacaacaaaatatcaaataatcctatttaaaaatgggcaaaaacctaggcacagtggtgcacgcctgtagtcaaaagctactcaagaggttgaattgggaggatcacttaagtccaggaattcaaggtgagcctgaggaatattgcaagaccctgtctctgtaaaaaaaaagataaataaaataaaaataataaaaagtttaatgaaaaaaagaaaaaaaactataaaaaatgggcaagggagttatatagacatttttccaaagatgacatacacgtggccaacaggtacatgaaaagatacccaacatcactgatcattagaaaaatacaaatcaaaacctcaatgagataccacctaacacccattaggatagctactattccccccaatcccccacccaaaaaaaccccagaagatggcaaatgttggtggggatgtggaggcattg

SEQ ID NO: 610 - DNA, 1204 bp, Homo sapiens
ctttttaaaaaagggagcttggggcagaatgaaccactaaaaagttattggctcttaactcctgctttttgtagaagcttgacaggcagctgactcagccagacctgaaaccctttccccggttcttgttggcatttctgactttgccatttcagttggcactgacccttccaagactgtgtatgccaggagggagcatctgcccccatctactctctgggaagatgtcctctcccaagagtcaagagtgtcttgttctgaccgtgggttacttctctgtgtctgtctgagaggggaaagcattgtcatcacacaggaggtagcaaatacctacctctttttttttttttttttttttttttttttgagacggagtcttgctctgttgcccaggctggagtgcagtgatgcgatctcagctcactgcaagctttgcctcccgggttcacaccattctctcgcctcagcctcccgagtagctgggactacaggtgcccgccaccacgcgcagctaattttttagtttcaccgtgttagccaggatggtctccatcttctgaccttgtgatctgcctgccccggcctcccaaagtgctgggattataggcgcgagccactgcgcctagtctgctctggtttctaatagaagtaggtatttgcagctaggcgcggtagctcatgcctgtaatcccagcactttgagaggctgaggcaggcagatcgcttgagcccaggggtttcagactagcctgggcaacatggagaaactccatctctacaaaaaatacaaaaaattagccaggtgtggtggcacatgcatgtagttccagctactcaggaggctgaggcgggaggatcacctgagcctaggaggtcaaggctgctgtgagctgtgattgcaccgctgcactctagcctgcgcaacagagtgagatcctgtcccctccaccccaaaaaaaagaaaacaaagaaagaaaccagaacaccaggtgtgtcttcctgagttttcaccctgatcactgcctctcctgccagctccctgctttccagggaagagttggctgcgccaggggacagagcactgactcccacccaggccactgggacagccatatctaggcctcaaaagactatgggggttcctagcaaattccaccttatttgacttctccgaacagcccaaactctgctgggcttcttccct

SEQ ID NO: 611 - DNA, 1182 bp, Homo sapiens
ttgacatggcaaattgccaggttttgattgctgaaacaaagatatgtttactatattaattttggcatgaaaaagagttggacagtgtatggatcctttcaggccttaacttagaattgagtttaaacagggcctcctgggtgattttatctcctgaggcagtgacctggaagggtagggtcaggtgggaggctggggagacgtttgctgtgccacaggctttcctcctaattttatttttgaggccggaacactatgacgcttcatactgtctgcatatattgggggaggaaggtgtctgtgtgtctgtattttctcttataaagtatacttataaagtagccaggagcttcatacaagcgaatttgtgcggcagggatctggcagcaggggatggagaactctgggaaaggtgggattacattgcagcgtcggcaaagtactaaggattgccgcggtcctccagaaggccaaggtcgtgcgtctgccatcagttcttcacgcagtccgacagtgctgtgtggagccagcagcccccaattcccttatttgccccagccttgctcacctctcacctccctcttctgcactcatttgcccccagccatgctcacctccacctcttctgcagattttttgcactgatggtctgttctccacttgttctctgagtcttcatatatgagacttttcctgtcttaactagctgtgaactcttgagcacatgaaaccaagctttattcttttcatgttctttcttcattgtctgtaaaagagcatgccaattaatttttggccttgattcatcttttttgactgtgactcttaaccaactggatcataatcccctacaacctgctccactggtcatattttttgatggaagaaattagttggcacctgagttgtacagttttgctgtaggaatgtggatgaatgttatttagcgtgaaataatacttcctcaaagttcagattcatagggaaaaaaaggctaaatgttccaaaaagtgtgtatgttatgatcagaccctttcatggagttacgtcttcatttgatccacaaataaaaatctactaggatgcattctgtctatgtacaacttcttagaggaaagaaattaacatttaatgagcttctgttattgccaagaactgtctgtgctaggcaatttttcatat

SEQ ID NO: 612 - DNA, 1207 bp, Homo sapiens
ctgttctcttcatgtctatgtcttgtgtttctttgcctgaacacaggacataagaaccttattgttttctcagagtgcttttgggtccttatttgatatcttttccactcttcattcctatttgtttctcctttcttttcttttcttttttttttttttgagacagagtctcactctgttgcctaggctggagtgcagtggcacgatctctgctcaatgcaggctctgcctccgggttcacaccattctcctgcctcagcctcccgagtagctgggaatataggcgtgcgccaccgcaccaaagtgctgggattacaggcatgagccaccttgtttctcctttcttaaacgcagatcttttgactggagctgtggaactggggtcagagttgagctccatcagcacatcacctcgttatctagcacatcacacctactttgtatgtttgtgtagcagaccatttcttctttcgtgtttcctcattttacatttcatctcttcagtcacagcgaaaagttgttccgtgagacctcttgcataatgactctaaggggcttcagagacattctcctgcgaggtaactgtgcctgtgatgtggggagagtgtgagactgggaagcagaagaccggaatgtgatacagcctttcccacgacttggctgaggaactgctgttgtgaaccttttgccctggtgggattattgtaagtattcagagggatcattttgagagaagtgctgtggacattgacagtgccagactctcacaggtcaagttttcattgtctcttagttttggggctgatatgaaatgaacttgggtctttttctgagggctttcagaaagttagcaattaaacaagaattctaaattctgttttttgaattcacccaccgtgctgttctctggtttcagagtacttgtgcatggtaagggactgtgaggaaagactttgaaatgattaaaaaaaaaagagcatgttttgtctactcaaccatcaggtcagctctgcctttcactgtctttgagctgtactagaattgtgtgtgctgcagaaaatagacagtaaagcgcctggttcttgtccataaaatgcagttgtgtttggagaatgcaatagattattttcctatgcatattgactagttttgcacattttacatcttgctggcatttctgatgcttatgtatttgtgtcttctttga

SEQ ID NO: 613 - DNA, 1177 bp, Homo sapiens
aaccttggagttgctgacctctgcagtaattgttagagtcctattttatatatagtagagattaaaaactcaatccttatattttgtatttctatacatagaatttatttgatgttaataattgtttagtgtcagtttaaaaacaagtagtgaaacctcattactcctgcatttcttttttttttttttttttttttgagaggggagtcttgccctgttgtccaggttggagtgcagtggctcaatcttggcccactgcaacttctgcctcccgggttcaagcgattctcctgcctcagcctcctgagtagctgggactataggcacgtgccaccacgcccagctaattttttgtatttttggtagagacaggatttcaccgtgttagccaggatggtctcgatctcctgatctcatgatccacccgccttggccccgcaaagtgcttgcattaaaggcatgagccaccgcgcccggcccacttctaaatttctataagaactgtttaaaactgaatgcctgtcttatctgtgagggataagactacagacttcaaagtttaggtaaaagctgaaaacactccgatgtagaattagaacattttgaatcctgttccaattaatttatttagatgttaactattagtaagcatgttataggattagattaaaaataaattgttaataacttttggtaggtattatgtatggtgaatttaaatggcctagcagatttttttgttatcttttgaaaattacaatttcagctttattagtgatggagcatttgaaaagtggcttgggtagatggcaacaatcggctgctgcaaaatttggcaacaaagacaaacctcatttggtctcatgggaatgctggacaagtacacctgcaggctttcccctgaggggcagagcatacctctttaaaacttaagtcatggaggagtggtaccccctcgccccaaaaaacaaactctgaagggattgaggcatatgtgttccgcctcttctcttatactgtaataacagtaagtcataataataacaatatgtcataaatggcttttagatcaccagtgcatagctgggtagttgtctgtctgctatggtggtggggggcaattttagcacattaaaaagtgtttttgaaacccaacaaggcctattagaaaatcagt

SEQ ID NO: 614 - DNA, 1190 bp, Homo sapiens
gcacagaaaccctatgtatgtaacaattgtggtaaaggcttcagatgttccagttcccttcgtgaccatgaaaggactcatactggagagaaaccctatgaatgtcagaaatgtggcaaagcctttagtcgtgctagtaccctttggaagcataaaaaaactcatactggagaaaagccctataaatgtaaaaaaatgtaaaggctttaatcactacagtttttgtcaaaaacatgaacagtcacatacttgagagaaactgtgaatgtaaggtgtaggaaagtacttaattttcccagatttcctcaaatacatgaaacgaatcaaactggagataaaccctatgactataagcaataaggtaaagcattcaatttttccatttctttttgaaaacttgaaaggactcactgaagaaaatccatatgaatgtttaaaatgtggtaaggcctgcagttgttccagtggtatttgatggtataacataactcattctagagaaaaactttatgaaggtatcgaatgtgagaatgccttcatttatcctataactcactcagagacacatggtaacacatactccagattgaccttataaataaaagaatgcccaccagattgaaatcctagaaatacagaaaattctgaattttaacaattactttaaaggtcatgtgaaaactcccactggaaataaatcctgtaaatgtaaatattatggaaaaccttatggaaaataattatagtacaattctcaagaaaattcactatgtgaatgagatgttttaggagctataaataaattgaatatattggttgctcatttttgaagagagtctctagaatatagattttcacttcttttgaaaaaaaaaaaattgaggtgagacttttttttttttttttgagatggagtctcactttgtcgcccaggctggtgtgcagtggcacaatctcagttcactgtaagctctgcctcccaggttcacgccattctcctgcctcagcctcctgagtagctgggactacaggtgcctgccaccatgcccagctaattttttgtatttttagtagagatggggtttcaccgtgttagccaggatggtctcaatctcctgacctcgtgatccgcccgcttcagcctcccaaagtgctgggattacaggcgtgagccaccacgcccagctgag

SEQ ID NO: 615 - DNA, 1235 bp, Homo sapiens
tgctataaagaaaaatcataacagcaaatattactccctggacccaccaacaagaagggtgttccttctctgctgctgccttgctgaacagttcaactttagcataagaactgctggctgagcgcggtggctcacgcctgttatcccagcactttgggaggccaagacaggcagatcacgaggtcaagagatcgaggccatcctggccaacatggtgaaatcctgtctctactaaaaatacaaaaattagctgggcgtggtgacatgtgcctgtagtcccagctacttgagaggcagaggcaggagaatcacttgagcctgcgaggcgaagattgcagtgagctgagacggtgccactgcactccagcctggcaacagagtgagactccgtctcaaaaaaaaaaaaaaaaaaaaaaaaagaactgctatgtgggagaaaggaagtgtagacagagtcatagttctagtgaccaaatagtagaataaatgttcgccacagaatcagatgaacatcttataaattgactacagatttccagtgctttcagtctcatccatcctctacaaaaatgtggaatattttagaactcggttgcctttgaggatgtggctgtgaacttcacccaggaggagtgggctttgttggatccttcccagaagaatctctatagagacgtgatgcaggaaaccttcaggaatctggcttccataggtaagaatcacaatatttcttcacttagtcaatcagaaagtaagtgtttcatggttttcaatgtcattccatgatttggaatgtacaaagggaacactttgatgagtgaatgaggcatggacccagtgtgcaatgactcttgtttcttagtctattttttaattgtgataacagaatacctgatcctgggtaatttacaaaaatagttttatattggtttatgattctagtggctagaaagtccaaggttgcatctggtaaggacctgatgctacttcagctcagggcatgaagcagaagcaagtgggcatgtgcaaagggatcacagcaagaaaataagagcaattcttgggagctaaacttgcttttataacaacctgccctctggcaactaattcagtcttgcaagagtaagagaaaacatgcattcccaagcaaggacattaatctattaataaggaatctgtacccataacacaaacaatgttgccatattgatgaccaaattacagcattcattttg

SEQ ID NO: 616 - DNA, 1099 bp, Homo sapiens
tcaaggatattggcctgaagttttctttttcattgttgtatgcctgccatgtgttgtatgcctgccaggatgacgctggctgtcatagaatgagttaaggagtttctcctctttagtttcttagaatagtttcagaaggaatggtaccagctcttcttaatacatctggtagaatttagctgtgaaaccatctggtcctggcttttctgtttgataggtttattattactgattaaatttcagagctcatttttctgttcagggattccatttcttcctggttcaatcttgggaggttttttgtttccaggaatgtattcgtttttctaggttttctagcctgtatgcatagagatgtttgtaataatagcctctgagggattttttttttttttagtttctgtgagtctggtggtaataccctttttgtcacttctgattgtgtttatatggatcttctctccttttctttattagtctagctagcaatctatcttatttcaaaaaattgactcctgaagttgttgatcttttgcttttttttctctctctcttcaatttatctctgattttggtttttttgtcttctgctagctttggggttggtctgctcttgtttctttagttcctctaagtgtaatgttaggttgctaatttgagatcttttcaaagtttttgatgtgggcatttagtgctataaaatttcctcttaacactgccttagctgtgttccagagattcttgtatgtttgttcttattagtttcaaataatttcttggtttctaccttaatttcatttttttcttttgatttgttgaggattgttttatggctgaatgtgtggttgattttagagtatgtgccatgtgcagctgagaagaatgtatattctgttgttttttggtgaagagttctgtaggtgtccattaggtccatttggtgaagtgttgagttcagatctcaaatatctttgttagttttctgcctttatgatctaataccatcagtggggcattgaagcctcccactgttaactctgtggttaagtctctttgtaggtgtgtaagaatttgccgtatgaatctgagtgctcttgtg

SEQ ID NO: 617 - DNA, 1205 bp, Homo sapiens
gactttccggcataagtcatggaaacatcatttgtgcgccactaacttgggggtattcagttctcccaactccaatctccaatctgcctgttttccagagaggtctgcaagtgctctctagggagacgaagcggtgggccctgcccggattccagtctcaacactgctgcgtggctctgagcaatttcctaggagtctgtagaagtggctccagggcaccgccctggggctgcctgggcagaggtgcagctgtgcctgcaagcccttaacctgagctggggtgatggaggggtgagggctgggagtggcgagggacgctttttcttcaagattttatctgtacctcaacctgccctccctgtggtagatgatgatcaggccagcagaacaagactcaggagccttcctatgactgggaagaagagacttgcgttattcaccatttacctcccatggcacctgctgaaacgccaggccctcttggaagagcttggcacatagcagctcactgaatcttcatgatcaccctgcaaaggaggcacaatcatcatgcccattttacagatgggccatacagtgatagaagttgctgagggacacgcagcagatccaagatttcaattccggcagcctgtccagactctgggcatttcatagtgcgtggagctgctatatactaacggtaattaaaggcattgaaaggtttttgtattggttcaaaccccaagagcgcgccaacggacaacacaaggcggtgtggagcaacatgctgttttaatgagcacctgggtgccggcgggctgaggcctaaaatggtgtcagcaccaagtgaggacagggcagggattttatagttctctgcaaacaggaagtgtcccagtctgacgtgactgccacgtagtagccagacggcctctctccatcctcaggtgcgtgtcttccggccggggtgcgtgtcttccggccggggtaggtgtcttccggccggggtgcgtgtcttccggccggggtaggtgtcttccggccggggtgcgtgtcttccggccggccctcttcctgcttctgcttctcgctgacgcgcgctgctggtgcaagcggccttgcgccttgcgactgggtctgaggagggaggagttattcatccccccaagctttcggccccggggagaatctttcattcctgtctatttggttatagaaaaagg

SEQ ID NO: 618 - DNA, 1220 bp, Homo sapiens
tttttccaattgcaaattgtgctgctataaacacgcatgagcaagtatctttttcgtataatgacttattttcctctgggtagatgccccgtagtgggattgctggatcaaatggtagatctactttttgttctttaaggatccacaatgttttccatcgtggttgtactagtgtttgtactagtttacatttcatggaaaaactttctatagaagaaaatgtgaactacagagaaaaaaaaatcaaaatcacaggaagaagatagcaatctacttcattcctggaattgtctgaaaaagtcgtgtaaaatttgtggagatttaagtatatggagaaaaacacttattcattgtaagtaaaataagattgtatttcagcttcatcttgtgtatacttaggagtaatagaaaagagacaaatggggagagaataaaagaaatataggaagaggaaaagagaaaagaatcaggaaattggaagtgaaataattccacacatacttattgaagtctatttaaacaatgcttaaaaatatatggcctcttagaattatacgtttaaaatgaactttgtcgctatgggatttggggcattataacaggaagtgagatgtttgaagacagggtttttgagctctctgggtattaactccttaagtgaaagatgctctgagtgcacaatagacttgtgctgtgttctttaattgatggagatgctacatctcatgtcctcatcatccacagagcctccagatcctggccagaagtctcctcagagcccccttcatatctttatttctcagggtgtaggtgaagggattgagagtgggggtgattatggaatagaagagagaaataaatttgccctgctcttgggagtagctggaagggggctgcagatacatgtaaatcgcaggtaggtagaagagggagacgatcatcaggtgggaggaacacgtcccaaaggccttgtgtcgtcccttggaggactggatcctgagcactgcccgggcaataaagccataggagagaaggatgagagccaggggcaccaacacgaagaaggccaccagcacagccagtatggtgtcattcacagcggtgtcagcacacgacagcttgatcacggccggcacctcacagaaaaagttgttcagcacctgccgcccgcagaatggcaattgcaccgtcaggaccacctgcacgaaggagttgccgaa

SEQ ID NO: 619 - DNA, 1475 bp, Homo sapiens
aggcccctctgacctaggacctcccgatccggccgttatcgccaaccgtatctgtgtggtttcgtggaggaagcgcggtggaccttgaggggagggtacgcgcaggcacaataaagcagaaagccgctataataatgatgataatgaagaaaaacaaaagcatccattcgtcacttagtggcaagcgtttttccaactactttccgagtagtaactgcttgccagagtttccccagcttgggccggaaggtgaggcggtagctcgagctttgcctttctcaggcattgtcctgcgtttgcggggccaggcgctggcacacggtcactaacccctggtcgttagcttcgattcccggcctgggagagcgctatcggccactcctggctgcattgcagtcgcggctttctccagagctccgccgggaacgggaagcgctgaaacgtcgcgaccagtcagtagggttcccacggccgcaactcgggtgtgacgcggcaggctggcaccagcggacacaagtatgaggctaagtgagaagcgctctgcttccgagtgtcaggatggccgagtggtctaaggcgccagactcaaggtaagcaccttgcctgcgggctttctggtctccggatggaggcgtgggttcgaatcccacttctgacacattcgttttattagcattttattccccggaagaaaccccagaattttcccggagtccgttggtattttattgtcttctccaggaagaaggttacaactagactactcatctttgctgcccggttttccctgtctgccgcagcaagggggctacctaccaaggggagggaagcagtctgcatattcccaaatgttgcgagaaaaccgcatccaatcatgtttctataggagatacgtcacaggatatttatttagtatagcatattgctaaatgacgcatcatgtcttccctggtggtctagtggttaggattcggcgctctcaccgccgcggcccgggttcgattcccggtcaggaaagtaagccgttttaaaaactgttgccgcagggctaaccataggtgatgttcccagagtcagctatgacttgacttctaaacaaagggcaaaacgcacctggtgtcctcattttgcagagtagttacctgaaatggactctactgcagtttatgcgcgccgtatatgtagtcagtgtctttactcatgatatcttaagaacggagaaaaaatgccagcagcacaaaatgatccaaaaagatagctctgggtatgccaaaaatggctggtcttaaaattatgtcacagatttcaaaaagtctccctaggtgtccaaaggccattagaatggcacctgttgcctagaggggcgggtcagggccggtcctagctccttaacgacgcttgagtaattgtcgctatggaaagagatcaggtacttctccctcaccccagcatctatcttttcattttttaaataa

SEQ ID NO: 620 - DNA, 1227 bp, Homo sapiens
tttgccccatcagaggagagcagggtgaagccaggggtatttcatgacatggacatgtaaaagtgcacttgtatagttaattctttgcttattccagaatcctttctcacctccttagttctgctaaaaatagaggcaggacttggctgtttcacaacagtggcagttgaggttcctggtgagatcttgactcaccaaaacctcagggagatgagtttgcagacatcagtaaggcttccttacatacctctctaacatacctacaatggcctggcccaacaggctatgtttaggaatcatacagaaatatcctggcatgacatttgcattgtgggaaattatagactagtttgaggctactgcctgaggttcctggaagctgcaaaagctggtggcaatttatagtcctagagaaaggccaggaaagccacgtcccgctgagtcctggaagcagggataccctgaaggacgtgtccctgccacaggagaagaggcaaagctgctgtagggggcagaggccgagtcaatgtctccatctttctttgtctgatttaaattagaaaatacttatctctgtctacggccataccaccctgaacgcgcccaatctcgtctgatctcggaagctaagcagggtcgggcctggttagtacttggatgggagaaaatacttaactctgatgttattttatatgtcaatcatgcctttcaaattttccctaatatgcttactaccttataaaaatttaggacatatttccttattaaggaaagataggacctgaccacttgttgtcattgtcattattctgaggtttgcaagaaggatagaaataaatttcctggctctatgagctaaggaaatgttcatgaacaagagcaagagctatgctttcttttcccacttatacacagaattagtagcacagagaagcatgtgtgggatagagtcacagagctggtctgactgtggctgcactgtatcccgtgtgatcttgggcagacgaggcctcagccgatgggtccacggaactcagaccgctgggtgccgacttcgcccctcagttgctcccgatgaacatgcaatcaggcagttgactggatatcgaagctgagccaggaaagatcttctcccaaagcacaagtgtagagggcgcatggcggctttgcagccagcctgtggggtactggcacacgagccgagcacttgccaaggagctccgtggc

SEQ ID NO: 621 - DNA, 1165 bp, Homo sapiens
tgtttgaaaaacaaacaaaaccatttggtttgttggtttgttcttagaccttcacagtagattctaggtcacatgtttcagtttatcagcgaatgacatcctctccggaagccatgtcaacctcttgtttgatgatgtcagccgcagcagaaagaagcactccgtaggccccgtgctcagcaccttggcatgagctcctgccgtcttttgttcatgctcatcacagctctgtgcagtgggcgtcctcctgatccacgtgggaggatggaggatggaggcggaagggtgagtgatggcaggatcacacgaggggtctcccccgagatagggaggggagccggcccaagacctcagtgcccatcgcatccttcctcctcctcctcttcctctctgtgactgtttgactcaggctgcagggacagatgtatgtgcagagtgtgtgtgcacccctggggggtgtgtgctcatattggcatagactcgtgagcgcatacagagcgtgtgtgcacacctggggttgtgtgctcatattggcagactcgtgagcacatagtgtgtgcaccccgggggtggtgtgtgctcatattggcacagactcgtgagcatgtacagagcatgtgtgcacaccttgggggtgtgtgtgggtgttggcagggacagatgtgtacagagcgtgtgcacacctgggggtgtgtgctcatattggcacagatgagcatgtacagaaggtgtgtgcacacctgggggtgtgtgcttatgttgtttggtaagtggcgaatacgtggcccgttgcgtcgggcggccctgtgcctgtgttgagtccgtcagtggccccttgggtcggggtctccctctctgaagactgcactcaagtgtcttgaggtttcagattcttcctctccaggtacttgggcctcctcaggaccaaacgtcagaaccagccaactgaaaactacaagaacgttcaaatgcatcttcagtgggaaaaacaaaaacaactggaataatcttcccacatgaccccgtggttaagccgttagatactccagccgacagatttagttactataaaattcacaccaattaaaatggttttgagagttgcagagctttaccactaaacgttgaaataattgaagcgttctgctccacttgcttacaaagc

SEQ ID NO: 622 - DNA, 1227 bp, Homo sapiens
agttcttttatgcagagtgctttcattcgaagtgaagtgcccttctgtttaatggtgacctccagttattacagggattgcagccgcatttgatggatgtgaacctgctcatctctggctccccagcctcgcctctggggtgggcggcaggagctccacagccatcctgggtgctctggggcggggagtccctagtgggagtggacagtgcatggccgggacgttcctgtccgatgttccacactggcgtgtgcgcgtctctggcctgtttccttcgtccgtgggtctgtggcgttttctccatgcgtgcgtgtgtggcctgttttctccgtgcgtgcctctgtggcgcgtttcctccatccgtgcatctgtggtgtttcttccgtccctgcgtcggtggtgtttctttcgtccgtgtgtctgtggtgtttcctccgtccatgcgtctgtggcctgtttcctccgtccatgtgtctatgacgtttcctccctccgtgcgtctgtggcctgtttactccgtccgtgcgtctgtggcgtttcctccgtctgtgtgtctgtggcctgtttcctccttccgtgcgtctgtggcttttcctccgtccgtgcgtctatggcctgtttcctccttccgtgtgtctgtggcctgtttcctccttccgtgtgtctgtggcctgtttcctccttccgtgcgtctgtggcttttcctccgtccgtgtgtctatggcctgtttcctccttccgtgtgtctgtggcctgtttcctccttccgtgcgtctgtggcgtttcctccgtccgtgcgtctgtggcctgtttcctccgtccgtgcgtctgtggcgtttcctccgtccgtgcgtctgtgacgtttcctccgtccgtgcgtctgtggcgtttcctccgtccgtgcgtctgtggcgtttcctccgtcggtgcgtctgtgacgtttcctccgtccgtgcgtctgtgacgtttcctccgtccgtgcgtctgtggcgtttcctccgtcggtgcgtctgtgacgtttcctccgtccgtgcgtctgtgacgtttcctccgtccgtgcgtctgtggcctgtttcctccgtccgtgcgtctgtggcctgtttcctccgtccgtgcgtctgtggcgtttcctccgtccgtgcgcctgtggtctgtttcctccgtccgtgcgtctgtgacgtttcctccgtccgtgcgtctgtgacgtttcctccgtccgtgcgtctg

SEQ ID NO: 623 - DNA, 1173 bp, Homo sapiens
acatcttactggctagatttaggatccaaacgccgtcacggggaaggggctttcaggtcagtgaggtccatcctgggctcaggagtggggccacctcccccaaggtgcatggtgactggagagaggggtccctgaacaaaattggggccattaagaaagaaggggtaactaatacgtccactcagtacattcgagctcctcagccccagcctgctcagcctccagcccatgtctcactgtgtccttggcgtggccacctgcagtcagtccacatttcagatgggaccacccaccctccggcctggatcctcctgctcctcaccggaaccccatctccacgggcagccccgacgcagacaggcaagcccaaatcctgggccagtcttggttcttccccagatccttccgagagtccagcccggccatctcgtcgccagtctccctgccccgttctccacctagcccgagggttcttttgtggtagtgagcgcgccctgttcccttgctttaaacgctccaatggtttcctgcaggaagaaataaggtttagacgcgcgcctgcaagtcactccccaacccacctgcaacttcatccctgaccccacactctctgcccatgctgcctgggacctgctggccccttcccgtggaatttgtttctcccttcccagagatgcctggcgccctctccgacagccgcctgtccccggctgcttctgcagcactgagcaccgtttgtagtcgtctaattggtctacttctggcgtgagccccttgggcctggcacccgtgaatgctcttcccctgggtacctgcagcaccccctgggcaggggacgcttccgggtccattcctcgcccggtgtccagacgctgtggacaggtgccagaggcagctccgcagagggcgctccgcagaggccgccaggccgcgtccacagctcagccagtgcaggttcaagtcccggcttgcgcgcccctcccatccctgcgtggggcggcctcaccacgcacacctgccgccgtctgtgtcggcctctccctccatccctgcttgcgccctggatccccgtccgcctttttccgcgcagcagcccgggggtcctttgcatccccgctcaaaagcagggaggcacccacgcacctcgctcagagcagagaccagaatccaggc

SEQ ID NO: 624 - DNA, 1172 bp, Homo sapiens
gtccacacctggagcccccagagaccagaggcggccggcggggggccggccctcgccctcggccatggggaagcgtctcagccgagagcagagcactccccccaagtctcctcagtgaaaaccgtacgtctgggaggggtcgcagagcgctgtgttaaccacaaacgagacactctcccactcagtgcgagggcgagccgctggttaggagcttgcagtgtctgaggcctgtgggatcctcaagttggttttcttctgtgagttggattctccccctcttgaaaaaaaatcgatttttcaggatttaattaatacaaaccttattttaggttggtgcttaactggaggtgatgcataagtctgatttttttttccaagatagaaaaagcatttatcctaacaaattggtattttttattaagcctccatgtggctctgaatgcaagctatatatagtgagtttttctaaattaagggaactctgctttttttttttttttttaagtaactggtctgtaagtgcatatctctagaacgtccccgcagatgaatgagggccagtggccttggcagaggcaggtgtggcctcgtagaggcagtgctggccgcgccagggcatcagtgctgatgtgggagctgtgcttccacctaagccgttggtaggggactgtggcatttaagaatgtagagagcgcatcctttttgatctcctgggcggagtgaacctgcaggggccaccccagaaaccttggttctgatgcactgcaagcaagtaaccagcttctcactccagtttcaagtggctattatgtaatataaattcaaagcacattgtgaatagaacctacatgaaaacatacactttgttgcccactgacatgttaccagaagttgtaccatgatgttgttttgacccctgtgagctgatggccccggccctgctctgtgcacatttctgtccgtgttccccagcactctggttggagagagtccacatcttcagctccgtgtggacatctccctgtacctctgcatcagcacatggatttaagagttatgtaatcgtgagagaatggtgtttgtggtttttccccctctttggctggtggaggataaagttcctgctcttttacctccaagacgagggcctcattgattcacttccagaagtg

SEQ ID NO: 625 - DNA, 1207 bp, Homo sapiens
atctctgaggtatgcctgtactgttaataattcttgaaattaggtagtgatagccttccaactctgtttttcatagttactttttaaattccagttcctgtgtatttccatgcaaattagaatgaggttgttaatatctacaaagtgctgagatttttgttggggggttcactgaatctatagatcagttggagaacattgacatctgaacaatatccatgaacaagatgtatctcttacttgtttagatctttaatttctctcagaagtattttttggttttcagtgtactggtcttttacatcttttatccagtttataagtattttatattttttggtgctattgtaagtgatttttaaaatttgtatttgcagttgtttgttactagtatatcaaagcattcatttttatgtattgagtccaaacccagaaattttgttatgctcacttattagttttagacacttttttgtagattacattggattttctacatagatgattggattattttagaatgaagactgttttactttctctccaatcttgatgccttttatttctttatcctgccccgttgtactagataggccctccagtacaaaggtgaacagaagtggaaagaatgaacaaacgtttgggttgtctctggtcttacaagaggcactcagtatttcaccatgaagtataacgttagtggtggttttaggtctgtgccctttatatgttgatgaggcactcttcttttcctggtttgctgagagatttttatgaggaatgaatattgtaatttgtcatctatggagatgggcatatatttgttgttttttagtgtgttcggatgaattgtattaattgtttttcaaatgtgataccaacatttgtggtctaaacctctgtagatcatgatacagtatactttggatatactactggattccatttaccaaaactttgcttagaatttttacacctgggatcttggtttctagttttcatttcagtgtttttctttctatttaagtttttggaagaggttacgtattatttcaccctcatatgaggaagtgaaacaagtcatgtgggcaggagttttccttttttcttctttcctttcttacttactaaacttacttagtttagttgctcacagagtcttgctctgccacccaggcttgagtgcagtagcatcatcatggctcac

SEQ ID NO: 626 - DNA, 1211 bp, Homo sapiens
tgaatcaattgaagaagcttctggtatctttggtaataatacatcagggttgagtaaaccaaaactaacatgtaaagaagaggaagagagactttatttggagaaagatagtattgaccccagaattactgactgcctgggtccatgtgggacgagtgaacgtgcacaccatttcaaagaaggaaacgccaagtccactcttacacagtcgactttaaatggtgaaatgggttttatgggaaatgctaaggtgagttttgagaaaatagagtcacgtgacactcccagtggcaatttctttctggttggtgttgatcccaccctagcggacagatacacaggtgccccctgcgatgcagcgcaggggattcccgctgtccccgtggacagcaaagacacgattgtaccaagtagtggccacattttatcactcacagaaggtgtcctaaatagatgtgaacatccctcaaaagtggattggcagagtttcccagaaggagtctcccgttttttgagtgaattttcctattacccgatgggagggttaggaaacccagcattttctgaaagactggccagtggttgtggtggatatcaaatgggctatctctggactaatacagtcacaaaaggtgctctagaaggtgaaacaatatttagtgaggatctgcaccataagccacaggccttggaaattgctttgttttcagaaaacactcctcagctaccggtgtcagaggacggtgttgtttggggatggcatgatagagacggacagttcgtaagtatgttttctgtgtgtttactattgtgctgcggtatgctgggctatacattttaatttattattattattattattattattattattattattattattatttattttttgagacagagtctcacttttgtcacccaagttgcagtggcgtgatctcagctcactgcaacctccacctcccaagttcaagtgattgccgggttcaagtaattctcgtgactcagcctcccgagtaattgggattacaggcatgtgccactacacctggctaatttttgtatttttagagatgggatttcgccatgttggccaggccggttttgaactcctgacctcaggagatccacccgcctcagcctcccaaagtgctggcattgcaggcatgagccaccgggctggccaattttaattgtttttaacttaa

SEQ ID NO: 627 - DNA, 1199 bp, Homo sapiens
cccgcctcagcctcccaaagtgctgggattacaggcgtgagccaccgcgcccggccggtgtaaaatttatcttagccatgtgtttcaagatgaacaaggttgtacatgaaacgtttagtaaatttttgtaatttaaaatatgtagtactgtaagatattagtgttttaagaaggtttcagggccgggcgtggtggctcacacctgtaatcccagcactttgggaggccgaggcaggtggatcacgaggtcaggatatcaagaccatcctggctaacatggtgaaaccccatctctactaaaaatgcaaaaaattagccgggtgtggtggcacgcgcctgtagtcccagctactctggaggctgaggcaggataatggcatgaacctgggaggcggagcttgcagtgagccgagatcgtgccactgcactccagcctgggcgacagagcgagactctgtctcaaaaaaaaaaaaaaaaaggaaggtttcaaataaatggctcaaaagtagacccttttgatgtaattatgttttattttctttaattgcaggacttcatagacctcacgttgtcgaagactcaacgaaagactccaaccgttattcataaacattaccaaatacatcgcattagacatttttacatgagaaaagtcaaatttactcaacagaattaccatgatagactttcacaaattctaacagatttccccaaattggatgtaagtgacttaggggacttctgtggttatgtaaatacgggctttcagagaaccagtgtttaaccagtttggtgtactcatttgacagaaaaggaaacaaaataattgacttaggttactcagtaagttagtggcaaagaactaatttgttgaatttataaaagtgagaacagaatttgggttttttgattccctagtattctttctttcctccaaccaaaacccatctaaggaggccccaagctgtcttctcaggctttctgtgtaaaccctgggcttgcaggtgccaacccaagtgttaatgatagctgtgggttatgaacacagaagctagcagctcactggttgtctgggctttatctcttccaccttctttccaagggttttttttttcctctgggctcagcttgggtcagtggtgtaagatccaccactgtttgtgatcttgttgcttcatcagctgatgacagtcagttca

SEQ ID NO: 628 - DNA, 1169 bp, Homo sapiens
ctcctgcatgtccttgggggcgcagccctgtggtgctcaggcagagctctcaggagccggggcaccttgctgttcgctgctgtgtcgtcttctaatgtgagctcatccactgctgctgcagcgtggtgatcaggagtcacagacaagatcggggatggtgtgtgtgtgtgtgtgtgtgtgtgtgtgcacgtgtgtgtggctaaattaagtcatactgtcaaccacacgtgatctcgtctgaaacagtgtttggaagtgggaacagttttgtcctgtatgctgatgtgtccagaatttcatttaatgatagacggaaaatgtgtggttactgaaaactgtatatgatacagaatttcataagagccatgctgttgggcaaagcaactctttttcaaccactgctcatcagtttctgtagagacaaaaactctgtacatattttggaatctgaagaatcctatgtaaatcatttgttacttaagtctgtgaaaaacatatttctttggaggaaaatgtatgcatttataagtgttccatggaatcagtttttattgtatcgatataattgtctctaagtgttgactgtcttcattgcaatatgaaattcattaaaatgtccatgttccataattactattataaaagctttgtgttattgggagtcttattatttttatagtttttcatgttttgctttggtgaaacattgtgaatgactatataaacatcacgatgagctagaaattgaacaaatataatactggtcactcgaaaaatttttagacttaaaaagtcagttgtgttttgtgtctgtctcttatgctaacattaaacaatacataattatgttgcttcatccctcatcaggagcctgaaaacttccaaaagcgttaacagtttgacataatttttggtaaagttcctcagtataataaaatgctcataccgttctcattgcagtaagcttgtttgaaagttaaaaaaaaatacagttacagaaagtaggtgccattttctgtgggagaatgcaaaccagactgggagtggctcctgggggctcctggtgcatggccatgtctgacccacgcgtggaggctgaggctgtggctgaggccatggctgaagctgaggccgaggctgagaccaggactggtgctgtggctgtggct

SEQ ID NO: 629 - DNA, 1197 bp, Homo sapiens
cccctggccccaggttcctgctggttttacttgcaggtgctgtaaggggtgactggagggagaagcctggctgctggtcacaccgcttcccttgtcctggccggcatgctctggtggtcagtgggcttgtctttggttccacgtgcacctggttgagctcgttggccggtgctgaggcggctgctgtgacaccgcaggctggttcctgctccatgtatttaactgctggctgccgtgtgtctggctctgcaccctccctggctcctcctgggtgtcacgcgcctgtctttgtccatggaatgctggtctgggactaaaaacaggaaaatcacagtctttcatagctagttactaactcacaagatgaaaatgagaaaaatgtaaattctagcaccccatgtttatagtcggcctgtgtgtgccatccacctggcgctctctcagactgagaggagataaattagctggtgtctttcccagggcgggacgatcattggcagtgcgcggtgccaggccttccgcacgcgggaaggccgcctgaaggctgcttgcaacctgctgcagcgaggcatcaccaacctgtgtgtgatcggcggggacgggagcctcaccggggccaacctcttccggaaggagtggagtgggctgctggaggagctggccaggaacggtgagtggacacctgctcctctgtcctgcgggttttcgccctgtttcagagctttggaaccgacaggtttccctcttcactgtggcagaagtacctcttctcacagatcttacaggtcaccatctcaggactttttaggatctcaaaaaacaacagcaatgatcgtaagaatgctagtaatttaaccttaccatgtgccaggcacccttcgacctttcacacagatagctttatggaatcctcacgacagccatctaagccaggttttagatcatcccatttacagatgaggaatcaaacggccactcagccgtggggcgagccgggtccccagcagcctgggacactagcatccgcctttcagccctcacactgtgtccctccagctcgctggggtcctttaaaactgaagttgggccgggcgcggtggctcacgcctgtaatcccagcactttgggaggccgaggcgggcggatcacgaggtcaggagatcgagaccatcccggctaaaacggtgaaaccccgtc

SEQ ID NO: 630 - DNA, 1137 bp, Homo sapiens
tgcacgaagagtgtgaggggaaccacccctctgcgaggaaactcacagcccagaggagggcatccacagtttccagtgttactcaggtagaagttgatgaaaacgcttacagatgtggctctggcatgcagatggcagaggacagcaagagcttaaagacacaccagacacagcccggcatccgaagagcgagggacaaagccctttctggtggcaaacggaaagagactttggtgtagagaaggctctgtgtgttaactgatgggagagactgtttgtttataaatgtgtacagttttgttttctcgtaaggggagcatcatagggttactttataccagttgtaacattttcattgtttttggttgttcttttttctttttttaatggcagctaaagatatacagattactgttaaattgcagtccttttttttttaaagatattttcttgaattatttagaacatggtaagcctggtattttttaatcaaacaaaatatttatgaaatgggttttctcttaattctggattcatcatggctttctaataccaattgtaatatttacaatattcaccaaaacttagaattttgcaaatgctggaattctgccagtgtttctttgctaagccttgcatgcaaaatttgaaattttaacattggcacccaaaacctacatggaatgtatgtctggagtatttcaaactttacattgaaacataatttccttggaaaacaaaccataagcctgaggaggtttttatcaactggaatgctttatattagtttgtttttcactgtacattcctcattttacattcatttaacctgccgattatttaatttttttattgtaaagtagtttttagcatttgcttttatttttttactttgatgccttttcaaattggcatgtctttaaagtatttttcttcctgattaaaaatgtgtgtgtatgtgtgtgtgtgtgtgtatatatatatatatttttaaatcacattaattttaccaagtgaaaccaagccatactgtttttgagccaattaagaaaattgccatttttaaagtgtagcatttcagggtaaagacccatgaaatggcttgatgtattctagactactgaaagaaaaccactt

SEQ ID NO: 631 - DNA, 1394 bp, Homo sapiens
ttgaaggctgaaatcacccatgtctggcagatgctgctggctgacgacctcagttcctcctcacatgggcctctccctcggtctctccatgtgggctggtgtgagctgagagagagggagggagcgccaggcaaggccatattgcctgtcatagcctaactttatttatgtatttatttatttatttatttttttgagacagggtctcgctctgttgcccgggctagagtgcagtggcacgacctcagctcactgcaacctctgcctccctggttcaagcaattctcctgcctcaaccttccaagtagctggaactacagacacatgccaccacgcttggctaattttttttgtatttttagtagagacggagttttgccatgttgcccaggctggtctcgaactcctgacctcaggtgatctacccaccttggcctcccaaagtgctcggattacatgtgtgagccactgtgcccagcctcatggcctcatagtctagctttgaaactcagctagcctgtggttccatagtgtagtggttatcacatctgctttacacgcagaaggtcctgggttcaagccccagtggaaccatggtgtggtctgttgttttcctgcctgtaatcctagctcctcgggaggctgaggcaggagaatcacttgaacccagaggcagaggttgcagtgagctgagactgcgtgaaactcatctcaaaaaaaaaaaaaaaagtcatgcaacgtcgctttgccacatccatttgtcaaggcagtcaaagtctcgcccgggttcaaggtgagggaagtagactccacctcttgatgggagtggtaaagttctggaagaacaggtgggagtggaaatgcgggagcacctttcagacatgggctctgccatgtttcccttggctgagttactgggatggcctcatcactggccttgctacttccactttttttttttttttttttttttgagacagagttttgctcttgttacccaggctggagtacaacggcgtgatctcagctcaccgcaacctccgcctcctgggttcaagcgattctcctgcctcagcctcccgagtagctgggattccaggcatgtgccaccacacccggctaattttgtgtttttagtagagatgtggtttcttcatgttggtcagactggtctccaactcccgacctcaggtaatctgccctcctcggcctcccaaagtgctgggagtacaggcgtgagccacaacacccggccctacttttttgttttcttttgtttttgtttttgtttttgagacagagtctcactttgtcaccaggctggagtgtagggggtgtgatttcggctcactgcaacctccacctcctgagtttaagcgactcttctgcctcag

SEQ ID NO: 632 - DNA, 1255 bp, Homo sapiens
ttgatagcttaaacatggcattgggggttgttgtagtccatgaggcttagtgtgaacgatttcctctcgggctggagggtggggtgttctgagggaaaaggtgcaggaggaggctagaaagctccaagccagatcttggagattcttgagtgatctggtgtaaagagtttggtgctggctgtggacactgagaaacggtttcacttttcagttcctgtcttggctgtcatctaagctggggtttgtctgtctgacttcctccattcatttttcttcaagctatagccattggttgacttctctaagtctttgattttgttcattctcactcttccagataacctagttatttatcttttcattaataggaccacagcagtcaattctaactttttatcagctgaattaatttagtaatggacattgaaaatgccagtttgtattcaaatcattttgatgaactatattaattgcctttggaagctctgccactattttatactagcattatatgtaactctaaagaattaacctttggctcccccattttttttcttttaggtttttaacaatcacttttttcaagtgactattgatgacctaagacctgaaccaagtaaactgtcaatgctgtgccatgcagattctttggggattttgccagtacagtggtgccttaaaaatggagtcagcctcactcctcccaaaggtttgtattctgtgaaggtatgcagggtctggagattcaggagggtgtcttactgtcattgaagtaacacctgcattaatctggggaggctggttgtgtaaagggtttagatgtagtagaaatagggcgttcttcatcagcttgacataggtgtcagttacagctccatcccctggcgaggcgagtggccttgggcttctcacttctgtccacaggagtttccccatccgttaccgcattattggcagatgtgctgctattgtgtagacttagagggtgcagcattgctaagtgattgagctcaaagacttgaaagtgtctgagaagtggctttacaaatgtaacacaatgttggtgaagcatttctttagagtgtttatttccagcgagctaagctttctccagagtcaatttgctttcagatatccgacaattagatgctataatactttaaaataattacactgggagccaggatgcattaaaataattttaaattgggattcaagaaccacattgttagtgaatgccagtcttagagtttac

SEQ ID NO: 633 - DNA, 1211 bp, Homo sapiens
gcctggggaaaaatatgggcaacatgtggtgtgttaagcaacatttcaagtgtaaatattaaacttggtaaattttaatttaccttttaataattttctgacttacagggactatttttagcagatgagagcttagagatttagtgaaaatatgttgtcataactgcaaatgccagactagagtcgtttgtagtttagaaatgtatcagataataagttcctcatcagtgggcattgctttcctaggtgataggtggaattttggcccatggatgactgaaggtttttgctaatgtgattaataccattaaattacttacagaatgccaactaaatgcatacaaatgttccctgaagaagagctctattaagtttattcttcatttctgacagcagaatcccaagttgctatttaatttcagaaagtcctttcagcaggtggctgctcatggtgggtatggggtgtgaacactcacggtcactgaccgtgctgaggtatcaggaaagcctgggaattagcatgcaggaaagagtcacccggcagaacgtgttagtccttcaactcttctgtgatttgctgttgatacagaaatctatcctttgaagatggcctctgaatggaaatgtactctggaaaaatcccttattgatgctgccaaatttcctcttccaatggaagtgtttaaggtaagatgttgattcttagcaatgtatctaccctttttgagaataaaatcatctacaaagttttccggccgggcgcagtggctcatgcctgtaatcccagcactttgagaggctgaggtgggcggatcacgacatcaggagatcgagaccatcctggctaacatggtgaaaccctatttctactaaaaatacaaaaattagccaggcgtgtggtgtgtgcctgtaatcccagctacttgggagtgtgaggtaggagaattgcttgaactggggaggcagaagttacagtgagctgagatcgcaccattgcactccagcctggcaacagagtgagacttaatctccaataaaataaaaagttttccataccaaatccttttccacttgaaaaggcaccttcttaaccagtttccattttaaatgcttaaggttttatctgtttcatgttgctttttaaaaaaataatcttcataatgacccatattacaagatgctgattaaaattgtttaggtttactgacttt

SEQ ID NO: 634 - DNA, 1193 bp, Homo sapiens
gggatggggaacccatggatatggaggggactacttattctccccatttctctatttctccatttcaccttcagtccacccctcttgttattttgtgcccatttctctgcaaattccttcttcttctgaaactgtataaactgttcatgtaattcggggcctggtttgattttcccacctggaaagcctttctctgatttccctagcctcactggtttctctctccttggaacctcctgaattgtacactttataatttctttgtggtttgtgaaaagtttctaaataggctgtaagacttcggattctttcatctccttggtgcccaagcatgtggtatgtgtcaagttgctacttagagacacattttcagtctcagttttagtatttacttaagcatggtgatgaaagttaagaaaaacattgaaatcaaacctacatggagaaaactgctgtgattttaagttgattggatactttgctgctgtgttgaagtgttttttttgttttgttttgtttttctttctcctttgtcttgccagcaatcaaagagaagtacacagactggacagaatttctcatacgtgacttgactggttcgaggacagcacccgccaacctcctggaaggtgtatgtattgttgttatacatctaatgtatctctgaagcaccccagttacgtgagctcagacctgacagcacctttgcatatatccttcagcagatgcgtgctttctgcagacactgccatccaaatagcctcccttcctcttttgtcctgaattacttaggtgactgatttgaatggcattgatgaaacttcccctgtgatgcaatcagcaaatggaaaatttgctctatgtgaatccaatttttaaatcacaatatgctaggatgtcttcctactgtcctatatctttaagcctctttcctatgtgagtgaatataaatcaaatcctgtagaatcactgttttgaacaggtgacaagatcatgtatgtgctaatatagtctcttggagtacattgataagtcgttccattaaatgttctattttgacgcataaccccaagatttgaacatacacacgttaaccaataattgaattaacttctcttgtaaaaacaagaggagaaatggcagatcgtatttcagtgtagccaaggaaattttaatgtattgaagaaaacata

SEQ ID NO: 635 - DNA, 1255 bp, Homo sapiens
taaccctctgaccctccggcttgtttcatttataccgcggggcaagatggtagagaacacttaccacatgattggaagtactttgaggaagaactagataaaagtgagtcattaattaattgttaagagtcagcagctgcacactcaggcgtctcgtttgatgggaaagggaagcaacttgagtgaatttaaatcacttcgcatgtatgacagtgtattaaagtaatgagccatgcatctggccaagttggcgttgtcaagctttgactttctctgtctgtctctctctctctgtctctgtctctctctgtctctatgtctctctctctgtctctgtctgtctttgtctctctctttctctttctgtctctctccttctctgtctccctctctgtctctctctctgtgtctctctgtcttcatctctctctgtctctctcagtctctgtgtctctctcagtctctctgtctctctctcttagtctctctctgtctctctgtctctctccctctctgtctccctctgtgtctctctctgtctctctgtcttcctctctgtctctctctgtctctctctcagtctctgtctgtctgtctctccctctctctctctctgtgtctctctctgtctctctctctctgtctctctatcttcctctctctctgtctctttcagtctatctctgtctctcagtctctcagtctttgtctctctctgtctctctctctctctctgtctctctctttggtagcacctagtttaattcctgtagcttacatgctacaaaaagattttacaaaatccagcaataaacaaaatgaaacttcctgatataccataactgatacctgtgactctgggaatttcttaagacatccggaaataagtgtacctttgtacgtgaaggacgtttgttttccccaagatctaggtcaaattaagaacagacttgtgtcccatccagtttgagataggctggttggctttctcagggaccttgtgtttgcagctctgtgacagtattcagttttaaactttggatttctttctcctgaatgagcaaaagtaatgcttttgcagaacgccggggaattaattgctgctaagatttgaagaaagacatgtgcacagttcctagctctgtatttttaccccaggagtactgcgaacttgatgattttggtttagtgacttccttgccagcggacttacgttttttgtttgcatgttgactgctttgcctagaagttctga

SEQ ID NO: 636 - DNA, 1194 bp, Homo sapiens
ctatgaaggattctgcagggtgaatgttgacatgaataactaaccagcaaataagtgtcaattaaaaattctattaccataattggccgtggcccttcctcatcaaagtacagtatgtttagatcaaatttaattttttttgagatgcttgcctgcttagtttcccaatttatctcctctttctgctaacaaaagaagctgttttccatttagaggggcatctttctacgctacctacatgtgaatactatgttcaaacactataaagatttttaagtgttttttaaaaacaaagagatttggtcatttttgcgggtttcttttctccttctaaatttcatggtcccttttatcctttcttcatggattctctacttttctttctcaaaatttccccttttcctgagggatttttgcttccagctgatgtgagggctttgatggtgtggtttatgtgttaggattacaactgctgttcccaaaaggccctaaaatgctgtggctcaagttaatttagaagtttactgctctttcttccaaattccatgtctgcatggtggaaggctggttctcctccaggttgcccagcaagaaagagggaaagggagaggctggggacagcagctcacctcccactagcaaaactcggtctcctgggattccaccaggccctacctagttacaaagagactgggaaaggtactccctagctgtggggctcctccttgctaaaatccctgggatggggaggctgcttttcctacaacaaagaagggagggaaaaaagccctgggggacagttagtctctgtcacaactcatttagctacacatttttgttttgttttgttttgttttgttttgttttgttttgagacagagtctggttttgtcgcccaggctggagcgcagtggcacaatctcggcttactgtaacctccacctcctgggttcaagcaattctcctgcctcactcagcctcctgagtagctgggattacaggcgcctgccaccatgcccggccaattttttttttttttttttttgtatctttaatagagaaggaggtttcaccatgttggccaggctggtctcgaactcttgacctcaagtgatcctcctatctcggcctcccaaagtgctgggattacaggcgtgcaccaccttgcccagcctacaaaaaatttttaaagat

SEQ ID NO: 637 - DNA, 1198 bp, Homo sapiens
tttgagttcctagaacagaattgctgtaaaagaagaactaaaatcagttttgttctaaaagattaaacaataaccttaaattttttagatgcgggcttaaagctatatatatatatatttgtccgatgatacctaatggtcactattgtcatgtctaccaaaaatttaatagcttggtatgtcattgaagcgtgacagttcaaagccatgttttaactttctccccaataagatatatctgttatttcctcttccaagcccaaattccatcatttgtaaaatgggaatagtaacctccattggataattattataatcaaattagatataaatgtcgtatatttttacagatcttagatatgattttccaagggcaggcccacatttacagtctgttcctgaaaaatctcagcactgaatgtaatggttgtcatactttgttttctgaagaaacgcttacagtacagtaaatatatgcatttgcaataatatcctccggaattctttctaatctgggaattctgacatgctttgcacctgctagggcgtagtctgtgtctgtctggggcttttactgctttctggttaagtgaggctctcctctgcctttcccatggaactgcgcagaagctgcacaggccagaccttgtgaatatgttcttgagacagggtctttccctgtcacccaggctggggtgcatatagcttactgcagcctcaaattcccagactcaagcaatcctcccacctcagcctccttagtagctgggactaccagcttgcaccaccatgcccagctaacttttttttttttttgtagagatgggctcttgctgtgttgcctagactggtcttgaactcctgggctcaagcgatcctccccactcagcctcctaaagtggtggaataacaggcatgagccaccgttcccagcttacagtcatcttttaaatgtctgcatttgtcttccatcattttttgatctgcttttagttgtagtcatctacaggtttaagtaacttttaatcttttttgaacccttagtcatattgaagatgttttatttaaaatactacttaaatgtagttattcgtatctagttttaccacaggaaaaaagtataataatatttctctctccctgttgtgtgtctcccctatctctttctcactctttttttttttttgagcactgtgat

SEQ ID NO: 638 - DNA, 1152 bp, Homo sapiens
ccctagttttatgattaatgatctgaaatcattctggattgaacgcatattaccaacttctaaaaaagtttttattaatattttcaaacataaaagagtaaaatgatacactttcatctgctggcaacttggatagatttaacagttatcaaaatgttgccatacttgattctttttgtctttttattcccaacgcatttccaaacaaattcaaaacttaatatcatttcacctctatattcttcagtatgcaactctaaaaatatggttattttctcatataatcacaacgttattatcatacataaaatatacagacattttccttgttaccatctaatacctggtccatattcagatatctttatttgtctcaaaaatatcttcaacagtttaaccaggatccaaaccagacttatatctcataaggacttgtaatctagacctgttatttttaatccacactcctacgctcctcctccttttttgcaggggaaggggatgagttcttactctgtcgcccaggctggaatgcagtggtacgatcataactcactgcagccttgaacttctgagctcaagccatcctcccacctcagcctcccaagtagctgcaactacaggcacatgccactacacccagctaatttttttattttttgtagagatggggtcttgctgtgttgcccaggatggtctcaaactcctgggctcaagcaatccttctgcctcagcctcccgaattgctgagattataggcgtgagccaccatgcccagccgcttcctttttgccatgcaattgatttgtttaagaaaccagatcttttgttcagcagaatatctcactttctggatttgtctgtttacttcttcgtagtgtcatttaaattattgttctatccctgtaactggcatttagtcctaagtgcttgattagatttaagttcattctttttttcttaaagggtattttgctgctatatacttcttattacttcagatcagtaggcatggaatgtctgattgtcacattcttagtgatactgaatgatttcattgggaaattattttttaatctagtcattcctttcacatgtattagctgaaattcatccctaaaggtgaacctcagcgaccctgaaatacacctc

SEQ ID NO: 639 - DNA, 1169 bp, Homo sapiens
agagggcacacaagagatgccacaatcgggaggcgggtagcgcatgggaatgaaaacctggagagatggagaccatggaactccagaaaagagaatatttataaaagaagggagtgagtgattggccgaatggcatagccaagacgtgaagagaatgcagagggcatggccttccggaggacgtgttgacctttgtaggtcattgtcacaagagtgacagcaggaagccaagtggccgctggccaatggggaaaataaggcctaaagaagctgtcttcagatcatttagtacccctgcttgaaactcctccctgggcttccacaagctgagggctagaaggccaagggcatgaggcgatgggagctggggctgctgggctggtcctgctctgtgcatgcagccgggagtggggatgtggagcaaacatgaacgctggggtggcccacagtgaagtgaatccaaatacccatgtagtggacagccagggtctgtggctgacacacgcattgggctccttttgtcttactcagcattccttcttccgtgttctcattgcttagatcttgacaaatattatacataatctggggatgaatgaatttttccatgcttgaaaggaacacctttggaaacccctgaccagggtaaagcaaggatcccaacgcactgcgaacagctgggtgacggagtaccgtttacatcttcacagaagtttttcaccatttctccaatcattctgtgttttccagcaagtttctatagaagtatgctccaactcactccgtcgtaagcacggcttctctcctgagtatgctaaactccccaaacgcagcaacaacacagcgttccgatctttggaattaataagcagtgaaacgtttgaaactgaacaaaaatttttacagctactgaacttcctgtaaggaaggcatgcttagtaaactgcactctttctgtaatactgtgaaatgggaggtatttacgttggagggctgattgctggttcttcatatgatgttttgaagtggaggtttctattaatgatgcctctgttgagcacatctggtatatttctgaagagaggctttgtaaacacattgggcaggcccagcttgtaagtgacaaggcagcacagtgagggtgcagtggagaaatccaaggaaataag

SEQ ID NO: 640 - DNA, 1125 bp, Homo sapiens
ccccatctccctctcaacctcaacccacctgcatgcatctcccccagaggaaacactgagggtaggggacaggaggctcaggacgcgccctctgaatcgagtgtttcttcttcacaagtcaccaagagaggacatgagggggaaagtcctttttgcccttctccaaaaaataaccttccacagagacaaactgtccttctatccacttttatcttttaataaatatcaaaaggaaaaagctgcaagggtgcaaagggcctgtgccagaagaaaacacacacagggaaaccgctttttttaatcaattgtagagaatagtcatttttaatctaaattagagaattgtgatacaatggcagtcctcaaaggcgtaacgagttcatctttctttcaccataggggttatagttggcttgtgctactctggaatcattttactgtttgtttttattatcttaagtgctaattaaaaaaaaaataaaattttaaaaaaacctgtagtttcattacctttttgaataatgtcatacaaaaaatgtatttgtttttttgtgctgtgagaattgatgtttgtagattaataatcattttgtttagaattacaaaatagtttttaaatattgtctgagaaaagccaaagttaatgcaacctagtggaaactgtaagaccatttgagtattgtttgttttattgatgcatttggattttgttgtttgatggaatttgagccaaaaaaaaaatacgcaggctttcctatttctacaactgattgtacttatgcattttgtaccagtggaactttttatactggagattaaaaaaaaaatggaaatttttgtggcttgctctggtgggcccctgacaatgactgatttcaagtttgatttcgggttgattgattgattgattgatagaaagaaagttgcttttcttttgagaattaaaaactttggcttgatttcttttttccctttgcttatatctagcattagaattttgtcttaaaataacagcggtaagtttcactttttattctgtattgtgcagttacacaataaggtaattagatttagaagtactcagtcactttaagtggataaatgtattagttaaaactttagggt

SEQ ID NO: 641 - DNA, 1179 bp, Homo sapiens
gtcacccaggctggagtgcagtggtgtgactcattgcagtcttgacctgggatcaagccatcctcccgcctcattagcctctctagtatccggaaccacacaggcatgtgcctccatgcctggctaattttttaaattttttgtagagatgaggtctccttatgttgagtaggctggtctcagtctcctggactcaagtgaacctcccgcctcagcctcccaaaatactgggattacaggtgtgagccacagcccccgcccttagatcacaacttgtcttggaaataaaagtggcatttgttcatataatgcaaaattattttcccagtgccatcaaatttaaatgattttaacactagttattctaagtgttaatatcaaatttaaaataattttaacactagttattctaagaatggatcttccaagttcagtttgtgaataagctttgtgtggtgaggaacctgctatatatttaaagtactgttttaatattttcaaaattatgactttctatagcccattgtttgtgaagtctcacactctgaccatgtgaggatattgtgtgtgtgtggaagagtgaggggggtatgtatgtgtttgcatttgtctttctcccttagtgtttcttgccaattacttaacaaatatcatctgcatggtaactgggtctgggcgctttgcatctagtaaataggctctaaaagtaagacatgttattatattgagttgccatccagtaggcagtatcattccaaaaggcatcttgaagaaagccgctcttccctgtcagtctttattttgctttcccgtgggattgtgttgctgatctgtcttgaggtacaatagaatgcaaatttaactggtatgtaattgtgtccaagactgtccaattttaggaagtggtcatttcttttaaacctatttgatagcttaccttcagcaattattgtcactagactaatctataaaacaatattaattctactatcctaactacttagaatgtagtttggctcattattaagggtcagtttatacttagagatgtttgtttctatgtctgcctatgaaattttataactaaaggttactttctagtgtgaaggtggtttcacttataaatgtgtggaattgaagctaaggatgaaaatataaaatatgagatctggaacatca

SEQ ID NO: 642 - DNA, 1230 bp, Homo sapiens
tttatttttaattttatttatttggtttttgagacggagtttcacttttgttgcctaggctggagtgcagtggtgccatctcggctcactgcaacctctaccacttaggttcaagcaattctcctgcctcagcctcctgagtagctgggattacaggcgcccgccaccatgccaagctaattttttgtatttttagtagagacagggtttcaccacgttggccaggctggtcccgaactcctgacctcaggtgatccacccactttggcctcccaaaatgctaagattgtaggtgtgagccactgcacctgtcgaatgcctttttagagtgctgacactccaccgcccttgacagtgactctccttgtctctattagattgttacaggtcagactgatttttgtttcttctctttcttgggcagagctcgaaagagcattccagacacatatgcagagcacctcattgctggcggactcatgacgcaggaggaggtgtctgaaataaaatcctcctactatgccaagttgaatgatcacttaaataacatggcccactacaggccccctgccctgaacctgcaggcccactggcagggcctggctcagccagaagcgcaaatcaccacctggagtacaggtgtgcccctcgacctcctgcggtttgttggcatgaagtctgtagaggtgccaagagagctgcagatgcacagtcacctgctgaagacacatgttcaggtgggcagcctccaaatggctggttattgcttctccttcctgctcagcaaaggagctgacgttggtctggtgttttcagttgtctgattcatttgacaaatatttattgtgtgtcgttaggttctagaaactgatcctagtgttgttttggtactgatagtcagttacctcagattttctcttcttttctttttcctccatgtatttatttatttatgcatgttcatacattacatgtacctggaatacatgcacactataagaaatacagagatacaagaatgtctgtttttatttttccaaccagtgagtagaaaacactttgtttcaggtggcttaaataaaagaaacaaaagtcaacacacataccccaaggtagccccctaaacatgctcatgttttacgtattgtcttaggatcactataggatgacaaaccaccctggtggacctgggacttaggggttttctggaatgtgggactttaagtgcta

SEQ ID NO: 643 - DNA, 1192 bp, Homo sapiens
atcacttgaaccagggaggctgaggttgcaatcagccaagatcacgccactgcactctagcctgcgtgacagagtgagactgcctcagaaaaaaataaataaataaaaactgtatataattgctctccttctctaatgtatccttttgtactctgtttttattcagcattgtttttgatgcttaatttcgttgctttttttttttttttttttttgagatcaagtcttgctctgtcgcccaggctgtagtgtagtggagccatctcagctcactgcaacctccgcctctcaggttccagtgactccctgcctcagcttcctgagtagctggtatcatagagacacgccaccaggcctagctaatttttgtatttttagtagagatggagtttcaccatgttgtccaggctggtcttgaactccttacctcaagtgatccacccgcctgggcctcccaaagtgctgggattacaggcatgagccaccatgcctggcctgcattaaattttttgtactcattgtgaaaaaggaaatggactcttagacgttccttttttttcttcctctgaattttacagtccagaatggagaagatgatggacggaatcaagctagactgggccaccgcggaagctcttgccttgggttctttacttgctcaaggtaagaattttcttttttttttctgttttttttttttttgagtctcaccctgtcgcccaggctggaatgcagtggtgcgatctcagctcactgcaacctccgcctcccaggttcaagcgattctcctgccccagcctcccaagtagggcgcaccaccatgcccagctaatttttgtatttttagtagagacggggtttcactatgttggtcaggctggtctcgaactcttgacctcgtgttccacccgcctcggcctcccaaagtgctaggattatgggcgtgagccaccgtgcccagccaaggtaagaattttctgtctagctagtagagagtacttttaatcacgtttgctacctgttacctttgcagtttatttgagttataactacctcccattgtgttcattgaccagagaggttctaaagcatgttaatttttctttcctgacaatattacttatttgtagtataagtcatgctgacaaccttcatcagagtatagacataggacagttatgcctgggaaaca

SEQ ID NO: 644 - DNA, 1192 bp, Homo sapiens
attctggtttttttgtttttgttttttatttttgagacggagtttcactcttgttgcccaggctagagtacaatggtgcaatctcagctcggcacaatcttggctcaacacaacctctgcctcctgggttcaagcgattctcctgcctcagcctcccaaagtgctgggattacagagcattctgttttttaaattagaaatgttatgtaggaagcaaaacatgattatttaatgagtgtgacttatatccaggaaagttatgctgttcaagtatttatttagcattgttaacaataaacatgacttttctaatgagatggaactgttttgtcatttgaccagggcaggaattttttttttcgagacggagtcctgctctgtctcccagactaaagtgcagtggtgcaatcttggctcactgcaacctccgcctcccaggttcaagcaattctgcctcagcctccccggtagctggaattacagggtcctgccaccacgtccagctagttgtgtatttttagtagagatgggattttgccgtgttggccaggctggtcttgaacttctgaccttaggtgatccacccgcctcggccttccaaaatgctgggattacaggcgtgagccaccacgccccgcccagggcaggaatttttaatgaaaatcaggttatttggaagctttctgatccccagtgtgttcgcatttggtagaagatacgtttccttaaagaataactgtcagatgtggtggctcacacctgtaattccagcactttgagaggccgagatgggcagttcacttgaggtcaggagtttgagaccagtctgggcaacatggtgaaaccctgtctctactaaaaacacaaaaattggccgggtgcagtggctcacacctgtaatcccagcactttgggaggctgaggcgggcggatcacgaggtcaggagatcgagaccatcctggccaacatggtgaaacgctgtctctaccaaaaatacaaaaattagcagggcgtggtggcaggagcctgtagtcccagctatttgggaggctgaggccgaacccaggaggcggaggttgcagtgagctgagattgcaccactgcactccagcctggcgacagagcgggactccgtctcaaaaactaaaacaaaataaaacgacaaaaattagccaggcgtggcggtgtgtg

SEQ ID NO: 645 - DNA, 1191 bp, Homo sapiens
agataccatgcagcaccgaccagcctctttctccctgcaggactgaaggacgtacgccctctcccggaatcgtctcagctacagagaaccaccttgcccaaggtcaccaccctcttgccaagggggtcacttggatctaatgattggttaatgctggggggagggggtaagtcttggcccccagcctcaacagtgatggcggtggctccggggtcatcctagcttccgagtttcgtctaggttgagggcgccatgttgggactgcatcagcttctctctctgcctggttctgcttcctttactttaccatttgttgttagtccagggcacaccccagtaaacttcctgcatgcgagttcatcttagactgcttcccagggaatcgtatgtacaacactcgggagtagagagtcactgaaacggccctagctctgagagacccctcctgaccagccatcacccctcccgctcttccttactctgatttattgtcttcgtagaatttaactctcaggtctatggccatactgccctgaatgcgcctgatcttgtctgatttcagaagctaagcagggtcgtgcccggttagtacttggatgggagaatttagtgctcgaacactattgctgtagctttctttaataaataaatttgactgcctttcctgctagactgtaagctctgtgcatgcagggacatagtctctcttgttctgcagagccaagagcagggcctggtacctgacaggcactcggacaacacgtactgaacaagtgaatgaacttccaggcaggaagagtcacacatcctcaccaacaactcctagggtttcagagaactagaaagtctaggaatacagagggtgctttcaaaagtgttgtctgtaattggaaatgccttatgtttgtttagtgctttagttttattcatttttttttaaagcagttcattcaatattgatagcaacccatattatcataaacccccatgtggtgggcaagatagagggttgctttgaagcactgggagaagagaaaccggccttggtgagttgagtctcttgctcagccaggcccacatggaaatgctggtatcctgcctcctggacccatggtcctgtctctgtatcatcagcagaagcaaactcaagtcagttgccactgaaactcaccgagtctgactttcccccat

SEQ ID NO: 646 - DNA, 1089 bp, Homo sapiens
gagatagaaagactacaggctgagctgtccaatccccatgccgggatcttcccacacccgtcctcacagatccagccccagcccctgtcttcccaggccatctctcagcagcacctgcaggatgcgggcacccgggagtggagccctcagaacgcatccatgtcggagtctctctccatcccagcttccctgaacgacgcggctttggctcagatgaacagtgaggtgcagctcctgactgaaaaggccctgatggagcttgggggtgggaagccgcttccgcacccccgggcgtggttcgtctccttggatggcaggtccaacgctcacgttagacattcatacattgatctccaaagagctggaaggaacggaagtaatgatgccagtttggactctggcgtagatatgaatgaaccaaaatcagcccggaagggaaggggagatgctttgtctctgcagcagaactacccgcccgtccaagagcaccagcagaaagagcctcgagccccagacagcacggcctacacgcagctcgtgtacctggatgacgtggaacagagtggtagcgaatgtgggaccacggtctgtacccccgaggacagtgccctgcgatgcttgttggaggggtcgagtcggagaagtggtggccagctgcccagcctgcaggaggagacgaccagacggactgcggatgccccctcggagccagcagccagcccccaccagagaagatctgcccacgaggaagaggaagacgatgatgatgatgaccaaggagaagacaagaaaagcccctggcagaaacgggaggagaggcccctgatggcgtttaacattaaatgagctatcgcagacccacctgactgtggaatataaaattgccaaatatcctttctcatggaagcgcgtacccgttcgtggaggaaacggaacggcagcccagccgtgggacggacgtggacgtttactgcattcctgtttgccgtgtaaatgttagaaaggaattaaagttattactcggaataaaggatgactttggcggatgtcgcccctgcaaggaggtggctgaaagtggtgtccagatgt

SEQ ID NO: 647 - DNA, 1128 bp, Homo sapiens
atttgattgcagaaataatgtgtggaataattttcctaacatccacctcaaccacccaatacgtttttaggctttttacaacaaatattgtcactggcacacacactacatagagtcataagtactttcatttctagcatcaaaattcattttctgattcaaaatgtagatgtgttcaggtctgtatgttggggttcattgggaaagtaggattgaccagaggagtgtcttgcatacattaattgagtgaaagcattttagaggagaaacagccgtgatagtcaggaatcttgaaatccagtgatctcctctaatcccattaaacgtgattgtataacaataccatctgttaaatgcatagctcaggcattggaaggtggaggaggggcggtacagattttgttgaggggcagaaatcctacaggcaagaaaaactggaggaaaacatgggcagaaggccaagactatcattgtctcatccgggcccctactatataattatatcatgaagccatttcagacaattacactcaatgaaataaaataacccattatcttttcaatgagtgctctgtgtgtgtgtgtgtgtgtgtgtgtgtgtgtgtgtgtgtagtataagcaaacaagtaacacagaacctgcgcatggaaggaggctttatccaaagggaatactgcatttcaattaaactttaagctccttgaaattgttaatttgaagttcagttgaactaggttcaaacattatagtcaaagtttatttttacttctcaaactgctactcaagttttgtgtgaaaagccaagcattatgtttttattgactaagatattcatagtttcatgataaacacattagaaattagaatattaaattttgggtaaaaatatctcatgcatgtagatcaaattgaagtaattcaactgggagagctcttggacttcaattgaggagtgttgtcaagtagaaatgaaaatgagtggaaagtgaaaaggcctgagttctagaaccagttctcccacgtgtgattttagtaattccacctctctgggtcttgccttccttatcaagaagtgacaaaggtgcatggattactcctcccagggtctttttaattctacacttctct

SEQ ID NO: 648 - DNA, 1189 bp, Homo sapiens
taacagtagttatattggctgtgaaataatgaatatccccatctcacttctcaaatgttgtgatgtagttatacttttctacttgatggttgttgcccttttgcggaaaaatcagaagcgcttgattagcatatttgtagactttatgcctatgtaaatggaatatgacttagttttttgttgtaacaccttgaattgtttattggtgccaggtactgtgctaagtgcattacatagattttctcatataatcttcgctgcaaacttttaaagtttgtacagttatttttagttagtaatagtggagccaggattcaaacctaagtttgcctgataaaaagcagtcttcctaatctgtacactaatactttcaaacacaggtgaggaaaagtcgtcattgtaacctgttttttcttggacctgccctctagagattcagagagaataggtggagcccaagaaactgcaatttaaacaagtcaggtgactgggatatagctaccgttgaactacactttgagaagtagacacttcactgtgcagctttttatcaaataaccaatgtaacatcgttgactcgcttaaggggaagtttagaaatccatttgtcttttcttctgaatcttgtacctttttgagttaaacttgagctcctgataataaagtgatgactctaatagtgttaatcttgtgtcacagatgaagactaagggaacagaaccacttttatatttagatttcttttacctgaaggaatctaaatgaaatgtagacttgttcgtgttctacagggctttcactttgtgaatagagcagtaagtttgtgtgcttttcagttattctgttatgtgagttagttcttctacttgtcagaaaatatgtattgtggaagaagaagaattttatgaatctagaatcaagtttatagcagtatactctgaataaataactgcacagttcctgtcaaatgtgaggggaacccatttgacatctttacagaactagtcaaaagattagaaagggagtacacattattttttcccactttaaaattgaagaatgatatgatgtatggttataatgcatttcactaattattgctttaattgtgtaaaggcatttcttttgaagaagctcctgttttcttcggagaagtcttcttggcgggattgttcaggtatgatagctg

SEQ ID NO: 649 - DNA, 1167 bp, Homo sapiens
tctttgtatctcccatagaccttacctgcctcgaataacatcttacacttattaactgcttaatacatatttatcaaatccatagtaactttttatttcatcctgttgaggcttttcgccctccattaaaagggtttcttgggagggagcggtggctcacgcctgtaatcccagcactttgggagatcgaggcaggcagatcacttgaggtcaggagttcaagaccagcctggccaacagagtgaaaccccatgtctactaaaaatacaaaacttagctgggtgtggtggcgggtgcccgtaatcccagctacttgggaggctgaggcaggagaatcacttgaatctggaaggtggaggttgcagtgagccaagattgtgccactccactccagcctgggtgacagagcaaggctccatctcaaaaaaaacaaaaaaaattcttcttatggttctgttctttaaaaaggtttctttctatggttctatttttatggtttatctttacttacaatttattgttcttgattcttttttttttaacttaaaaatgatgactgacacttcctaatttatgattaagaacttcccttcacaacacccccgcctccatttccgctgctaacccctcatatgagtgtgttcagatgagatcttgttcctggtctggcttaactgtgatacgaattattcaggccatggagctttttctagaattgtcactgggcttcaagacttccaccaaagtcaaaatcagtcggcgatggactacctcaaacagcttgaattgaattaaaatgaaccatagcactagaaaggcatgtaatttgatctgaaatattgcgcaggaacaatatcaagtctcaggcaagacaggcaattagcaactttgtgataataaagaatttgaaatagctcttgagttcataactcgttgcctgcctgtgtgttttggttgggggattcaaaatgtatatgttactattttacctgtgacattacaataagcatctgatggatttacactagtaacattgatcttttcccattttactcccttttactgattataaatgttataaacattaaaaactggaaaatacattaaattgtaatgaaggaaaaaaaatggtcgatcttcactcctcctgctcaaagatgagcttca

SEQ ID NO: 650 - DNA, 1179 bp, Homo sapiens
aaggtagccagattcttacattgcaactcggggttttgcaaggcacaaaagcagaagctgcttccaatgatatgggtcccaaactggctttgcatcactttattcacattctgttggttaaagtgattcaccgaccagctctggtacagggtagaagggggctacacaaggatttgagtattggaatgcactgaaggtcatcatggagactaacccactgtaggaagcacattcatcgaaaacgtcatttccagtactgcttatccatggataatgaggacctcctgtagctgtagtcactttggtgcatcgtttccaaaaacctaatgagttgtgatgtcaattgcagctgtcaatctacttttaatcacaggcctcaaatgaagaaattcatttagaggataagcaaattacagcttcagttttgttcataaacttaagccccttattgctaatttttttgaaagaacaagtttatgctgatttgtccaaggatactcagcaaatatttggaaaatagttcaaagtttaatgtataatcataatcctattgcttcttggccttttggcaaagatcaagtgtagtgtctgttcttatcagtttaataatcataatcctgaacatttatatattattattattattttgagatggagcctcgctctgttgcccaggctggagtgcaatggtacggccttggctcactacaacctctgcctcccgggttcaaacgattctcctgcctcagcctcctgactagctgggactacagacgcgtgccaccacacctggctaatttttgtatttttagtagacagggtttcactgtgatggccaggctggtctcgaactcctgacctcgtgatctgcccacctcggcctcccaaagtgctgggattacaggcctgagccaccatgcccgacctcatactttcttatttaagtggtgcttttaggtatcgttttacttgctttttatttcaaatcttatgtggttaatcaggcagatattccagttttcaagtgaggaaactaagtcatgagaagcttttaaatgctccacagtcacacagccagaaaacactggagccaagactccaagttttgggttcttcttttttatttttttaagacagggttttactttgttggccaggttggagtgcagtggtgtgatc

SEQ ID NO: 651 - DNA, 1173 bp, Homo sapiens
tcctctgccactctcgctccgaggtccccgcgccagagacgcagccgcgctcccaccacccacacccaccgcgccctcgttcgcctcttctccgggagccagtccgcgccaccgccgccgcccaggccatcgccaccctccgcagccatgtccaccaggtccgtgtcctcgtcctcctaccgcaggatgttcggcggcccgggcaccgcgagccggccgagctccagccggagctacgtgactacgtccacccgcacctacagcctgggcagcgcgctgcgccccagcaccagccgcagcctctacgcctcgtccccgggcggcgtgtatgccacgcgctcctctgccgtgcgcctgcggagcagcgtgcccggggtgcggctcctgcaggactcggtggacttctcgctggccgacgccatcaacaccgagttcaagaacacccgcaccaacgagaaggtggagctgcaggagctgaatgaccgcttcgccaactacatcgacaaggtgcgcttcctggagcagcagaataagatcctgctggccgagctcgagcagctcaagggccaaggcaagtcgcgcctgggggacctctacgaggaggagatgcgggagctgcgccggcaggtggaccagctaaccaacgacaaagcccgcgtcgaggtggagcgcgacaacctggccgaggacatcatgcgcctccgggagaagtaaggctgcgcccatgcaagtagctgggcctcgggagggggctggagggagaggggaacgcccccccggcccccgcgagagctgccacgcccttggggatgtggccggggggaggcctgccagggagacagcggagagcggggctgtggctgtggtggcgcagccccgcccagaacccagaccttgcagttcgcatttcctcctctgtccccacacattgcccaaggacgctccgtttcaagttacagatttcttaaaactaccactttgtgtgcagttgaaggcccttgggcacaatgagagccagtcctccaaactttcagaaagtttcctgccccttctggcaggctgccaatcaccgggcgggagaaggaaggaggggaaggcggtggagggagcgagacaaagggatggtccctcgggggcggggatggcggggctgtcctgtaggtctgtgcggcc

SEQ ID NO: 652 - DNA, 1199 bp, Homo sapiens
atcatttagtttcttattacctccctatgccaggaaagaaatagttgcaatttattgtagtcatcatgaaatcttcccttgcacataaatttaaaatgtacctgctgcacattttaatatgtcttaattgcttttaaacttggctgtattgtgtacaactattataccatcttttataaacacagttttttaagaaatttctttttgtaagttacaacattccactggatccttatattgcctgtagtggaagagggtcttgtgtgtctgccccttctagttttcactcatgcagaagcaacataaccttctgatttgcacaataaattacatatatttagcaggatttttatttgccgtgatatataggataatttagtctttggcatgtggcattatatttattttggtttttttttttaaacaggttatcaacgaaacttctcagcatcacgatgaccttgaataaaaattgcacacactcagtgcagcaatatattaccagcaagaataaaaaagaaatccatatcttaaagaaacagctttcaagtgcctttctgcagtttttcaggagcgcaagatagatttggaataggaataagctctagttcttaacaaccgacactcctacaagatttagaaaaaagtttacaacataatctagtttacagaaaaatcttgtgctagaatactttttaaaaggtattttgaataccattaaaactgcttttttttttccagcaagtatccaaccaacttggttctgcttcaataaatctttggaaaaactcttttgttgtgttatttattggataatatctaaacaattctctacttggtcctattagttaatttgtcattacaatcatgtaagttgataaattcaggttatttatgcttgagatgtagttcttaattttgtcatttttgatagacctcacttctttttattattacttaaaaacatttacaaataggtggtgtcgaataaaataacttgtaccaaaatgaagataggtctctctaaaatgagctcaggtctgtgattttaatcataacaaacagacttcctaaaattaaaaaataaaaactttttttagtacatatagcatatgagtaacacaaattccactttgggagttaaagcataggaagttgccaagatataggggcttatcttccgctagcaagatgcagag

SEQ ID NO: 653 - DNA, 1179 bp, Homo sapiens
cgtcccccaggtgcgcggccaccatggcgtccagcgacgaggacggcaccaacggcggcgcctcggaggccggcgaggaccgggaggctcccggcgagcggaggcgcctgggggtcttggccaccgcctggctcaccttctacgacatcgccatgaccgcggggtacgcgcgccgcggggcaccctcgggccctccccgcgccgcggtccgcggaggttccgggttcagggggcgcgggccggggtgtaaggggcgcggggggtgcgggcagcggccgtgggggaagggagctgtcgccgcggccaccgccggggttgaatggagcgggcgggggggccgggccctgcgcgcctggcattgcctaatacggtgcacggcggggcgctggccggaggttaagtatagaaccgggcaggaatgcggtgccggcccgcgggggaggtggctgctgccccggcgccgctgccttcgctgctgttgaaggagcgcccagccctggccactcgatggtctcgggagcgcagagcttcatgctgcgatcgctgggcagagttttcgcccctgttaatttcaccgcgacttttttttttttttttttttaaagcacagcacgtcctagagcttgtcacttgggacgattttgaaataaccaccccacttatcccagcgtggagctcctgcccagcatctttatggcctcaggctccgtggctgataagctggaccttgatttttggctttgagtatgactttgcaagttaaggttacacaatgactgtcgctcttcgcagagctctcaaagtgacttttgtgtcaactgcttctcaaaacctgttgggaaaatgcttttccatttctcaattgcactgccttttaaaaaagttattttcccattatcactcgaagtattaacttatgtaaacgcgaggaaaagtttactattttctttttttctttttattatttatttatttattttgagacggagtctcgctcggtcttggctggagtgcagtggcgggatctcggctcactacaagctccgcctcccgggttcatgcctttcttctgcctcagcctcccgagtagctgggactacaggcgcccgccaccacgcctggctaatttttttgtatttttagtagagacggggtttcaccatgttagccaggatggtc

SEQ ID NO: 654 - DNA, 1221 bp, Homo sapiens
ttccatgctgttcttttgatacctacttctttttctggttagcagagcttcagattacatttctttgcagatacagtttccaggaggatcagggatattagatgaaagatttttgaagaattgatttgcaaagaggataatttctttcagacttacttttccattggccatttttaatgaactgttacatcttcgggctgactgaatgacagtcctttcctcaccacctaaatgtgatgcgaagtcctcctgtcagcatttcttacctccccagatctttgacagtgataaattttgagaaaaatcaaaagttgctgcttatcagaaaaagttctctaatcttttgaaaagactattgaaattcaaatgaggctctgtgtatgttttttctgggtactgctgggcagatttctcaatctcctctttttgagtattagtgtaaggatattctcaggataaaatgagatcattatgaagctttgaattctttagaagcaagtctgttatttttgtcacttttccttttcccacaaaccctgtttttgtcttagaaaataaatagttttgacttcatttgctattcacagaaccatgttgtaggtagtttatatccttctgattaaaaaaaaaatacttgttcttttataactgagaagaattgtgccactgattttgatgattttgagacagcctcaataaatgatgtgaacaattttagatttctgaagtgggttgtgtttctgatccatccatacaaatatgaatcagatgctgattctatttatgtgtaggaaagtaataaagtagttcatgagttttcaacataatatctgctgataactgtatcatatgttcctggatgtatcattaatcaagaactgtaagatagcactcaactatgatagtaggcaatttatatttgatcagataaactgttaactttttaataagttttaatatgcttagctattatgtttttgaataaggtggcaggttttagaatttaagtgtgttcttttaaaaaatgcacttaaaaaaaaaacaacctgcttggctaccagtcagtgagaatgatgaattaattattaaaatgcactaccagaccaaagtaataacatgctttccttttctaagatgaagtaagtgatattgttcagaatgactcactcaatattcttgggctttagaggggttgagtacctagggagcaggctctgggac

SEQ ID NO: 655 - DNA, 1195 bp, Homo sapiens
caggtgcctgcaaccacgcccagccaattttttgtatttttagtagagatgggtttcaccatgtgggccaggctggtcttaaacccctgacctcaggtgatccacccacctcggcctcccaaagcgctggaattataggcgtgagccaccacgcctggccgaatctggttcttctttagctcaggcagagtaatcgtattaccttttttttgttgttgtcataaaataagataatgcttctctaagaaataagtaggctgtgcacagtggctcacgcctgtaatcccagcactttgggaggccaaggagggcagatcacgaggtcaagatatcaagaccatcctggccaacatgatgaaaccccgtctctactaaaaatacaaaaattagctgggcgtggtggcacgtgcctgtaatcccagctactcagaaggctgaggcaggagaattcctggaaccagggcatcggaggttgcagtgagccgagatggcgccattgcactccagcctggtgacagagcgagactccaccttaaaaaaaaaaaagaaagaaagaattatagtggagactattaaagagcttgagtgtatccatgttgttgggtctacatgtaaaaacaatatatatatatatatgtatatatatatatatgtgtatatatatatatgtatatatatatgtgtatatatatatatgtatatatatatgtgtatatatatatatgtatatatatatatatatatataaataaggaacttaactatacataattttctgcagtatgaaggctgaacagatcttaattttttctacacatttttgtttttactttagcatgcatttgactgagtcgtgaagtttttaagggtgtgagatatgcttttttatgttttaatccccaattcagtgcctgaatgctgacgggtgctacacagacagtgaatcagtgggtctgtgcaaacgagggccagtgagaaacaccctagtgtcctaactgaaggaagaggccatttccagtgacagcacactcatcagttcacctggagtaccggaggcacgttttcaggttgactagggaaccaatgaggcttctgacaagcaggggacttgggtgcagggccagcaggagcccaggcctcctttctagcaagctgtgctgttctgccgggcttctcctgctatgggttattgagt

SEQ ID NO: 656 - DNA, 1099 bp, Homo sapiens
tcagtgacttatttgcatatttaagccctattcacaagagaccataatcattttaatcttatattttccctcaggaaatttagggactctgaagcccctattttattctcttggagtaaactgttgagtgtagttacaaaaacttttatttatgacttaaaaaaagtttagctgctatttcagtgaaagtgtaaaataaaacggtcatgatttttttcaattacagaatagttacaaattttaccatgttcatctattccacagagcatgttaaaaacaacaacaacaaaaacctaacagcaattacaaccttggtgttgcgtttattctaatcagagtgaatgattataatcacactttgctattttaacataaattggtgctttagagcattaaagaggaagcagcaggccctgtactcagtatttattatttcttgcctcagaatgcaaaacaactttaaagtgtctatattcatatatatgtgcatttcttaagatttaaatacaaactgttgttactccttaagcttcaggctttctgcgaaagctctaagaatatcttcattactatgcttggtcaactggaagatggtattaataaggtcagaattaggaattggattgctctgtgggtcctccggtattgtgcagaggaaagaaaaatgtctttcacaccacaaactgtgtgtctgaaccccagccaaacaaatgtgttccattggtccaatatataagcattaacaacaacaacaaaaaatttaaaacaagtaaattaatgcattcacatgatcacttcttgaaaatggttcaaagcatgttttcctgatggtgggattgtttaaatgacatgttttaaagtttttaatactttattagttatgaagtgcttcttttatatgttaagtttaggttgccagtactcataatttttatttctgcaattatgttataatgagttgtttgcatgcctacttaacccaagtaaaacgatgctgtttgctctggaatgttcatcttttagacaggttttggctcatttccaatcatggtgcaatatagtgtaacattcatttgttttcattcaacagttttatttt

SEQ ID NO: 657 - DNA, 1178 bp, Homo sapiens
attctcctgcctcagcctcccgagtagctgggactacaggcacatgccaccatgcttggctaatttttgtatttttagtagagagagggtttcaccatgttgatcaggttggtctcgaactcctgacctcaggtgatcttcctgcttcggccttccaaagtgctggggttacagatgtgagccactgtgcccagccagtggctcacttttaaatatgactttagtgtttgctttaaagacaatttattctctgtatggtattaataatatgagaagttcctttctgaactggagaatcattctctttatgattaagctgatttttaggaaacagtttcccaaaaacactgaatcaggtggaatagatttctgaaaaatatgtatatcatgtctgtgttcattatgaacttttctattttgcccattctattttgttcatgtggtcttatttcattttgcatcatttaacaaatataacgaggtcctacatcttaacttttaagatgtaaagacttacgtttatttccgtatatacttttattttaagaacttaatttatggccgggcacggtggctcacgcctgtaaccccagcactttgggaggctgaggagggaggatcacgaggtcaggagttcgagaccagcctgaccaacatggtgaaaccccgtctgtactgaaaatacaaaaattagctggttgtggtggtgtgcatctgtaatcccagctactcaggagattcacttgaaccctcggggtggaggttgcagtgagctgagattgcatcattgtacttcagcctgggagatacagtgagactccgtctcaaaattaatacatatataatatatatatttgttttaatatatataaaaaattagccaggtgtagtggtgggcacctgtaatcccagctattcaggaggctgaggaggctgaggctggagaatcacttgaacccgggaggcggaggttgcagtgagctgagatctcaccattgcactccagcctggatgacagagcaaaactccatcttaaaaaaaaattaatttataatacaagggcctttgcagccctgctgtatagtgtgggcattaagagccagacttatttctttttgacctctagatccacatggggaatcacttcatctctccaacctcaatttcattatctgtga

SEQ ID NO: 658 - DNA, 1198 bp, Homo sapiens
gtctttaagggagaaataggagacaacaattttccattcactattataagtaaaagagtggactgacatttgggtcctgaagtgttatttgatgggctcaagcttacaaacatttccccatttaatctctataaagtccctggtaggtgggaattattttcccattgtacagattacaatttaacccagaaggaaataaatgagcattcataagaaatgtttttagaaagatgtcacattttgaaaccagacctctaagtagtgaaagtaaattcccactacgttcattacagatcagaaaacgtgagactatcccaacagcaggatactttattatcccttggaattcaggcttaatgaaccctagtcaccagtccccacagatcaggctcctcaaagcctcatcctaatccagttcttctggatcatgcaagctctgtctgccttcccaaaagaaactagcctgggccttatcctaaactaggggctaagagcagaggctacacacagtcctcgcagtccctgaggtgactaatattatcaagtaccttctaaatgccaggctcatctacggccataccaccctggacgtgcccaatctcgtctacgtgccaggcttgggggcatatgcagatacatgggacagatcccttggaggatacagacagataagctcatggttcctgcacagggtggtgtgggctcttactgctgagctgagacctatgtggtgactgtgttggactgaaccccagggaaaggtgtggggtcgggtgtgatgggcacaaacagaaaagtggctgttatgattcacaaacttattgcatgtcattgtacgttacaggtaactttcagtgctctctgatgtatggagcattaacaatatggaactaaactagtgtttctcatatctttcaatcaccacttccaataaaaaatattttctattgggaggccgatgtgggaggatcacgaggtcaggagatcgagaacatcctggctaacatggtgaaaccccgtctctactaaaaatacaaaaaattagccgggcctggtggcgggcgcctgaagtcccagctactccggaggctgaggcaggagaatggcgtcaatccgggaggcggagcttgcagtgagccgagatcaagccactgcactccagcctgggcgacagagcgagactgtgtctcaaaaaaaa

SEQ ID NO: 659 - DNA, 1190 bp, Homo sapiens
ttaataatttactctagagttttcctgagaggtaacttcaagctcagtattgcattctttgtaaaattcactttctgatttgtcccagacatttctgtctatggttcacagattacatacgtactcttcaaaactctgaattcctcttggccttaagatatgaacttacaagtattatcttcactgctcctttaaatagtcctatacctgttctagtttgaaaactgaaacattggacctgtctcttggttgtttgtcttgcactaaacttaagttaaaaactcctgcataggctgggtgtggtggctcacacctgtaatcccagcactttgggaggccgaggcaggcagatcacttgaggcccggagttcgagaccagcctggccaacatgatgaaatcccgtctctactaaaaatacaaaagttagccagacatggtggtacacacctgtaatcccagctacgtggatggctgtaggcatgataattgcttgaacctgggaggcggaggttgcagggagttgagatcacaccaccgcactacagcctggcaacagagtgagactgtatcccaaaaaagaaaacaaaaacaaaaaaacccctctcctgtataactgtctttagcttctttacggggaaagcagttcattctggaactaaacccagtttaacatttaggttcattacagagagcaaatgatgctgcattgatttccttgaaactatttggtaatgttattattataaacgtttctctcccttttgtttctgtcctttctttctttttttccccttgctcttgattttcatcatgggtgccttacctactttctttaaattttgaaaactttttttttttaggttttggttatgtttttttgggggggtagataagagtctaccttgtgcttgtttaagccatacctttctgtaaaaaaaataaacagaatttttctcacacggctattttaaggattgagatatcatgtgtattcataaaatataaacttttacagttctgattttgtattgctaattatacatactgattcaactgagagtgacgttggctgtcttgacctaacaagcagtgaagataatacttgtaagttcatatcttcaggccaaggggaattcacagttctgaagagtacatatgtaatctgtgaactacacacaaagctcatctg

SEQ ID NO: 660 - DNA, 1202 bp, Homo sapiens
tgctaatgtctggtaacttgagatttttttgctgaaaggttttagagagttgtagaattaacattgaggaatgaggaaacctacctcatctccatacccagtgatacaagagctgtgggagcaaagtaacgttgagatagctacagagtaaacagtgggtttcagggtcgatctaagtttttgttggaacaagaatcagaggagatgttcagagaaaaggatggggtacattgcaccttgttctcggagcacagtggaaggctttcagctgttgaaggaggggtggcaggtgtggacataataggggaggttcacaaccgtgtagggatgaggcaggtgaggatggaccaggagtcttttgatgactgacataaaaacagggagaaagtcattatccgattgaccctggtagacttcaggcaaataagatgaggccttgagtgtttgaagaggttgggtagagaggtagtatgggcttcttcttgatcctgatggctggtagaagccttcagtcataggttcctttttggggaacggtgtcattttacattggttcaccacactcttatcttctcttgatggaaagatagggataggtcagggaaagaaaggctgttttacccagaactttagggttccttctagactatatgggtttttaaaaattattgatatatcgtagttgtacatattttggaggtacatgtaatattttgatacatgtacacaatgtgtagactccatggttgatgatggtagagcacacttaaattgaaagtcaagggaactttaattcactactgtaatttttaaatgtctgtatcatgtagtgtttgcacagttttaaccttagtttaccatctcttactccttagtaaaaaattccgtttcatttatttctttattaacttagattatactgccttatattttttagtgcactttttctgtgactaacctttaacccttttgcatataaatgttttaaaactagaaattagcaacaagtatctacttcaatattatgttattaatgtggtatcactatcaccttttaaatattgcaactataatttactagtgtaatattttcacacaaatctttggtaacgatggtagtggaccaccggtgatacataagcattgttcactaagattgttatcagagggagtaaaagtgtaagtgtcttttccagaagcca

SEQ ID NO: 661 - DNA, 1100 bp, Homo sapiens
ctggaatgcaatggtgccatctcagctcattgcaacctctgcctcctgaattcaagcgattctcctgcctcagcctcccgagtagctgggattacaggcgcccaccaccatgcctggctaatttttgtatttttagtagagacagggtttcaccatgttggccaggctggtctcaaactcctagactcaagtgatccgcaagtggtccacctcggcctcctaaagtgctgggattacaggcgtgagccaccgtgcccagcctctttggctactttaaaccagcatttcaaaataatattaaaagtgagaaaggccaaaacaaatgtatgaaacaactctattactttagcaaagaaccaagttactatactgaaagaaacaagacagtccaatacaaagtttaattcccaaagaaaattaacatattcccaagaatatatatggaacttattctaggaaaatgtagcaattaacaattttcattcattcaacaattatggcaagcctattagatgatgagctaaatactgacaaaataagatgaataaaagccaacttctaaaataaattattaaagaacctagaaaatactagagcaaaaccatccctgagacataaagatgaaaactaggaggaggatatgctagttttcaactggactataaaactgaactataatcttttaatacatactacttgtttcatcatttttacaagcatttaaaatacttctattaagtgaaatagcgaaattaaacttacaatttattaagatcatgaaatctcttaggctgcttcattccagggcaccaccacaaaaccaaacatgaaatacaaggcactttcttttataggcatcgatttaaagttaattctccatatagtattctttaagatatttaaatgactactttccctttccaaactgcctcaaaagtttctgaaatttcctgagacttttacgtaatatatctttccttacttttctgtttcctttttcctttgttgggacaataattttaatattatttcttcaatttttaaatttcttaaatttctctgatcatatgcagtttatcctggtggacctaaattggtgt

SEQ ID NO: 662 - DNA, 1219 bp, Homo sapiens
attctcactaagtgtcttaaagatgccaacctaaggccttggttaggttcctggtgccagagagatcagagttgaccttgttctcaaagagctgtggttattttgttttgacctctctgttggcttaaactgtgtaaagggcttgcttttattttgccacactcagaactctgccagagcagataggccatttgtcgtaaacatttaaaggcaaatgtatttatttgatttttattttttgtagaaacagggttttgccatgttgcccaggctggtctcaaactccttggcctcccaaagtgctgggattacaggcatgagccaccatgcctggcctacaggcaaatgtattagccagtgctgaatggggtaaggggtagcaattgaggcaaacaatgaatataataaattgtttctataagtatagaaaaaagcttgaaaggacacaaaaatatttttataaagctgttttaagctaagtgttattacaaaagagtcaaaaagataaaaaattaaaaagttcatcaagtagaaatgttatatagtaagctaaggttaattgattatcaaaaagcttggggatgtgagggggatctggctgcgacatctgtcaccccactgatcgccagggttgattcagctgatctggctggctaggcgggtgtccccttcttccctcactgctccatgtgtgcccctcccgaagctgcatgctcggtccaagaggacaaccatccctgatagaggaggaccagtcttcagtcaagggtatacaagtagctgtgctcccctgctagaacctccaaacaagctctcaaaaagcttgggcagacagactgaaaagtgacatgctttggggactaagggctttcaaagctcctacatattccttggaaactagatggccatgtgcatgcccaggacagagcacatgctcagaaagacttgagaaggctctaagttctcacttctggctgatattcaggctctgcacaagcagaaactgaagctaagaaagatgtaaactgcccaactgagtgtggaaggcatggccccaagatatacacagtctactggcaaacactggaactatatatattatttattcatttatatttagtcatacaccacataacaatgtttccatcaacaatgaatcgcatatatgatggtggtcccataagaatacaatacaatggagctttaaaattcctatctt

SEQ ID NO: 663 - DNA, 1183 bp, Homo sapiens
tgttcctgtagctttttttccctgatgtttctttccagtaacaaaatgttagtgtgaaatcattgtactgtatttagtacaaaacaaatagggatttcatctatgcatttagtaatacctgaatataaaaataaagcagccaaataaaattcagatgaccttgggaatactacacaagtaaatcacgagagatgagcgaacgaagcactgggcaaattgttcgaaacaaagggaaagtttctcagctcacaagatgaaagctttgattttctcataaaagaaaactaataagaaatagttattttcctgaaatacaacgttccaaatgggagttggcgggggggagcaacagtattttaatacattttgcaatctgcaatgctgcttgattttgttgtataattttgcgatatgcttaaaaggtggaaaatagaattaagagggttggaaacgtgaagtaaaatattttggttctgatagtaccaatcagaaagcagaaacagccacacactgcctttattattcttcataaaggctgaggcagaaggggaaaatgacaccgaagtctctgtggcgcaatcggttagcgcgttcggctgttaaccgaaaggttggtggttcgagcccacccagggacgcgctctccttttatgagctggtcgcgggaagttttgcagaaatcgagttcaggcctccgggataagaaggggtggatttccagggaccaagcaaagaaaccaccgacccttacactacgcggccagccggcgagcccttcgctttcggccggtgcagagcggcctcctctcccccgctgtcctctcccggctgcaggtgagcgcggccactccttccccggggtcttcacggcggtctaggcctcgccagggtgctggagcggggacgcgcagaggccgcgcgggcccgtttgccgcgcgcgcccgccgctccagctctgcgcgtccccggaggcccgcgcgtacacggggaaggcggcccgggctggtcttgctcggcttcgtgacgcgtgaaatgtaacggggccaccgaaatgcatgtatttcaacagtgtcaagttcaagctgcaaactgaaaactcctacattttgttgaagcatggccgcccttttgtctgttccctgtcagcgtaaacatctccgtttgcgacttaaacattaattgt

SEQ ID NO: 664 - DNA, 1200 bp, Homo sapiens
ggtggctgaggcaggagaatcgcttgatcctgggagggtgaggttgcagtggaccgagatcgcgccactgcactccagcctgggcgacaagagtgaaactctgtctcaaaaaaaaaaaaaaaaaaaaaaaaaactttcccctagctctgctttaaaatacatatacaggtcattcattataaataaaaagaacttaaagcaacctcctatgtaaatatggagaattcactgagtattaagtgtttttatataaacaaaaataacatgtggctctagaaagagccacaaaagccatgtaggaaagcttgtctcattctatgcccagtgggcacaactttttaagctaaaagcaaacagtggacaacaggttcatttctaattttgttttttttcctttttgcattgaacatcttaatatggaaagtgatattaatgactaccctacactattctaacttcctaacattatatgctaaaactattttcttttcttaccagcttttaaacactgactgcaattagtgttgagatgtgcaatttgaggtaaacagaaagaaatcaaaagaaattcccaccattagaattattcaaagacagagtaattaagcaggcatcacaaacagttttaatcggttttgaactcatttctgaacacgttaatgaccttaaaagtgatagccagcaatttcattatattaatttgaaggaaaactttgacaatgtttgtgtctttaattttaccattactacgctgtctcaaacatgccaataaattcagtttatttctgcaatgtttttgttctctagttctacttatgtaataaaatcgcatattaaagttaaattttggtatactcaatatagacacgtctcgataaatttagttaagtatacttggtaagtctaaattttggaagagaaagtggtaaacaattactcttaaaatggtatgattcaaggactaatatcctaaaacaaaaataaacatgaaacatcatggttttcaattgttgtctatcactggcaagaataacagtttcaaataatttccttcaaaaggagctccactgttgctgtatgcctgcaaagcacaagcttacttgaattttgagaataaagtggacctccattaacatgaggctgagcagaaaattgagcagtcacagagggagttcgtctgtatccaccagaagatgtcga

SEQ ID NO: 665 - DNA, 1177 bp, Homo sapiens
gagatcatggagtcatggtaacagagaaattccttgaattccttgtccttattatggcagtataatactctattgtgtggagatattatagcttattcaaacagtctcctattgatagttatatgggttgtttccagtcttctgctattatagatagtgctgcagtgaataactgtgtacatatggttttgtatttttgccagtgattttttgagatacattcctaaaagtgagcttactgggtcagaaagtaaatctgtgtgtaatattgctggatatcacttaccagtgcatcagagttttttctcacagctttgctgagtgtcttgtcagacttttgtatatttgtcatttgggtgaatgagaaatagtatctcatattggtttgcacttgcatttctttcctataatgagtgaggttgaacatcttttcagtggttaagagtggttccattgcttttttggtgagctttctgttagatctctgttccattttttttttctgtgtagaactggaagggacgtgagaccattttgtttagtctctgagttcatgacactgatacctggagaaataaatgattttcctgaagttgtaggtagctaggatagcctttttttttttcatttttagattatatgttagtgatatttactctttgtggtgtaagttgttgattccccttcttacccacctacagtttgtcaccttttaaccttgctcctctttgaggagttcttgccttctgagttatctataggagtttgggaagaaggggtgggtaaggaattggagcacataagattcacagtagtttttgtggggcatgataggcttgaatcatcatagataacaaggaagttggatttccgatggtggttagtggacacaggaatataaggcagattggatttagtccatttcattgtaagtggattgggagcttgaggctgacagtaaagtccttatgatgtaatgcagtgaattggtgatggaaagggtctaggcaaggagaaccagttggtgcagtgtgtctctgatactgtgactacagttagtggcccctttagtggatgagctactcaggagagagtggttcccagctggcacatagggatttctgccatggcttaattcagtagtatcctgagactatcatattggtacagtgagttt

SEQ ID NO: 666 - DNA, 1177 bp, Homo sapiens
atgttttagaatgctcctctctaggtactttctttttaaccctgtccaatgtacttgacttttgttttctcactgagaaaatgaaagttcagaatgatttttttggggatagtaaggagactttgcataatgggaaataatggtcaggggaaaaccctttgttttataaggggccatttttgtatgctttttttactgaaacagagaaggtcaggttaattccatatccaaattaaatttatgattttcaaaagggaagccttgataatctaaccaaacgtgtccattatctaaagttatttggaaaattgtgtcactttaggtggaggaagctaaacaagaattacaggaagttgttgaattcttgaaaaatccacaaaaatttactattcttggaggtaaacttccaaaaggtaagatatcttttctttatcatgatttgatggaaaaaacaaaaacaaagaaacaaacaaaaaaaacctatattacttatttaattttaactgattaaagtttaagtcttaattgctattttacaaaatagatgttcattctgaacatacaattccatagccttttttttttggtaactgcaagtttttatatactttcaaatttaaagttacaagaatagtacatagaatgctcctcataccctttacctagactcacaaatttttaatatttagtttcctttttagacccaggcttgagtgcagtgatgcaatcatggctcgctgtagccacaacctcccgagttcaggcggccctcccaagtagctgagaccacaggtacacaccaccatgccggctaatttttgtattttttgtagagatgaggttactccatgttgcccaggctgctcttgaactcctgggctcaagcgatccactcactttggcctcctaaagtactaggactgcaggcatgagccagcgcactcaacctaactccattttaaaaatcattcactttgtctctttatgtatatataaatataaaaattatttgtaaataaataaatttttaactatttgagagtaaattgtaaacaatcaccccaagtgtgtatttcctaagaataaggatattcttctatgtaactccagaataatattaaaattaggacattactgggtgtggtggctcacgcctttaatcccagcagtttaggag

SEQ ID NO: 667 - DNA, 1175 bp, Homo sapiens
tccctttctcaagagagaaaacaaattggagaacaggaagtgtgaatggcttcataaaggtttttgtttctttattttttgtttgtgtttgtttttgagacacggtcttgcttcattgcctaagccagagtgcagtggtgcaatcatggctcattgtagccttaactttctgggctcaagtgatcctctcacctcagcctcctgagtagctaggatcacaggcatgtgccaccacgcccagctaatttttgtggagatggaatcttgccctgttgtccaggctggtcttgaactccagggatcaagtgatcctcctgccttgacctcttaaaatgctaggattacaggcatgagccaccatgcttggccttaagtttttgataatagggtacttacaggaaatcatagcagttgtgagaaagaatgccagattccaaaattggatgtgatgaaatatgattattaacaataacctaatatttgcatttcattgagctgtcatatttcataaatgtgatttcatgtaaagctttttctttctctcctagattccctaaggcgaacccgtctgattctcttcgttctgctgctattcggcatttatggacttctaaaaaacccatttttatctggtaaaagctttttttatttgtctaacttatttcttattcctttaaatacatgattccttttaatgcctaatctaacccttaaagaaagaacatattaatgtttacagtactagaattaggctttcattcctagtagtggttagtttcccagatttttagaaaatgatacctgtccaattataaaatttaaaaattatcctggtcaacagggtgaaaggaaaattaattaattaattttaaaattatgtagaagaattttataatggcaatacaagctgaaatagtcttctatttcaaagataaacaaattcagtttattcataaaatcacattaaatgtttcccttttttttagtttgcttatctgaaattaagcaatagtgtcagacttacgtggttccaattaccttttccactactgtgcagttttcaccctgtgttgcctattctcttaaatattaaggatatgtacagattcttaaaaaatactttgtgggccaaaactattggtgttcattctagaattactattttaaatttgttt

SEQ ID NO: 668 - DNA, 1141 bp, Homo sapiens
actttgggaggccgaggtgggcagatcaggaggtcaggagatcaagaccacatcctggctaacacagtgaaaccccgtctctactaaaaatacaaaaaattagccgggcatggtggcgggcgcctgtagtcccagctacttgggaggccgaggcaggagaatggcgtgaacctgggaggcagagcttgcggtgagccgaggtcgtgccactgcactccagcctgggcgacagagcgggactccgtctcaaaaaaacaataaataaataaaaataatgtaaccaacaagtgatagctagtaaatggaagaactgtgagatgtagttaaattagcgatgctttagatactttcataaaagcagtcatatcatggataaataaaagttgaaactcatattgtgatttccctaatatttgatagaattatttatatttcataggatttttgttttttggtttggaaattagaaaatttactttttgcaatttccctccaggtaacttagatatatttagtacattacgttcctcttgcttgtatcgacatcattcaagagctcttcaaagcatttgttcagatcttcagtactggccaggtatgaagcaacaaccataaattgtggaaaaaaaaatatttatttactatagtctgatttgtctttcttaatggtattaattctaaacattcatttgcaattcacaggacctaaagagtatttggaattaatgagtttgggtacttctgtataatttttaatctggaaaatatataggagctaaattttgagcgtgatagtgccacaataaatcaaactccagggaacttatctacgcttgtttcaagataaatgactaaccacatttgcttactcatcctcactttcaaaagcccattgaaattaattttatatatatatatatgagaaaaaaagagcaacaacagaagcgttccgttaacggacgagaaatttgagggctttcagtaagttgtaaaataagtgacatcaaattgacagtaaaatcaaatttgcatttattcatataatttttgaatacaaggcactagtgatagatgtcaggtgatagtgatcactgtaaatgaaaaagacatgttttctaccttcatgggactaatggtgtca

SEQ ID NO: 669 - DNA, 1186 bp, Homo sapiens
attatcttccatagagtaacataagctgcttttcaaaggtaccattgtgataatgagatcaaatttataagttattatttttaattttctaaattaaataaaagaaagaatgcaaaccaggagtgaatttcaaatgagatgtaatcgactttatatcttagtcacggagttgccatggcatgtagtagaaaaccacaggaagaatggtcatattcactttgtgggctgcccataatctttcttgggcattcacaactcttgagtttggtgttcaggcatcattattaaaaagtggagtcctatgtaccagactgagtttttacaaatgatttgcaggctagacataacccactgatggaaatggtgaagaatgagcttcatgtaggtttaaaagtgtattctgagcctgtagatgattaatcaggtttttattcaatcatataaatgtattcctttgtaatcatttttgtttaactgaggatatctagtgtctgcttcatagggtgctttgaaatataaaatgaaaacttatttatactgtttttacaacagtcaaaaaggaaacacacgaaaatcacttttctgcaactgatgaactatatagactggactcttaacctcttagtgcctcagtttttccttcggggtatactattttagatacacctacttcacaggagtactggagggatttgcaagctaacgggccaaatgcttccataggaataaggcatgcccagctaacagaaatttaagtccctcttccccacctctctcatctagaccaaaaagaagactacaatttagatccttggagacttttcctgtatgccttccaaaacttcctgctcacttagatgtaccttgtgctttgaagatttctttgatgcagtctttgtaacaaataatttttttttttaaatggagtttctctcttgttgcccaggctggagggcaatggcgtgatcttggctcactgcaacttccacctcctgggttcaagtgattctcctgcctcactcccaagtagctgggattacaggcatgcaccaccatgcctggctaattttgtatttttagtagagacggggtttctccatgttggtaaggctgatctcaaactcccaacctcaggtgatctgcctgcctcggcctcccaaagtgctgggattagaggcgtgagcca

SEQ ID NO: 670 - DNA, 1203 bp, Homo sapiens
tttcctagtaaccctcctaacccatccccctaactgacaaaaacgactcttccatccgggagactttgggatttccgggctacaggactccaccccccacaacctagtcagtcccaccaccaacgttcggcctggggcacttcccaaatgcctaaggacgcagggggttgcgctagtaagttgaaggcccagggcaccccctttctagggttgacgacccgtaaagactcctcattggccccgccctctacgcccagtatcctatttttatttttttttttaattattggtttcttaaatagagccagggtatcgccatgttgccaggctcgtcttgaactcctggcctcaagcaatcctccccactcgacctctcaaagtatcgagattacaggcgtgagccactgtgcccggccgtccccatgcccagtctcctattaaatcccgctggaggtgcctggctccctggggctgggtggaaagggtagtgtaggggaagttgccctccgtcccagcccagtttaggagccggcgacctcctctctccttcggctgctcctcggacgttcttggctcagggcagcgaaaactgtcgaagacctgcgggccagggactgctgagcacctccatccaaggtccccaatgcttttctccatctaccctttagagtgggtgtcacgattgccactggaaaggctaagtgacttgccctaggtcacataatttaaatggcagaactggagtttctcacagaacctgtcccgacttaaagccctttgcttaggccccatttaacttcctcaaaccttaacttaggagagtgcaggcgctggggaccgcagagtcatttttgttgcccagcggtgccgtcgcgtgcagctttgggcccaggtgcagaacccaaccgcgcatccccagcgcgcacttcgtccacccggctgccagagcggacacatcggtccggcctcggtttcccccttctgaacaaaagcgcgcacagtgtgctccccgcaccaagccgggactgtggccccctttccccgcttcccggaccctcctctggggacagacggaccgcgcgcgtccttgccgcggcggcgggtcgggtgggtggggtttgctgcactgctgctgcggcggcggcggcgccagtgggtcctccggtgactctggggcggggctgtggggagggcacggactga

SEQ ID NO: 671 - DNA, 1170 bp, Homo sapiens
atcttgacaatttacttaacaagtaaccagtagttcatcaaaaccaacttgtacagactaataaatctttttcacagtattcagttttctcacctcttgctattgtatattgtagatttttttcattcatgtgttatttaatttacactgatctctgctattttaaccccccaaataagttatttgtcctttaaggttggttactataatacccctcagtaagattccagtattaatttctgggcagtttgttctctgtatacaattgcaaatgataagcatttttgtgagtgaccacctttgcaatatgtttgttaatttacttcatgttgggttctttctgaaatgtacatctttacatataaaaacctcacattctacttgatttacacttcctagtctacattacatgtggttgaaggttttatacattctatatgcttttactaaatatacaagatttactactagaaatttggagaaagaacactaacacatgtacttgtgatttgttcatgttatattaaaacttgagatttgtgtatttatgtagagtctgtattgacaagactgttgttttttgctccttgagctatataataatctgtgtattggattgttgtcttgatttggtctaaatttgaatatatatgagttacttgaatataacaaaaatgaattttgtttgatagatttatattgtaacctttttctagttcttgaataaatatagcctgctttccctagatgcatttgtgtaggaagtatatacatttccctattactctcatcagctgaagaatatgtactattgtgttactcaaattatgtggctttcattttgttgttttgttgcaagcttagtgttttgtagtggaggttttgtaaatgaaacagttgtaatatctaaggtcaggcacctagtaacagggttttgttaattcttttcagaatcattgaagcagtcttaaagggtcttttgcagatggtacaaattagaacaattagaatatagtattttgagttctagtagtactgagattgacccaaacaaataaaaaactattcaatttctgagtaatagttaatatttattgaaagcttccttggtgccagatgcctttctaagtgctgaattatctcattaaacctcacagcaaccttaagaga

SEQ ID NO: 672 - DNA, 1111 bp, Homo sapiens
atgttgtgattttattcctaaactgactataatgatgtaaagtgacttttcatcactttgtatcagggaaaaaaaagaatgcagctattacatgggcatactttagctcttgagcttgtgcattttgacagtaaaactatgacttttacaagtaaaccgattgaaagcatataagctattataatcgagcagtggctcagttgtaaaaagtcttcttggggttgaattcacatcttgtggaaaagccaggggccacatagcagatcagtcttggtttctcttcagtcctatcttattttttatctgaaacaatataaaccagcttgccttttatcttatttactgttattttcactgaattgtttttaatggttaaacccatccccaataattaattagcttaagatattggagcgaatgctgtaggatctgaaattgtttttcagaaacagttaatgttttgagaattgatgtcattttagacttaaatgcttttatgtttcctgtctacttgtgtgtgtgtgtgtgtgtgtgtgtgtgtgtgtgtttctttttttttttttttttcctgagatggagtctcgctctgttgcctaggctggagtgcagtggcacgatctcggctcactgcaacctttgcctcctgagttcaaatgattctcctgccgctcagcctcccaaggagctgggattccaggcatgcgccacgacgcccaactaatatttgtatttttagtagagacagggtttcgctggtctcaaactcctgacctcaggtgatccacttgccttggcctcccaaagtgctgggattttaggcgtgagccaccaccacgcccagcccttgtatgtgtattgtaataatgtttactttttaaaaatcaatacattatttgttacttttcagttttttttcctcttagtatttattcttaggtatatgtgtggtttttgaaaagccatcttctgactttaaaaagcactaattttgtggatgctgcagtgatgtatcgttatggtttttcttctgcctaggctcagaatttatcagaatcaggtggttaaaatcaggcctgttggtcagagtggtagtttatattttggtttgtta

SEQ ID NO: 673 - DNA, 1163 bp, Homo sapiens
cattttgggtgtaaccaccttggtgtacctaccctgatttgtattaagaccagtgtcttattgaggtaggttgttactgtggccataaacatttttcaccttatttcatgagatataaattaaatcctgtagaattatattgtccttttatcctaatggaagcttatttgaatgtgtggttaataaataattatctttgagatagcattggtggtagacagattggtacttttcaaatcagatatgggtatgatttaccaggttttatggcttcaggttatctaacctttcttgttcagctttcttacctatgaaatagggtgagaaatgtctaaatcattattctagtcatgtgaatgtttactgagcatcttctgtgtgctccagtgtgtaagggttaaatgagattacttacgttaggtgcctggcacatgagaggtgttcctttgatgtttgttccaattttctctattcaggtaatttttcaggctgattatctttttatttagaatctacatcaggagacaaacccgtatcacattcttgcacaactccttccacgtcttctgcctctggactgaaccccacatctgcacctccaacatctgcttcagcggtccctgtttctcctgttccacagtcgccaatacctcccttacttcaggacccaaatcttcttagacaattgcttcctgctttgcaagccacgctgcagcttaataattctaatgtggacatatctaaaataaatgaaggtaaatcttcataacagttttttaaaaatttatttgcattgtgcaaagttatgtaagtagtaaaatccccagtttaggaatggtctttgttttcttttgaaatttatagttgaacacttttttttgttttgttttttgtttttggagtttggaaatttatatccactgtagtttaagaccattggtagtataattgagttagtggtgcttggatcttgtgtatatttttcaatacttgttatgtgtctggtagttactggaggtaagccattctatatacataatgtgtatggtgaaattttacattaaaacaatcgagcgtttgttgaaatcggtattaaaacttctggtatgtttctaaaaaacctgtataaataattactcagaatatttaaaatatgctaatta

SEQ ID NO: 674 - DNA, 1164 bp, Homo sapiens
ggcccgagaaagtgcctggattttacaacaggaagatacagatcgaccttccatatcaagtaatcggccctgggggctggtatccctattgctaccatctgctccaaacagaaagtcctttaccaagaagaaaagcaataagtttgcaattgaaacagtcaaaaacttgctagaatctttaaaaggtaacagaacagaaaatttcacaaaaaccagtgggaagagaacaattagtactcagacatgatggctgctacattgtgtaaagaactgggcttagcctatcaaatggtctgtggacttacttggaaaaactgatttgaaactttcacagatctcagctttcatctgatgtcacttttcatgatcttctcattggcccccttaacctggtctgaagttctgggatgttttcagtttgatcagtctgatactcagtggcactttattaaaacatcagctgtggagtgtggcggtgcacacctgtagtcccagctgctcaggaggctgaggcaggaggatctcttgagcccaggattttgaatccatcgtggacaacatagcaagattccatctctaaaaaaaatgaaaataaacataagccacaaggaatgggtgaaagattattgtaatgtgctttaactaaataggtaaatatactaaacaaatgctaaaactcagttttaggatgaaaccattgttgatatccacatcagtccctgtttagaaaacatttaaaatgacttttagttatgtacagtacgttggcaatgaatacattaagcttcaaaatttggtagtgctctcgaatatgtatatttgtatttttcaagcgaagttctcttattcacatataaattaaagtgggttggtactgatatcaaaaaatgtttatgtttttagaacagacatttcagtcactgcattcttaggtattccaaaccaaatatgatgacatcaatagattgcattttaaaaatattgtttgatttttctattttcaaaaataaaattctgtttctaactaaaatgtgatattcccagtattccttcacatctcttttgagaactcccctcttcctgcaggaaagagacatatttgtctctcagtatatgcagaaaattggttccaggaccatccacgtacacccagatctgcacaca

SEQ ID NO: 675 - DNA, 1180 bp, Homo sapiens
aacccgtaatgccgtgttctaggaggtgatcatttaaacccgtaatgccgtgttctaggaggtactaaaatattttggaattgttatagaaatgaaagtaaatgcatattagttattagtgagcctttctaagaaggtgaaggaggtttgagggagtaatgaaaggaaggaaagttcttctcaactcttgtgtctacctggttagtgtatatttactgttccagttatcggcttttgttttggtcataagtgactgaaaaatgtagattacaattagaatgaaagtgtttttaatgtggcagtgcatatgatagtagacacatgtttgctttttggggtttgagatttgaagtaatgttctttaaatggcctatactatatgatgcttgtgagtaaatacgaaatccagattgcattaacttttttcttcattctctttctccatttaaataaaacagctatattcatccaacaagccataaagccataatgtggtataacatcctttttgagaggtgaatattattgaatgaaaatggctgacagaagtgggaagattattccaggacaagtgtatattgaggtggaatatgattatgaatatgaagcaaaggacagaaagattgtgataaaacaaggggagaggtacatcttggtgaaaaagaccaatgatgactggtggcaagtcaagccagatgaaaactccaaagcgttttatgtgccagcccagtatgtgaaggaggtcacgcgcaaagctctcatgccacctgttaagcaggtagctggtctgccaaataactccacgaaaataatgcagagtttgcatcttcagagatcaacagaaaatgtgaacaaattgcctgagctttcaagtttcggaaagccatcgtcatctgttcaaggaacaggtcttattcgtgatgccaatcagaattttggacccagttataatcaaggtcagactgtcaacctaagcctggacctgacccataataacggaaagtttaacaatgactcacattctcctaaagtttccagccagaataggacacgctcatttggtcattttcccggtccagagttcttggatgtagagaaaactagcttctcccaggaacaatcttgtgattccgcaggagaaggctctgaaagaatacatcaagattctgaatctggtgat

SEQ ID NO: 676 - DNA, 1962 bp, Homo sapiens
atataactagtagttgctggttagtgttccttggtttaagaaggtcactgaccactgtctgctggttaaaagattagccgtctttttcttttttaaacaaatacaattcataaatcagcttacccatagctttatttgggagaataaaaacaaagggagggctgacctccctttaaacattactgcttctaaacagttctacttaggtagtatataaaaggaaaccaaatcatttaatattgccatccttctaattttggggaaagtagccacagatgttggctaaaatgtttataataaactgttggcatattttattttgttttattcttcatgattatctcaaacaccaattttgtaaaactaaacatatttactctatgctttctcccatttttaggtgttaaaaagtaatcgaagtacgaagaggacatggtatcaagcagtcattcaatgactataacctctactcccttgggattgtagaattataacttttaaaaaaaatgtataaattatacctggcctgtacagctgtttcctacctactcttcttgtaaactctgctgcttcccaacacaactagagtgcaattttggcatcttaggagggaaaaaggacagtttacaactgtggccctatttattacacagtttgtctatcgtgtcttaaatttagtctttactgtgccaagctaactgtaccttataggactgtactttttgtattttttgtgtatgtttattttttaatctcagtttaaattacctagctgctactgcttcttgtttttcttttcctattaaaacgtcttcctttttttttcttaagagaaaatggaacatttaggttaaatgtctttaaattttaccacttaacaacactacatgcccataaaatatatccagtcagtactgtattttaaaatcccttgaaatgatgatatcagggttaaaattacttgtattgtttctgaagtttgctcctgaaaactactgtttgagcactgaaacgttacaaatgcctaataggcatttgagactgagcaaggctacttgttatctcatgaaatgcctgttgccgagttattttgaatagaaatattttaaagtatcaaaagcagatcttagtttaagggagtttggaaaaggaattatatttctctttttcctgattctgtactcaacaagtcttgatggaattaaaatactctgctttattctggtgagcctgctagctaatataagtattggacaggtaataatttgtcatctttaatattagtaaaatgaattaagatattataggattaaacataattttatacggttagtactttattggccgacctaaatttatagcgtgtggaaattgagaaaaatgaagaaacaggacagatatatgatgaattaaaaatatatataggtcaattttggtctgaaatccctgaggtgtttttaacctgctacactaatttgtacactaatttatttctttagtctagaaatagtaaattgtttgcaagtcactaataatcattagataaattattttcttggccatagccgataattttgtaatcagtactaagtgtatacgtatttttgccactttttcctcagatgattaaagtaagtcaacagcttattttaggaaactgtaaaagtaatagggaaagagatttcactatttgcttcatcagtggtaggggggcggtgactgcaactgtgttagcagaaattcacagagaatggggatttaaggttagcagagaaacttggaaagttctgtgttaggatcttgctggcagaattaactttttgcaaaagttttatacacagatatttgtattaaatttggagccatagtcagaagactcagatcataattggcttatttttctatttccgtaactattgtaatttccacttttgtaataattttgatttaaaatataaattt

SEQ ID NO: 677 - DNA, 1188 bp, Homo sapiens
atcaggaaaagagcagaaaactacatgaacttacgtgagtaattgtttttaattaaagtttaaaaataaaagctaaattagaggattataggcattacctttggatatagccagtggatacatattttactttgtatgggctaaaggattttttcttaaatccactgagttggtttgatttatatctaaatacttggaatatatacttgcatttgagtgaaagcaaggtcttatatttcattgtggttaagattaaggtttctctttattaatctgcttgctgtttctttatctccatattacttcaggatccagcataaaaatgaacctaaaacaatatattaagtaacttcgaagattttaagatctaacacaaaaactgagtttttgttaaattttctcttgcataaaagagcattgtggtgtttagccttgccattttgaacagaggttttcatggtttaccttttctcattttctcaaaactcagttttctagaatcttagcaggtagaaagtgcatgattataatttttcacataccttgagtttgtgagacaatttgcaaatcaactgatattgttaggatagttagaacatcaggaccagttcagagtggattatatgaagattctgctaacttgcagctgtaattttgtttagaatacttgtaatgtaaaatattttagtctttgacagtttataatctataattaatcagtatcattttggataaatagcagtataatacatgtggcatattttaaaatataaattatagaactattccttattctttgaattctgccacattttatttcatctcttccattgctatatatggaatgtataacaatagactgttgtttagaaggcatatgaaaattttttgaaattgcaaagctgcagtggctcacacccataatctcagcactttgggaggccagggcaggagaatcagttgagcccagtgtttgagaatcagcctaggcaatatagtgagaccccgtctctacaaaaatttttttagacagggctgattgtacatgcctgtagtcccagctatttgggagacgaggtgaggaggatcacttgagcccaggaggttgaggttgcagtgagcagtgtttgggacagaaactctgtgtcaaaaaaaaaaaaattttttttttgaaagacagcacaggta

SEQ ID NO: 678 - DNA, 1257 bp, Homo sapiens
tctgcatgatctggcgcttgactccttgtacataagaatttgtcactcaccacctcactcactgtgcttcagcctcactggccttctctgtgtggtctcctcgtctcaggctcctggtgtacacagcaatcccccatcatccatggttttgctttctgcaggttcagtcacctacagtccaactgcagtctgaaaatattaagtggaaaattctagaaatgatttctaagttaaaatgagtttttaaaaacgttttaaattagttttcagtagtagtctaacactacatcacagtgcctaccttattcacctcacttcatcacatcatggaggcattttctcacatcacaataagggtgaatgcggtatattttgagaaagagactagagtcacataacctgtcacagtatattgttatatttgttctattattgttacttattgtgcctaattcgtaaattaagctttatcataggtatgtacgtataggaaaaatatagcatacacagggttcaatagtggtttcagccatccactgagattgtcttgaaatgtatcccctgtggataagggagaactgctgtacttggggagggagtaaatatgaatagtagaaggtaatgattatttcagctgttgaggaaggaaggtttttgttgttttttttttaagccttagaagaacctaaccatatttgttttacattatatacatccctgacctgtagtgccctcttctttatccaactttttattataaaatttttcaaatgtatagaaaagttgaaagagtaatacagtggccatctatataccttcaacccagattctgcaatattttgtagtattttctcttgttcttttttgttttttttttttttgagacggagtctcgctctgtcgcccaggctggagtgcagcggtgcaatctcggctcactgcaagttccgcctcctgggttcatgccattctcctgcctcagcctccctagtagctgggactacaggcgcccaccaccacacccggctaatttttttttgtatttttagtagagacagggtttcaccgtgttagccaggatggtctcgatctcctgacctcgtgatccgcccgccttggcctcccaaagtgctgggattacaggcgtgagccaccgtgcccagctggtttttttcctgttctttaaatcttgttttctgaaccatttgaaagtatgttgcatatatcatgacacttcaccccaaatgccatttataa

SEQ ID NO: 679 - DNA, 1150 bp, Homo sapiens
gtgaaaggctgttcctgtctgtggtatttaaaatttaaagaacttctgttattatacaattgggaatcctcagggagtaaaatgttaatgaaatccataacatgcacagattttatgatagcagttttaagaaattcctttggtggagtttgttgatttctgtcccagcggtaataattgcaccttttacagagtgcattaatgttcacatttaggagcaatggctacatttatgtcgcgtgtgaggtaacacaccaactcctaagctttaaatactttcatatcgtaatttgaaagcaccagagcaaaaaaatatgtgttcttcagaactggcagaacccacactttaaaactcctctagcacatccacagccaccttctccaaaggtgagagagagctgaaccctgtaaattccaaagccctggtgtggatgaggattttgtacccttgtatagttctcattttatgcaccatttgaaagcaccacatcaaaatggcaattttgatccacgtcagaatagcaattttggatgctgatctgaaacataggcagacgcaagcatgcatgcacacacacacacacacacacacacacacacaaacctctaccctccttctccactctccttctccttccctccctccctcccttagccatctaatctcattcaattctggattcaaataaagagaggaaagtagattaaattttaaaatgctctataaatcccaatagtaataaaatacattatgcttttatatttccaactattgaacagagtaagtgtttgagactaattgcacatgttaggattgaggatgatgacatatgcacttgtgcatgtgacttgggcacttttttcccagctctgtttaccccaaggggtgaaaaatgcacttatgtatggcattattctaattgccttctttcaggagaatgagatgtctcaattctaccaaagttttattcttcctacaattccaatgctttaaacttctaactacatattttggatctagaaaaataaataaataagctcctttattcttttagctagcctgagaaggctatcagtgaaattctccaggggatgggtgatcggaccagacaggtgcttgggttgtttcaagcatttaaaattctgtgat

SEQ ID NO: 680 - DNA, 1361 bp, Homo sapiens
gatcacgccactgcactccagcctaggtgacagagtgagactctgtctcaaaaacaaataggaaagataatctctttatttaaaccacaaatgccactattttcaggaaggttatgccaaataattgtgattacctttggcagaagaaccttgcttttttttttttcttttttaatatttctagaacctggttgtaggtattggtctacaggaccataggtactgcttagtgaagcgtaatcagcacaggagcaaatgaacccatgactatccatattagatatggtgttactatattaacaaagaaacggtaatgatacatcctggcctggatggtggttaagaagtatttctgacactttctcatgaaatagatatatgattatgatataatgttaagtatataaaaagcaacatataaaattgtgtgctaaaatagggactggacctatgaaatgataagattttgtgtttgaggctggacatgatggctcattcatgtaatcccagtacttttggaggctgaagtggaaggatcacttgaagccaggagttcaagtccagtcttggcaacatggcaaaaccttgtctctgcaaaaaatacaaaagttagccgagtgtgctggcatacacctatggtcccagccacttgggaggctgaggtgggaggatcacttgaatctgggagtgtggggctgcagtgagccatgatcatgccactgtactccagcttggcatggcagagtgagaacctgtcttaaacaaaaacaaaataaggccgggcatggtggctcatgcctgtaatcccagacctttgggaggccaaggtgggcagatcacctgaggtcaggagtgcgagaccagcgtggccaacatggtgaaaccctatgtatactaaaaatacaaacattagccaggtgtggtgatgggtacctgtagtcccacctactctggaggctgaggcataggccaggcgcggtggctcacaccttaatcctagcactttgggaggctgaggcgggcggatcatgaagtcaagagatcgagtccatcctggccaacatggtgaagccccatctctactaaaaatacaaaaattagctgggcgtggtgatgtgcgcctgtaatcccagccactcagaaggctgaggcaggagaattgcttgaacccaggaggtggaggttgcagtgagctgagatcgcgccactgcactctagcccaggtgacagagcaagactctgtctcaaaaaaaaaaaaaaaaaaattactactattcttacttgggcttcataatctaacttaaagtagatactctaaatcttttcccctatggaaaacaattatggctaaaacattttaa

SEQ ID NO: 681 - DNA, 8695 bp, Homo sapiens
aagcccctcttcagggactgcggttggctgtagaaaatgcagtccttggcttcattgtccacacttcctgcccagagcagtagtctctgtctaggggacacccacgtctggctggtgggcagggaaggggcttcaccaattcctggtgtaaatccgtttcccactttctcttctttatgtgcaggcttcttcctctgcacagagaaagcctgtgacatgccctttagtggggagtatcaaagggttgtgagtgctcagtatgtgagagaaagactagtcttaagaggacgtgtgtgtcattcttagaacaacaaaaagaagacatggaaagtatttgactaattgatttttgccatttggagcaaaaatctaatttttgtcaaagtgatgctgggaccatgtaattttgtgaaagtgaagctggaacacataattcctcacacactcagccttgtgcgggcggctgtgattccttcgccaccatgaagtgaagtgcatccaaagtgtgagccagtgtactgccttttttttttttttttttttttttttttttttttttttgagacagagtttcgttcttgttgcccagtctggagtgcaatggcacaatctcggctcaccacaacctctgcctcctgggttcaagcgattttcctgcctcagcctcccgagtagctgggattacaggcatatgccaccatgccaggctaattttgtatttttagtagggacgagatttctccatgttggtcaggctggtcttgaactcctgacctcaggtgatccggccacctcggcctcccaaagtgctgggattacaggcgtgagccgctgtgcccggctggactgtgtttctttttgcactttttggtttttcattttagtgttcttttgtgctttctgacctaagtgctggcaatgtgtaccttcatgtgtgaattgattatgaagacaatttctaagagcaatcctcaagactcagtttttgtctggctttctgtaatcattgaagcaacttaaaaaaaaatgtccacttcatctttagagttctccccctgcccaggcacacaggtctcactgcacaccctattcgtcaccccacaagatgcatgtgctgtctttggcttagcagttcacatgcaaatacaaatacagtcacgtgcagcataaaagcatttcagtcagtgatggaccacataaaccacaatggtcccgtcagattataatggaactgagaagttcctattgtctagtgacgtcgtagtgtcgacctgcagtgcagtccttaggtgtctttggtgatgctgctgtgaagaaacctactgtgctgtggttgtataaacgtctagcacatacagttgtgcacggtgcatggtgcttgatcatgacaatctttgactctgttactggcttatgtatttactgtactttttattgttattttagagagtcatccttctttaaaaaaaagcccgttgtaaaacagcttcaggcagggccttcaggaggtttccagaagatggcagctccatgtgtgctgtcacctctgaagcccttccagtgggacagaggtgctggtggaagacagtgatgttgatgatcctgaccctgtgtaggtctaggctaatgtgtgtgtgtgtgtgtcttagtttttcccaacaatgtttacaaagtaaaaaaccataatttaaaaatggaaaaaagtttataggataaggatagaaaggaaatatttttgtacagttgtccaatgtgtgtgtgtttaagccaagtgttattatgagtcaaaaagttgaaaaaattaaaagtatataaagtaaaaaagttacagtaatctaagtttaatttattgtggaagaaagaatctttagaaaatgtagtgtagcctaagcatgcagtgtttctaaagtttacagtggtgtacactcatgcctttggcctcgacactcactcaccactcactcactcacccagggcaacttccagtcccgcaagctccattcatggtgagtgccctgcatgggcataccatcattcaccctttataccatatgtttgactgtaccttgtctatgtttggatgcacaaatacttaccattgtgttccagttgcctacagtattcaagacaataacacgttgtacaggtttgtagcctaggagcaagaggctatgccatgtagcctaggtgtgtaggaggctctaccctctaggtctgtgtaagtgcactctagcctgatggcacaactatgaaatccctgaatcacacatttctgttttaccttaattaattatggagataaggccttgctgtgtttcccaggccgatctcaaactcctgagctcaaataatcctccttccttggctcccgaagtgctgagattacaggtgtgagtcctgtgcccaagccatgcgtctctcagaatgagtgtgcccctgttaagcgatgcatgtctctgtatgctcatgtcatgcctggcctttactggctacttgtacagtcatctgtcagctgtgacttttggggctataaatccatcaaagttcaggaatctcccaaacttggttcatttaatgcttagcagacgtagctccacagccatatttaaaactgatgatgatggtgtcccttgtttggaggattcatttgtaagtgaccataatgagtttatcctggccattccccagagaacagcaggactcctggttcatctaggatgtgtgaagtgactggccctctgagattgctgggcttccttaaaaatgtcacatacaaggacatagattttcacattgtgtagtattgtttatatcaggggtccccaacccgcagaccactgtgtggtactggtccatggcccattaggagccaggctgcacagcaggaggtgagcagcaggggagggagcattactgactgagctccgccgcctgtcaggtcagcatcggtgttagcggaactgtgtgtgagggatctaggttgcacgccccttttgagaatctaactaatgcctgatgatctgaggcggaggccagatggtttcatcctgaaaccatcctcccaagcccccatttgtggaaaaattgtcttacatgaaactggtccttgttgccaaaaaaaagttgggggccactggtttagatcttgcagtattgtgaagtaatttttggtcttctgagagactccaagcagcacaccagcatgaaaagatgagccattcacggcagctcttggcattggttttaagatgaaatacatcaatattaaaaataactataaaacattcatgaaagtttttggagtttctttgaagaatgtctttgaagctgacttaacattattgcatttattacagttgctctgcagttcaactgggctttataggtttgcatctggggttcacatatgcattttaagacgaggtttgagtctgtttgtataaatcaaatgcagtcctcagactcatgtgcaggccgcatggcgatcccgggatgaagtagatatttctatttataaacagattcctgagtacttcagatattatttgtatgttggactcctgtctagaattggcacatatctacatgtacagagaagaataatgaaatgtcaggggtctcactgcaccctcctctttgatcccattctctgaggttttaatttgggcccaggaagcagcacttaaatatccctactccagctgctagcttcaaacaatacaaagctaggcttccaaatatatttatcatttcttggttgaatatttgcaaaaactgacctaccctacgatttctctcaaataggccttagcaactacaaatatggatgagaagatagaaagggaagctttatgtttgcttgcattttagctaaaagataattagaagtgcaatttaagttatgataatggaaaaaaagagctacacgttaagtgtggtgcattgactgcatcgagaaaaggtgcagtctaaagcccagcaaagcttaaaagagaaaaactagaaaaaaagaactttttggaatataaactgtgacagattttttgtattttctgtgggcttgaaaagtccttaacgttttcgttgttactgccctggtactatttatgtgttagaatacagaacaactttaaatttgtggagtcttatcagtaggactgctggctttgcgaaacccgtgcaaaacggacactttgaagtgaccttccctgtttaactcatccgctcctcccttcagtgagtacatactactgtgtgcggtgtgctcttccagatgctgggatgcagtagtgaatggagacaaagcccctgtcctcatgggcttagactccagcttatgacttgttgtttataataaataatgaacattgtgaggttattcacaggaagggatgaataatggatggatcttcaaaacgtgattctggttaactacagacatcctgaagttccaggtataaaaagccttctttaaagcatactatagcagtcagaatgaatgagtagttaataaagctctttgctgaaataaaagcaaatatgttcacacttccaaaaaataaatacccaagtgggagttgtatggttctgatgtcaaacatgttatgagaccatcagaggtatatggaaatttggggaggaagacagtaattatataaaagtgcatgcaagcctgggcaatatagggagaccctgtcagcctgcaaaaaaataatgataataaaaaatcgtagctgaaggtggtggcatatacctgtgggtcccagctgcttgggaggctaaggtagaatcactaaggagaatcacttggggcagggaagtggtggctgcagtgagctatgattgtgctattgcactccagcctgggcgacagaacgagaccttgtctcacgcacacgaaaagcaattactgaattagagatgtgatgtgggaaacgctcccatctaagtaatgaccaagaatattccgtgatagagatgaagtcttagcaggacttccctctcaggttattagtggtgatgatcctgctttgttttattaccttattactattatgctctctgaggtatgaagtgatattaatctgtttgcagtgagaaataacactttatagcattgctatcatttaaacatattaaaatatgttgtaatgcagaaaaacaccctggggagagaggtgaaaacttaggagtttaatttgaaatgcagttgggaaattatttggacagcagagaaagctttagggcaaaatttcagtaataaagtatattattttctaaattattcatcagggagttgagtttgtttttcatgtacctggacttaatcacgattacaaaaaaatgcttagctaattgtagtcattcatctatactaatccaaaaacaaaaatgaggagttattgatggtttttatttaggtaaaacaatttatttgactgtgagtggttacatatgataaccatatattcagttatttctaacttgcctgttttgtgaagaatgctattttgtgactgttcctgcgtctcgctatgttttgggggttctggcctagttcctacaacatatactcttatcccggttctgtgttgtcctggtgattctcccaagagctaatcagttaaagagattttcttttccattttggattttagcttggagttttactcttagtagtaaaatggtatctaaaaataaaacggggaagaattagaacatgtcagatatagtaacacgttttaataatttgctctaaaaatctgctcatcagctgataacctttcgtttgtccacatgtctgctttttaaaacgcttggtttcttaatatcccagtgagaacaggcacctgcagagatacttagttgctcccagccgcagctgcagagcgacttctagattctgcgtatcttggtttatttcatgctgttttctttaagccatactgtctgctggtcagatggtaagagatacctgttttggaaaatttggtaaataatccagggttacaagtaaatttagcataatgtagaggctttattttgctcatttaaaatatgtagtcttggccaggcacagtggatcacacctgtaatcccagcactttgggaggctgaggcaggtggatcacttgacgtcaggagttcgagaccagcctggtcaacacgatgaaaccccgtctctactaataatacaaaaattagttgggcgtggtggtatgcgcctgtaattccagctactggggaggctgaggcatgagaatctcttgaacctgggaggtagaggttacagtgagccgagatcatatcactgcactccagtctgggtgacagagtgaaactgtgtctccaaaaaataaaataaaataaatcaaaataaaataaaaataaaataaaataaaataaaataaaaatagtgttggctgggtgtgatggctcatgcctgtaattccagcactttggaaggccaaggcgagaggatcatttgaggccaggagtttgagaccagcctgggcaacatagtgagaccccatcactacaaaatataaaaaattagctgggtgtggtggcactcgcctgtagtcccagctattcaggaggctgatgcagaaggattgcttgagcccaggagttcaaggctgaagtgggccaggatctcatcattgcactccagcctgggcgacagagtaagaccctatttctaaaataaataaataaaacatgtagttttacctctattcagcaattagattccttacaactcataaactgtatgagaaattgaattccactgtttttgtcactgagaatgctcttgtcctagcagacctgtgtgtgctaaattaaggtctgatctccatcagtcactaagatgtggccaaacataaaggcttttcatagttgttataccccgtaagtgatgaccctgagaaatgagagtgagactgtcaaggtacatcttttgtccttattccctagattagttcttgaaataagccaccagttaagaattttgggatttcctgtgcactggcagtggttgaagggtttaacatgcctgaaaccttgagcacaaatccctcctgcagctgccctgggccatgtcagccggcaccagccatgctgtggcaccagagaataagcctgcacttaatgtcatagcatttcagagaactgtcggagcgtggggctggcccttgggatttagctgctgcttgtatgaagcagttttaaaatattaagcttagaaaagtcccactgagctgggtaaagactttgtgtcctttgggtccctctctatgttttatcagttttcagctgcagggcagatgtctcccctgggctgcagtcttaggcactaagatgtgttgctggcagatttgactctagaagccccaaagggcaggcagggataaatagttttgaattttgtttctagtctcttctgtgttgtattggtttcagagttcagtatccagtcacagtggacagttttgtagtattttgcagcctaaaaaatttatgcaagcagtaaattaaaaatctgaaaaacacacgcatacacatgtgtgcacacgaaggcacatacacatccctccatggagtcttccactcttgtgtgttttgtaattctctttatttttatttgtttacttggagacagggtctcgctctgttgcccagggtagagtgcagtggtgcaatcatagctcagtgcagcctccacctgctgggctcaagcaagcctcccacctcagcctcccaagtagctgggactacaggtgcgcaccaccatgcccagttaattttctaattttttggtagagatggagtctcactatgttgcccaggccaacctttaactcctggtctcaggtgatcctccccagttgtacctctcagactgattataggtgtgagccgccacacctgacctataattttattttagatttacatgagaagtgatgctgttttaaagtgtaatgctctgaattaaaggaattctctatggtaatatatttatacataacaaagcactaacaattacagaaggccttgatgcctgttctattattcgttttatgtttctgtgagtaattgatgctttgatgtattttggccatagaggcactattgtaatgcatgtagactgactttcactggacagaggtttgctgagctggttctgttcatgtgctatggctggagacatgaggcagaggacacagaggccctgccctgatggcactcacactgtaaacttgaggcaatgaggacgcacagttaggagctgaagttgtaccacagaacacataaagggagagttagacacaagacgagggggctccaggtgagccagtgagagccgtggggccttctgtccctccagccagcagacgctgagtgactgcaggacccagccgattccaggttcccgagcaagctgccttctgtgcttgtgatttttatgttgtggggggattgatggtgccgcctcaggtggagatcagtgtgacggagtccacagggcaggatagaacactggatgtgtgcagtagggtcttaggccaagtccactttctctgatgggggagcatttcagcaaaggcccttctgggcatatgaaggtttcccagtcagttatcagggcaatgggaagccacagagctgggggtctgctggagagtgatca

SEQ ID NO: 682 - DNA, 1192 bp, Homo sapiens
tattgttagtgaccttttcatatacctatggcttgcctcccaaaattgattttttttttttttttttttgagatggagtctctgttacccaggctggagtgcagtggcaccatcttggctcactgcagcctcctcctcccaggctcaagcaattcacctgcctcagcctcccaagtagctgggattacaggcatgcaccaccatgcccaactaattttttgtattttagtagagacagggctttaccatgttgcccagggtggtctcgaactcctgagctcagacagtccacccatctcggcctcccagagtgctgggattacaggcgtgagccaccacgcttggccccgaaattaatatttaagtgttgtagaacaggggttttattatagatttggctgtaccgctgttattgcataacacaattattttcagactgggtgtttggttcttaattcactggtggtgtgcaccatgccatcctgccatccccagctgctgtcagagtacatggtaaatatagaaatgtgtccagtcagtagtagccacgtggacgctcttctccatatttgacttttcttgctcttagaaggcttttccagtaatctgcgtgggaccgtgactttgcttgcttatggtgtttccagcacctccaccagactctcagggtttggaaagctgttctgggtgaatggtgtctacagaactttgaactctgcgattgcaggggaacatgcttataaatgcgtgtttaatacagaatgttgtagaggagattaggtacttttaattttgtattatgggttgttttcaagatctaattatgtgttggtaggaatggctgttttatttctacttgtgggaaaaaggctgcctggagtttgtttaatttttctgatatagcatcatagactggtagagcaatataggaaccccagagaccatccaactccctcatttctatacaaaaggacttgggtgcccacaaagaggaaatgacttgtgcagtttcaggccacttaaccacagagtcattttattgtcctttttgtggctactgatagataaggcttgcactcactagatgcccttgtcatcaaggcccaggtcaccagctgcacacaatttatctgtatgtctttaaagcaggggggtccaatcttttggtatccccgggccacactggaagaag

SEQ ID NO: 683 - DNA, 1190 bp, Homo sapiens
aatgggtgattcaggtaaatgaagttagttcagtgattgtgatccctgtgtgaccactttagtttttatttgtgtttaaaattaaaaactaaacttgaggcataatatcatttggtacctgcaaattttaattaacacatggaatgctttgtccacagttttccaaagtggttatgccactgtatactcccagaagcaaaggtgagaatattccagttgccccatattcttaccaatacctgatatttctttaaaacacgtgaaattgagtttcactgtaatcttcctaataatagataagaacgttttaaaacccagttgccctttgcagtgtgcgtcatcagaaccgtccagtcttggggtgccttccataaatgagaactttgtgatctcctcttccacgaatgagatatttagttattttgttgaggagtgataccagccttttgctcagcctcttgaaagagaaaaggtcagcatcatcttagggatttcattgagcacaaaaacagaatttaccataagcatgtgtgagctctgaatgtcactacatatctgtcctaatgcgtctcatgttttaagtgtcttgctcctttgtctttctgttttttttttccccagcaatctgattgaaatgggaaacagagggataggaatagcgtgcgcttttggacctctggatatgtaattctgctagatttagccaaaaatttgtgtcacgttcctatagaagagagctactgacctggggatgcttaacttggggccggcttgttgagaagtcatacattacattctgtgaatttatcttttttaaatcttcgtatcgtgtcagagtctctggaaccttttttgtccttagctccctttaacctttgtgctagagaaaaggcaggtccagaatggaaagggatttcccggtaaagcatggcagcttttctcatcctgcaggtctctcttaagagagctatgcatcctggttcttagaagatggcaggtgaggaaggggcctctgatatccaaagttagacttgattgttctttagtagtgactgagtctaagggagtatttgttgtttggagctttaaagtttattgtatataagcagtatcccattatgtcagtttccattataaaaatactatactttattattggcttttacaatatgagaatgcaggtttcccta

SEQ ID NO: 684 - DNA, 1137 bp, Homo sapiens
tgtaggaaggcttgtatggcaaattgtggttacgtgtggttaattttagctctgagcatggtagtggctacccatcacccgtgccagcagctttgtatgtgttcctgaagcagcttgctgaagccaggataggcattaaggaccctgtcctgcaaatattggggaactgtgctctagtcactgattgctccttctgatcgtggaggtgcagacacggaggtgtaaacacagaggtgagcggctattgtaactcattgccattgttgcaagtccttccccttattcactggagagatgctcttttgatttaatgaattgcttcccccctggccttcatccccccttccttggcaaaatttctgagccattcccagagcctagggtggagaaagtgaaatagttctttctagcacccatgttttagatgaagtaaattcctgaggatttaaagacttcgtgctttccccttcatttctctctctctctctctttttttttttttttccattatcggaaccagaaatgtaaggactgggacctttagcaaccacgtatacagaggaatttagaaagttgccacacatgcccaggaaaaggtccaggctcagaagtgacctcagaagagcttaagtttacatctcagtctaatctttcatatgcagacaccctgtaactattttttaaaaataaatgaatgagaacaaaaagcctagcaaaccttgggtaatggggagaatctgatctccagagataccacaccataaatttcaaatgtccacttttcaacaacaacaaaaaaatcaaaagatgaacaaagaaacaagaaagtatgactaattgaaagcaaaaaagaaaagaaactgtccctgaaaaagaccagattgtgggcttaccagacaaattaaaacactgtcttaaagatgtttaaaaagctaaaagataatgtggacaaagtcaagaaaactataaacaaaatggaaacatcaataaagatagagaaaacaaattctggagctgaaaagtacaacaactttgctagagggatttaaaagcatatttgagcaagcagaagaatgagtgaatttgaagatagggtcattgaaatcaaatttaaggaaagaaaaaagactgaagctg

SEQ ID NO: 685 - DNA, 1153 bp, Homo sapiens
ttctccattagagaaggtatttataaaaataggaatgaggagagctagaaaacctggagtgtggcattagaatagaactcatatcttttaaatatataggaacaaataaataaattgttgtgtgtgcacatatgcatatattttgtgttcattctactgagaggacctaaacacaatgacacctcagtaacagtaagcacaccaactgccaagttattagttcctaaatactatccacaaaaaaggggaacagggatgattcctagtcagagattgggagaaatacaagatgagcctgaatcatctcatgtacctgacagtaagaaaatactctggctggtctcagtggctcatgtctgtaattctagcatgttagaaggtcaaggtgggtgggttgcttgagctcaggagtttgagaccagcctgggcaacatggcacaattgtctctacaaaaaatacaaaaattagccaggcatggtggcatgcacctgtagtccgaggtactcaggaggcagagacgtgggaggatcgcttgagcctgggagattgaggctgcactgagctgtgatcgtgccactgtactctagcctggaagacagagtgagaccccatctcaggaaaaaagaaaaaaaaaaagatgtcattcagcaggttaatggataaactgtggaacatccagaaaactttaacattcttcaaagaaatagaaaacacaatcctaaaatttatatgggaaccacaaaagacttagaatagtcagctatcctgagcaaaaggaatcaaactggaggaatcatattacctgacttccaattattcaacagagctacagtaaccaaaacagcatgatactggcataacaacagacacataggaacagtatagacaacccagaaacaaattcatacatctatggtgaccacttttgacaaaggaatgaagaacatacactggggaaaagataatgtctttaataaatggtgctgggaaaactggatatccatatgcagaagaatgaaactagacccccatctcttagcatatacaaaaatcaaaattaattaaaaagttaaatctaagacctcaaactatgaaacagctaaaagaaaacatcggggaatctctccaggacattggagtgggcaaagattt

SEQ ID NO: 686 - DNA, 1172 bp, Homo sapiens
cacactgtcacccaggctggagtacagtggcacaacctctgctcactgcagcctccacctgccaggctcaagcaattctcctgcctcagcctcccgagtagctgggattacaagtaagtgccaccacacccagctgatttttgtgttttttgtagagatgaggtttcgccatgtttcccagactgttctcaaactcctgagctcaaagcagtccacccaccttggcctcccaaagtgctgggattacagatgtgagccatcttgctcattctagtttaaacttttgagtggtttgtgtctcctgattggactcctacaaatacagaattgatgctaggaagggtaccaggagatagacgcacacagatgggatttgggaataggtttggttatccaaggagcagtgctgagctccttgctaatgggatatgggatgctgatgatttccaggaagtgacctcacaatgactcaagctaccacatgctgttgattgtgaaatgccagttgaagcatatgtcctgcgagcttaggggtgctacaagttgaccactgcagcagtaaagatgactctgaagaatggcgtgggatggatcctttcgaatgcacttgagcagcggtctccaaccacagggccacagagctggaggtgagcagcaggtgagtgaagggaaacttcatctgtatttctagcccctcccatcacttgcatgaccacctgagctccatgtcctgtcagatcagcagcagcattagattctcataggagcacaaactctgttgtgaagtgtgcatgcgagggatctaggttgtgtactccttatgagaatctaatgcctgatattctgttactgtctcccatcaccccagatggacagtctagttgcaggaaaacaagctcagagatcccactgagtctacgttatagtgagttgtagaatcatttcattatatgttactatgtagtaataatagaaataaagtgcacaatatatgtaatgcacttgaatcatcctgaaattattcccttactcccagtctgtggaaaaattgtcttccacacattcactctgttttttggtagaggcagggtcttaatatattgcccaggctgatctcaaactcctggcctcaagtaatatacctctctcagcctcccaaagtgctgagatta

SEQ ID NO: 687 - DNA, 1205 bp, Homo sapiens
tggttagaccccccagtggaggtatacactaatgatagcttttggatacctggttctacagatgatagaggcccatctcacccccaaaaggagggaacaattatgaatatttcgttgggatttgagcatttaactacttgcttgggaaaagccaacaggtgcttacctcccagtcatcaatcttggctggcaatagtgcctgaaggtaacatctctgtggcacaattacatatgctttctgaccttagtatttattacaatgattatgcccctgtaaccaaagtttaccgccctcaaaaacctatctgtatagtggattgaacatgttcagaaaaaaatgaagatatttacttgggaagattgtattgcagggcaagcaaaggtgttgtgtaatgattcatatggagtcactattgattggtcccctaaaggggcatttataaggctcacttctcaatctgtaggtaatggtcaccctgcatctaaagaaaatgatcagatggtagacactataaaaaatacaacaaaagttcctattatttggacatatggtgatatggtggaacctcgaccccaaatgatacgacctgctgtaggagctaaacataaggaattgtggaaaatattaatggcactgaaaaagataaaagatttgggaagggaaatatactaagccatcccaatataatcctaattacatgttagaattggctcacaatgattcagtctggatacatagttgtgtctgtcctccctttctgcttgtagtgagtgatttaaaacttgatctccctaatcatcatgtgactgtcaagaatgtagattgttttcttgtgtgaattcttccttgtataatactgatcattctatcttagtggtaagagcccgagaaggagtatggatacctgtaaagctttcccgtccttgagaagcctctccttctgtgcatattattactgaaattcttcaaaagattttgaggcactctcagggtttcattgctactttaatcattatgggattgattgctgtcacagctactgccacggtagctggagttgctttaccaacacagtacaaacagcagattatgtaaataattggcagaaaaattctactttgctgtggaattcccaaactaatatacaccagaaattaaccaatcagattaatgatctccgacaaactatcgtatggttgggaga

SEQ ID NO: 688 - DNA, 1391 bp, Homo sapiens
agtggagccacaggcgcaagtggaggtggtgccgccgcggcgcagcggggccacaggaaccgaccgtgtctggagaaattccactcctgaattctgccaaacgaggaagtgttgaggacagccaaatcatcagggagatgtaattcataagaaacctgtgtaatttaaatactcataatttatttcagctaacgaataaaattgcagtattgcactcggtgcatctgggaactaactaccgaacggcgctgaaacctcaggccgtttctaaaggagcggcgcgaggacttctgggaaatgtagtcttcactttctcagggagcggcgcgagggcttgtgggaaatgtagcgtgtactttctaagggagcggcgcgaggacttgtgggaaatgtagtgtgcactttttggccccggtcgcgggagccgctttgggctttctgcgcatgtgcgcggtgtggctccaggtttgtttttctccggtacagcctggtagggagggctcccggcatctccctgcttcggggcagaggatgccgggggtagagtacgggagggctggagcgagggtggactggaggtgccgcttgtcctggaggtgggagagagggagcggctttgccgcctggcctgcgtcctaatcctgtcctggttcttctgctcccgaagggaacgtaggtcccgcgcctgtgataagtaaggttggattttctcttccctgaggtgaaggatgcccggaggcctcggcaggaccgtgcggaaacgggccttctgcccaaaagatgctgcttctctccttattctttcccctcagaatctcgctgtctccttccaaccacctgtggtcggcatccccgcgttgtcactgcgacgcagaggcgagcgaggtggcgggaagcacccgcggggcggggagggaccctgcgggcgcggactccacaccaagcctctgctcagcgtcaccccgcttgctgtgtcctcgcaggtcgcagcttcatggcctgatgccttcaggaagtattttgaagtcatcgtggctgtggattgggggatttcttgtttccactgacctgtgaggccgcgcacgtggagggaggcaccccgggtcctccggcactgtccggcctcgcctgtgtccctagtagcagtgggcatttccagacggtgcagcttgtggctaaagtgacaggaagatgtaggagctttcagtcttggatgaggattcgaactgaagggcttaggcccagctgtcttggagcaaaacatctgttgtggggtgagaagggaaaggaggggtgagggtgcaggggccctcctaggaggacatcggacctgttgggccgagacctcattagagatctagagcacggatgggaggagcagaggctcgatt

SEQ ID NO: 689 - DNA, 1163 bp, Homo sapiens
ctcactgtggacaatccacacacattcttctttcctctcctggcggggcacagagccacccccttgccttttcttttcttgaaggttctagttcagctcctgattcatcagacccttctagccccctgcatctagcagtgaagcatgaagcctggtggggatgtggtactcccatctggtgtggccaccagctctgccaatgttcctgtagccttggaaaacttgctctctcggttcttttgggtgctgtgtactccccagcttccccccttccccccccattttgcacctgggtttagtgaaaggatggcatttggttgacccatatagaaacccagaatgaggtctcagggccaggaggcctggtatttgtaggccagggaaggggaagaggcaagtggtctggggtatcaccagccagccctctctgatttggcctctactccccataagtcacagtaccataagcaggcttctggcctcagcaatttggtctttgtgcccaagtttattgtgagaatttcctgaaaactctataaaaggtctcttcctactgtaggcctctaatgtttctcccctttttgcttcagtccactcttcagtcttgtaggcctagttttcaaacctgcacatgtgtcctacctggccacaggcatgcaggcctcaggcagctgggccagtttgggagcctcgggtgatgtctgcacgatctggggctgcctctgcacccctgctgtgggcttcagggttggagaagggctgggaccaaccgggtgagatccacaagtctctggatgtggctgaaggcaaatacacaattgaagtactttctgttttgaagtgctttcccttttgaatctggtttgaaacatgcagcttctgtctctagcccaaggaaagaccaaaacatagggaaataaaagcatttatctttgtcttggaagtaattgttgaagttgtgcagttgatcagtgcacagttagatgcaatgtttatagaaattgattgttaaaccaaatttacactggcatgtgtggtgtagtttctaaaaggcacttcacatttgaaatttttcttaccttagaaagtttctagtgatctaaatgtctagttttgtattcttttgtgtgtgttcactgtttctcagtattaccacttgaata

SEQ ID NO: 690 - DNA, 1099 bp, Homo sapiens
cagatctagccttctctgagcagtgaagatgggatgttttatggtcattttccctggtgtggagagcccaagtggagttcttcagcacaccctacaccatcccctcactaacacccccacctgtccagtcttacctgccttcatatcaaaagcactcagttaacccagagggcttcagccctgccctgcctgactttctaggaaacccctctctccacccaccctaatcagacactgtctgaaggttccccctcatcattttaaaaggaagagaaatttttctgacacagaggttctggtgaagtggccagctcccacatcacagggtgatggtggtttggactggaccaggatcagacagtgctgtcctggggctggccatctgataaggggctccagaaagggcagtgatggacccctgggaggctttctgctctcctgatcacaggtttttggtgagaggacctattggccactagggtgtctgcgggggtgtgtgtgtgtgtgtgtgtgtgtgtgtgtgtgtgtgtgatgtgtgtttacttggaatgacttctttcagcatgaagcccactgttttgctgaacgtatctcactgtttcctgaaactcagtacattcagctggcttaagggtcctggggcctcgctgtgtcatatttgcacaagcctagtgtctgtgcagactgtacactggagttcagttgtaagacccttttgatcccttattctgttcctgtaatagaaaagccatttcactcaatggaatagaaacccagatctaatggagagatgttctaatctgccatacactggggcagtggccagtgatttggactttgtggcacagatggaaatttccaggttctctaggtggtaggcagaggcctcactttttaagaaactcccccactccacccctgccaatgaggacattgcttagaggtatttctatcagtgttgagtagaagagatcatttcttggtgttgaatttcaggtaaggatgccagcttctgcatatcagggtggtgatgtttgggctgcgacaggtctagacagcagtctgaaagggggctcaaggaagtagctgtgaaaggccc

SEQ ID NO: 691 - DNA, 1186 bp, Homo sapiens
tcgtgggaggggcctgagacaggaaggagattgagtcaccgagctggccaagaggaaagagaagagaagagaagagaagagaagagaagagaagagaagagaaggagggaaggaaggagaaagaaagaaagaaagaaagaatgaaagaaagaaagaaagaaagagaaagaaagagagagaggaagggaggaaggatggaaggaaggaaggaaggagaaagagagaaagaaagagagagagaaacagagagaaagggagaaagggaggaagggaggagagaaaagaaagagaaagaaagaaagaaggaaagaaagagaaagaaaagagagaggaaggaaggaaggaagaaagaaagaaagaaagaaagaaagaaagaaagaaagaaagaaagaaagaaagtaatcagcatgtccaaggagaggaactaacattccccctctccctctgtctctctctccctctctctcctctcatacagcacacacttaaacacacacaccacaccagcggggcagtctcatgtatcttatccttagggcaacctcactgtgggcactgtattttgaaccccttctccccaaccttggttgcagtgcctggcatccactctagcaaccacctcttttccataccagctgaggtggcttttacgaagccaagccaccctattcctgggatgagaccaggttggctttagccaatcagcacattgcattggtttgggtggttcagggatgggtgagtggaccaaccaaggccatgaggcaagaagagatgtttgggagagtagggaggggcagcttcccagcacttctgagagagacactggaagataggctctttctttgtgttggtcatgaaagaaagagtattagttcctgaagcgagctggtgtccagcattttttaataatgaggggactttgttgagaatgaagcaggcattccagaagcaaacaggagaactggaaaaaaaaacccagacttggttaacattgtcaagctgctggatccagccatgcctgaagtccatattatgagggctttcctgctcaaggagccaataaatcccctctttttaactgactttcttattgtctgcaattgaaagtttcttacctggtggtattttcttttttgatcaaagagaaaatggatattcagaaggtatacgtttgccagataaa

SEQ ID NO: 692 - DNA, 1391 bp, Homo sapiens
atactacattcctctgtttgtcaatttttagatttcgattctatttttggctactattgttcatatttcaatataaactttataatcaggttgtcttgttttcaagaagtctttctggcatttttattggtatagcattacatttacatattaattagggagtgttgatgttttatgatgagtctgcctgttatatccagcgggaggaaggagttatgatgagagggctttaggacggtctagaaatgtccccagatctaaagcactcagtttatcacaagaccaggcatcacaagaccttagtggtgaccaagttcccttcactgcatgtagcaggcactccgtgagcacctaccttgtgccagtatgtggctggggctgctggtcgccttacatggactccttccatctctttactaataagatattttagcagaacgctgctgcttggctaaacagctccaattttcggtccttttcatagctaggtttggtcatgcaaatggaggctcatgtgaggcttctgagaattcttcttaaaagggagggggtgttgcgaaggcccatggcgtgtgttgatatgatataatttctgcccagtgctctgaatgccaaagtgaagaaattcaatgaagtgcaggtaaaggagtaactatgactctcttaagtagctgaatgccttgtcatctaattagtgatgtgcatgaattaatgaagtggagattctcactgtccctatctactatccggtgaaaccacagccaagggaagagtcttggtggaattggcggggaaagaagaccttgttgagcttgactctagtctggcatggtgaagagacacgagaggtgtagaataagtgggaggcccccggcgacccccctccccttgagggagcggggtggggtacactgtccttgtaggcccctgatgaaaaaagaaaaagaagggagcagggaaaacccctctttttgtcccttcctccttccagatgcctgcaacatatatctggtggctggaacttggtagacatcatggaccagaacactccatgcttagatggtggttagtagaggtagttggagtcagggtctctgggactgaggagcggcctcaactcttgacttctgtattagtcagggttcgccagagaaacagaaccaataggagatctatatgtatatctatatagtctatatctacatctatagctaaacctatatctgtatggaattgtcacaattatggaggctgagaagtcctgctacctgctggctgaaagctggagacccaagagtaggtggtagtttaagtccaaatatgaagacctgagaaacaggagagccagtggtgtaagtcccagttcaagtgcaggagaagatcaacatccc

SEQ ID NO: 693 - DNA, 1135 bp, Homo sapiens
ggcatgctctactactaatagactgggcacagaaacccagcaaggcctgcctgcccagattctcccttggcctttctgtgcagcatttcttcttcctgggtatggggtacgatcttttctgaaatgggggtcttacagcctgcaatcagacaaggtaggtcatagaatttctttatggccagttccaagacagaaaggtgtggggaaagattagagtcctgctgtggggagaaaagggagtaggtgaaaggagggcaggagaaggtcagagagagagattctgtttctgaggctgcttctgaggcctgaagtgccccagtaatacaacaaaagaccttcacctttgtccctctgaagctgttccaaagctgattccagaaccaaggacaaataccttaacaagtgattgttttagtcacttaggaagggctatgggagttatgagctaggaaccatggatgaaaaccaatatatgtatatcataatatcacactttatcactgttttgtcactgagcacttccatttcctctttagctttgctctatagtgcatttggtgtcatcattgagaaaacacgaggtgcagaagatgaccttaacacagtagcagctggaaccatgacaggcatgttgtataaatgtacaggtgagtactgttgaatggggagccatctcttaatacacttgaagtgcgctttttaaaattcatggttttcaaggaaattacactctgttgcagtataatctagtgttctaactttatggttattttggtttggtttggtttttaattgtggtaaaataaacataagatttacccatcttaaccatttttaagtatacagtacattagtattatagtcacatgattatataaccaatctctggaactttttcatcttgcaaaactgatactctgtacctattaagcctcccaatttaccacttccttagctcttgataatgttacactttctgtctctgaattggctgctttaggcacctcatataagtagaatcatacaatatttgtccttttttgattggcttattttacgtagcataatatcctcaaggttcatccatgttgttgcatgtgccagaattcccttcctttttaaagctaaataatat

SEQ ID NO: 694 - DNA, 1292 bp, Homo sapiens
tgcagtggtatgatctcagctcactgcaacctcagcctcctgggttcaagtgattatcctgcctcagcctccaagtagctgggactataagcacacatcaccacacccagccaatttttttgaatttttaatagggtttcactatgttggccaggctggttgaactcctatcctcaagcgatccacccacctcggcctcccgaagtgctgggattacctgagccaccgtgcccagcccatttcacagtactttttatttaaccctatcgtgctagggcactatgcaatatacagctatttcattttccttttgtctctgtttcccaggtggtcttcgagggatagcacgaggtggtctgacaggactaacacttaccagcctctatgcactatataataactgggagcacatgaaaggctccttgctccaacagtcactctgaagattttgccaactcatgaatggaggacacttcagtagtcatctagatccttttataagacagtttggagttattctctctcttctacctacaattagtttgaaaaattggagattttgatttgctgtgatgaaaatcctggatggctgaccaagactggcacttgttccagccattagtgagttgaagccaaagccctttggtgactcactgagtaccatggttctgttctcctctggagatcttgcacgtatctgttttcctcccccatgaactagaaaaccacttactcccagaattcaggtcgtgcttgttagtactatatcaccaagtccattcatttaatgatccaaaactgtaatgttgcactgtattccaaataaagggtaaaaacagaaccaaagttataactccaacacacaaacatagtggttgtctcaatttaaaagtatctacctgggtataaagtgaaaggtacccttggcattttttgtcccagtgggcaaaacaacatcttcgtgtttgtgttaaaatgagctacttggtggccgggtgtggtggctcacgcctgtaatccctgtactttgggaggccaaggcaggtggatcacctgaggtcaggagtttgaaaatcagcctggccaatatggtgaaaccttgtctctactaaaaatacaaaaatcagctgggtgtggtgggtgtgcacctgtaaccccagctactcaggaggttgaggctggagaatcgcttgaacccaggaggcggaggttgcagtgagcccagatcatgccactgcactccagcccaggtgacagagtgagactccatttcaaaaaaagaaatgagctac

SEQ ID NO: 695 - DNA, 1161 bp, Homo sapiens
gtggggcactgtgagctgtcggggagggcattgtgaagtgtggggtggggcattgtgtgccacatgcctgggctcccacctggggccagtgggcttcagtctgtaggtgactacagaaggaggaggaactccgtctgttctctcttcaggcagttgttgtgtctctcagcgcttgttggtttcacaacctattaaataagccggctggtcttcaccctcccagacaagtcaactcaggggaggcagcagggtgcgggccttggcccgcagccctagccggggccggggccagggctggtgcccggggcctcgctgtgaggtgggcaggcgaggagcgggaagaccatctctgcaagtgcagcatagcctcggcctaggacagcgggagtgcgtggccaaagctgtgagcagaggcacaggtggtggcagacagtagaggcgccccatggggaacatactgacctgtcgtgtgcaccctagcgtcagcctcgagtttgaccagcagcaggggtcggtgtgtccctctgaatctgagacctatgaggcaggagctagggacaggatggcaggagcgcccatggctgctgctgtacagcctgctgaggtgactgttgaagttggtgaggacctccacatgcaccacgttcgtgaccgggagatgcctgaaggtgaggaggtgataggtgccatctaccctcggtttgcctctggctgctgctgtccccatggttccctttgaggcatcccacacttcgagctcctttctgcttgtagccagctttcccgggggctggccaggaacaaaagctggctctgccttgaattcccaccccttagtctttccccaccgagtccagtcagtttcttttcgcctcccctcccaatcgcccagttcttgctctctcatctcattctcccaggctggcatgggaccatttatttatggctcttgtcgaataagcagcagttgaataaataagttgataaatttttataaatgattacatcctttttcttttctccctctatacatatagctttggagtttaacctttctgccaatccagagtcaagcacaatattccagaggaactctcaaacagaaggtgagacaacagtgtctgtagctctatttattatcctgtggtactttgtttaggc

SEQ ID NO: 696 - DNA, 1176 bp, Homo sapiens
atgtagtacaaagatctaatttaaaatcacttactttctgagcctccatgtcttcatctgtaaaataggtacaatacactaacccaaaatttttgccgagataatttgataatcttataaagtcttttcaattaaaagacttcagtatacgtttcttcctttaaaaaaacttttttacttcttcttaagactctattgtagagtttatgactcctgaagttaataacttccttctaaagactttacaaactttgacctttgttattttgatttacatgtgtgaggcatttcatgaaaatgcagaaaacaagttgctgtttgccaagacattggatcagctagcatagtgtggtgctatttttaataatacgtaattcctgtggccatttgataaaactagaagctcattaaatgaagcccagagtgacagtcgtatgaaattcaatttcataagaccaggactatttcagggatggtttttgagaggagctgtaacttagatctgtcggctaaatttagtctgtcagctcgctgggtccctcctctccattgctgtttataatagaggatgaatgtttgtgtgtgtgtgttttttttttggtcagaatggagtggggaagttgtgtgtgtgtgtgtgtgtgtgtgtatgtgtgtgtttgtgtgtgtgttttcttgaagggtctccacctttgaaaagtctttatagctttttattgattataaaaatagtagctattcattataagaaatatttgcctgtgagaaaatatgcagaattgttaagtcaccaggggtaacttgtatcagttttgtatgtagacctaaattcttattttctatgaatatatatctgtgatatagatgtcacaaaatcatgatcatgcattttctatatccttgaacattttccaagaagatactttacaattgtatgggattgcttctaagggcactgatttgtttaatttcctattgtatatgggagttcttcttttcccccttagattagctgataccaactgaaactcacaggtcagctgtcaattaaatgtaatcccaattcttaatttctaaggttactaccatgtaaaacttgcctaatataaaagagatatatgtgtatatcaagatatactctaaccatctagttttatctaatagtttcaacctcaatag

SEQ ID NO: 697 - DNA, 1103 bp, Homo sapiens
tctgctgctctagaaagaagctcctcatctttgcctaatggtttatatttgagaaaggtctcagtacccagagtttaacagtccatgtcattagcctgtaactattttttttagaaagtcacctcatccatttcctttattaccatatttctcatgccggaatgtcagaagtcataaaacttgtgatatcttgcaggacacattaggaaatgtgttggaatgtgctcattggattgattcagctctgggggaacaagtcctaataaaataacagtagacctcaaaaattaggttccagtcccaactctgacatgagcaagttgtacccatggatgagtcatttaaatttgttcttggtttgcttatttgagaacaaattagctccttttccatttcatccatttcttgtgaggatcaaatgaaatcgtggctttgatatgagtgcaaaacattacacgaatgtaggagtgtgtgctctggagttagattacctgcgtccaaaccagggctcccctatttgctggctgtgtaacctggggcaagtaggataacttctcacatgttctcatgtggggaagattatgattgcgataataataataattaaatctatctcctagaactgttttggagattaattaggataatgttgtaaagtaattaatattcttctgatagagaaaatagcaaacaactattaattgttactgttagagaaacagaaattcaagtcattccatgcattttagtatacttctatgatgcttccttcagtagattttcaataaaaggctgttggataatagtaaattgaacactgtatttatctttagggtcaaataaataccaatgactatatttactgttttttttcataataagccttttgataaattatctataatttataactgtcagagaaaagttcttctttttcaaaaaatagcactatattatttaaaagaattataaatatctaaatatgtgaatcattgtcacgttttcacttgcctgatacactaagggatcacataaattataatgaattataaaatcagagaagaaattgatcaaagaatcagatttttttccaaaggactact

SEQ ID NO: 698 - DNA, 1145 bp, Homo sapiens
caaaaaataaaattggtattaaatgtaaatatcccaaatcctttctcctatttttcaacatgtttatactgtggtggaagttggcctgagacatatctcatatatcattagtctttgtaaaatacaaatttgctagaataagataattaattgaaaaaaatgacaagataacatatatgatgtaatgaaattattgatgatgtaactatagagaaaaaaagccttaaacatatcttccaaatacactgaccttctaataaccaatataacatttgtatgcataatattagtacactagactgaataagagagcttaatgcagtaaaatgaaaactgatgctctccatttttatattgttgaaatgtagtttttattatgtatgagcaaatatattttgttacttccataaagcacccagagaagctttcactacagcttcatgagatattgatgacttgcgcttaatgatgccaaatttcagtcaaccagggattatgaatatgtaaattggtgctcagaactcagttgtaaatactaagaggctactattatcaagaaatacatcaaaaagtaaattctttggactctgtagaacatgcactagctttatccagcatctatttcaagactagtcaagaagacatctcctgcatctaatgttttgctttcttaaaaagaagtttttaaaatggattatatagaatagtagctgcagacaaaacttaaatgaagctaaaagtgatgatttagagaaggttataggataatatgttgataggtcatagctaattatcggctttatccgtacatattcgtttaaagtggtcatctaactgatttgttcatatcttcttgtactttctgacagaatagaatatgacagttggaaagcgttagtagcctgaaacccgcagaaccactggaaggctgaaagtttttgattttattcagcacgctaatcatgtgataatagattggtcattcttcttgattcctccttcttaatcaggagttacggattatggacaaataacccttacctttcagtgctccagtccctcagacacctgttaccaaaaggtgttctaggtttcccttattcaaatgatagcagtggagaagtcattctcttaagggggacagc

SEQ ID NO: 699 - DNA, 1212 bp, Homo sapiens
aactaagagattataagtgagtgttgttttaagccactaggtttccatgaatttgttacaaaggaataaaaagataatataattttgaagggtgtgttttaaacagccaggaaaagaaacaaagaccaaaaggctacttaaaaagcagatggaaaaatctaacagagaattcacagtcacgagggtgtaaaaaatgcacaaaatcatagtataggacaccagtattagtgacagcaattaccattataccaagagtatggagctataaataaacatctagtatctggatcaacagcattttattcattgtttgccatggttgagtgataaagtagctaacattaaaaggtaagaatactttttcacttatatctatctaaggatcttgtgtttgtatgtatagggaagtttatttttggagatgtgggaataatatacattgaataaaacattattaaaagtaggcataaattaaaatatataagcaatttcaatttggagaagagggaatgaggtgtactaaaatttataaagaattaaataaagaggataaagacaaattggaaattgaaaaggaataagaaacatttttctgtgttgggattgtagtatgtagaaatctaatcttatagtataatatttgtaattaagatgcttagttccaatatgtttcattcagcactgggttattgtttagtacatttgtgcaataattagataaaatatattttaatgaaagtagattttgtgagttggaaaatacacttgctttagcaaagtaaactaaagttaatgtattttcaccaaatatagttttcttttaatttttttaaattttgtaaaaatgtaagacatatttagagtaactccctagttagttctttactaattgatgctttgaaaagacaatgacttttttatctgatgtatttttaataaaatagtctctcacatcacatttctaatgaatgcattaaaattctcaagtgactaaagggagtttaaattatctctgtattattatgtcagccatctagatctatgatatcaaaatatatatatttaagatgtgcacaaattaattaaaatgataagtttctaaatctctctttgtataagttccaagaattataaaaatagcactattttctgatcaaacagttaacactaaattttacaatgtttgtaaatgtggcttagaggccagtcttt

SEQ ID NO: 700 - DNA, 1137 bp, Homo sapiens
ctcagctctccagttgtaaagtgggataatagtgcccacctttatagggccaatatgggagtaaatctaattatttttgcaaaacatgtaacacaatttctggcatatagcaacttccaataaatactggctatcagtaattgaagacccaaggaaggtacagaatgtgtttctgaggcaaagggcccacatggctcccaggctttctcatctgagcaggtattaatttaggtgtgatcacaaacatttctagttatatattaaagactctaccttgccagccacatcataagtaactaatatattctgcagaatgagtggactgtggtttaattgttaaataaaaaatagatattacctttgcccatctcagatagtatcctctagtgctcaagaacattcattgtttctcagttgtctgctctgatagacccaacatatccaaattgaatatctattttcctctcagcatttctatgttttttatagacatacctttgtttgtgagatccagtcttctcaaccagctctttcttaccaattttgcctgagaaaagattactaattcttcaagattaatttcagatgccccttcctacactgtagcctttttagcctcatagcattatgtattttaaatatgtcttctcttactatccttgtacaaagtcagttattttatatatttttgtctcatcagtagttctgaaggtcaggaactctctctttcaaattatgcctctttaatatctagaaatgtattcacaggacaaatgttttgtatttatgtatctaattgaagaaatacttccagatcaaacaaaatcctgcagggacctgtaaaatatcaaaaggactatcaccttgaacaccaagaggggcctcctctgtgtagcctggatggaaaatgcctaaacatccttggtagtcaatggaagaaaactccctacttaaaggaataaaaggctgggacaataaaagtactgacctcttagggatctaaggaaaagattctggaccagaatgggcctaggcttgaagtggatctcttccaaaagaatagtgaatagtttttatcttttctaaaagatggattgaatggaattcttccatttgtagtagttcttgtaagtttaa

SEQ ID NO: 701 - DNA, 1224 bp, Homo sapiens
gtgagataagggtctaatttcattcttctacatgtggatattcagtttcccctgcaccatttattgaagagaacgcccctttgcccttatatactcttggtgcctttgtcataaatcagttggctgtaaatgtggagatttatttctgccctgtctcttctgttccattggtctatgtgtctgttttgtcatacaaaagacataagtaatttacaaataccattacagtattagagtattgtgaatttaactgtgtacttatttttaccagcgggttttatactttcagagtttttgtgatactcactagcttttgtgctttcagcttaaagaattctgtctagcactttttgtaatgaagtaggtggtaatgaaccccctcaacttttgtttttctgaaaatgtctttaattctccttcatttctgaaggacagctttgctggctacagtattcttagctgggttccttgttttttgtttttttgtttgtttgtttgttagttttaacaatttaagtatgccatcccactctctcctggcctgtaagatttttgctgcgaagtcttctgctagctgtattataattttttataagttatttgcttcatttctcttgctgctttcaggctcttctctttggctttgatttttgagtttgattgtactatgtcttagggaaatctttttttttttttttggattagatatgattggagacttttggccttgtacttagatacttacatcattctccagattgagaaagttttctgcaactgtttttttaaaataaatgttctaacccctttatctttctcttttccttatttaactcccatgacttgtacatttgctcttttatttatttatttatttatttatttatttatttatttattttttatttattttttttttttgagatggagtctcactctgttgctcaggctggagtgcagtgttgcaatctcagctcactgcaacctccacctcctgagttcaagtgattctcctgcctcagcctcccgagtagctgggattgcaggcatgcgcaaccatgcctggctaatttttgtatttttagtagagatggggtttcaccatgttggccaggctggtcttgatctcctgacctcaggtgattcacctgccttgacctcccaaagtgctgggattacaggcgtgagccaccacacccggccacgttctctcttttgatgctg

SEQ ID NO: 702 - DNA, 1198 bp, Homo sapiens
catctatgtccctgcaaaggacatgaactcatccttttttatggctgcagagttaacgcaggtgtttctaatgtgatagattaagaggtaaggactttaagaggtgtttaggtcttgaggactcctcccacataaatgggattaggtgcccttctaaaggggcttgaaagagggagttgggtctcttttttgccccttcaccttgtatcttgtgaggacccagcattcctcccctccagaggatacagtgttcaaggtgccatcttggaagcagagagcagccctcaccagacaattgaacccaatgctgctttgatgttggaattcccaccctccagaacggtaagaaataaatttctattctttataaattacccagtctcaggtattttgttgtagaagcatgagacagactaaggagaaatctgcttctaagctcacgtgagtgttggcaggattcagtcctttgctggttgtcagactgaggacctcagctctttcatggctgtaggctagagtctaccctcagcttcttgccatgtgggcctctccatatggcagtttacttcatcaaagtcagaaggagagagagagagagagagtcagtagagtctgccagcaagacagcagttacaatattaggtaacgtaatcattgatgtaacattccattaccttttgccatactctattggttagaatcaatgtacctattctacttacattggaagagagggaattaaataaggcatgcatatcaggatgtagagataatcaggggtcatcttagagtctatctgctactgtaagttagaaagattatttaacttgtatatgcattggagtcttcttctgtgagtgaaaataataatagtacctatttatagggtcattaggaatattacataatttacataaataaaacagctagaatagtggctggcatagaggaggtactgcattactgttagatgctatgacagaatgagcatccttatctgaaatgcttgggaccagagtgttttggatttggggtttttttttttggattttggaatattcatagaagacatactggctgagcatctcatatgtgaaaatctgaaatccaaaatgttccagtgagcatttccttttagtgtcatgtcagcactcaaaaagtttcagaacttggagattttcaggtttgggattttcaa

SEQ ID NO: 703 - DNA, 1180 bp, Homo sapiens
tggttccatgtctttgctgttgtgaatagtggagagtagctgcttttaatatatgtgaaccattagacagagaaaccgtcatgggtaatttattgggaattccatgggatttttaccatattgagttcataaaaaaagaaatatgaatactttcccatttagctgtgagattatttgcataatattgtcagccaccaaattaaaagataaattggaatcacaactattattttactactttactgttttgaacttaattcaacctgtagtgatgtagctggcaagacttatgtttgttggaagatacagttgattttgactttacatagtagtgtatctaattgtcatatgtaaaatactttatagataaaattatgtttctatataggagagtacacagaaagaatatagcacagtagtaagctattttgtaatctgaacatttttaagttcaagtttgcttttctcaaaactgagtgcaaagagagccaggataaagttaaaaagacatgggctttaaagtcagatgatgtttattaaaattctatctccattatatgaatttaggcaatttcttgacttctctgagtcttttctgagtcaaattctctgtcgatgaaatattaatagttaaaagttgtttactatttcagactcgaattctgctatctcatcattgtttagtcttctctattcattaaatgaaagcaccatctgctctattgctcagacctagaccaaagatgtttccttcattcctgtttttactctaaacacatgaaacccattagtaggtcctatctgcttttctaccaaaacatcttcacaatgcattcccttttctctatctacacttcagcattctatctagaccatcatcttctctatctagaatatagtgcagagagtatgccatttaccttagtcttcagtgacttaaaatttcataagcaaatgtcaggataattttgaaataattactggaaaagtgctaactgaggcagaaaatccttttaatgtgagtaggatgaattatacctcagatgcccttaaggtttgcatatatactataatggagcagagacaaagttttgtattgaatgcttcatttttcttaggattaattcacaatatttaatggtatggcatatagtataacacgggaactttttctcactct

SEQ ID NO: 704 - DNA, 1099 bp, Homo sapiens
acttattctttaaagtatagggaaattgattggcttgtaattggaaattcaaaggtagggttaacatcctcaaactgctggctaaacaagtttagcatctcttaaatatagattttagaaaaagagggaaagagtcattaccagatactttggagggaacatcaagaaagaacttttccagagctcctagcaaagcacttctcatgtcatcgatcccatttctttataaaattttttgtcatttggcctttttaatttttaaattattttatttttaattgacaaataattgtatatatttataggatacaaagtaatgttttgatatatgaatacattgtggagtgattaaatcaaggtaattaacatatctatcatatctttttgtggtaagaatatttaaaatctattactttagcaattttgaaatatgcattactattaactacagtcaccatgccgtgcaacagatcactacaacctattcctcctgtctaattgaaactttgagccctttgatcaacatctcctcttctcctactactcctctccagcctctattctactctctgtttctacgaattcaacatttttagcttccatatataagtgaaatcatgtggtatttgtcttctgtgcctagcttatttcacttagtataatgttctccaggtgcattcatgttgtcacaaatgacaagatttcccctttattaaaaccaaatagtatttcatagtgtgtatatatacatttctttattcattcatccctttgcagacacttaggttgattccatatcttagcttttgtgaatagtgctgtaataacacagagtgtagatatgttttctacatactgatttcatttcctttggatatatgcccagaagtgggattgctggatcatatggtagttctatttttaattttttttagcaatctccacagtgtttttgattatggctgtgccaatctacattcccacaaacagtgtacaaggattcccttttctccacatcctcaacaacactgatcttttgtcttttttgatagtagacattttaaaaggtgggaggtaatatcacattgaggttttgatt

SEQ ID NO: 705 - DNA, 1218 bp, Homo sapiens
atataaatgtactgccaaaagcaatatctcaatattatttacaatatacctattgatactttttatttttcaagaatgaaagaaagccaattgttttgaaataaagcatgtttttcttgtgaatatctatgaaagaatgtcttctacatgtcaaatatattgtctagtatatagttccttttaaaaaatgataccaaagtagaataacataaaaacactatttttagatacgtacagccttccttctgttatttagaattgagaatgctttattcaagctaactgggtttttaacttgctgttgtcaattgtaatagtgttaaataatgatgacttaggattatatggctgaattagatatagggaacactcttactgaggaaaaaataagaggtgacatttcaacattatacaaaccatatttttaaagctcacattttttttaaagggttccggggactataaacactcctactgagtgagcatcgtagaagtccttctgggtattaatcttattcatctagtcttgtccatgtgttatttatatttctatactgctcaaatttattaagatttatttgtctcttctgtatgtcttcaaagtattgttttctgtctactaaatctttcaaagattccaggctcaggcatcatttgtcttttcctaagctctgactattttgagctctatattgtgttcacagtgcaaaggtcctgttgatttccccaagatgaaaacattactgagttatgtgcagagacctgaagacaaaatctggccctgaagttggttgagattattcatggggagaattttccagctcttttttttttcctgcctaaagccattgaatgcctcttaaatcactgacataaaatttaggtcaacacattgcctggggtcatttaaatttcaaatctgctgccattttcttgcttgtaactattgggagagaagaacattgtgcctacagttagtgagctggagctgagaatctggcacaagaaatttcaactcagagtcaaatttatttatgctcagctgcaggaagtatgtcaggaaggttaatgagtctaaattggcattctgtcttctgactcagagctgaattgaaaaccacgtatagtgataagggttagcctctgccagattttgtaccacttgttggagtttaggacttggtaaattttttgtgagtgtggaagaattttgactcc

SEQ ID NO: 706 - DNA, 1220 bp, Homo sapiens
tttttcttttggcttcagaagaataatgcatataactcatgtttacaaaattgcttatagtagttttactttggtaattatcacaatatagaagtaaacataatgctaaagttacaaaggctaggcctagcgtggtggctcacgcctgtaattccaacactttgggaggctgaggcaggcagatcatttgaggtcaggagttcaagaccaggctggcctacatggcgaaaatcccatctctactaaaaatacaaaaattagccaggcatggtggcaggcacctgtagtcccagctactagggaggctgaggcaggagaattgcttgaacccgggagacggaggttgcagtgagctgagatcatgccccttctactccagcctggatgactgagccagactttgtcacaacaacaacaacaacaacaatgtaacaaaggctaatcaccaattaaaataacattgtgataaaagactctttaagattatttttgacttgaaccatattgaaaatgatgttgactctgtctgaagacttttgaggacaaagctcattttataacacatattttaattgcattgcctggcatgatgctgtgtgtctgctcagtcctgttctcagccccccttctgaaaaaaaaaattctttttggactacatagaactggctatgattgtaaaccgtatcactcaatctgaatttctagcttctctttcttttaatatctgctgtataaaatggtgacaaaatatttcgtagtcatttattatgtgttgaatggcattccttccgaaaaaaagatatgcctaactcctaacacctggtacctgtgaatgtaatcttatttgaaaataggatctttgcagatactcttcttcagataagatcatcttggattgatggcctctaaattcaaaatgagatccttatatgagaacacagtgggatgtttgagacatatacatacagaagagtgagacagagtggaagatcatgtgaggacagtggcagagattagttactcagctacaagccaaggaacaccaaggaatgccagcagcaaccagaagctaggaaagagtcgaggaaccttgccttttagagcctgcagaggaaccaacctgccaatgccttgatgttagacttccagcttccagaagtgtgagagaataaatttttgttgttagaagctaccatgttttggcaatttgttacaacagt

SEQ ID NO: 707 - DNA, 1219 bp, Homo sapiens
agctcttttacaaatgtctcccaaagcaccaagaaggaacaaagaatgtgacccaggaagctcacaccatgagtctacattgcagaaacctttgttcaacaaaactgcagatgctctattgaatccactggggattgtcctaatgctagggacacgtatataagttaatgattttattaattttaacattgttaaatgttttcctttggggaattctaatttatatatcaatattcaggtaatatttgctgaaaacacaaactctaagagtcaaaatgatctgcattcacattctcatcttctaatataacatagagacaatgactttattatctttttagaaactttcactactttagtttcttcataattttataaattaatgtatctcaaaaaactttgccctaaatagttagtaatagctatcaacttcagaaaaactaaaactttaaaaataacttttagaaggaaaatgaaatacagaaataatacatctcatttacaattaattaaaaataatatgaattatcactatttcctatgaaaacatctcatgccaacttctttcattaagtttggatttaaaatgttataattcagttgaaactggtagaatcttagtaaaattataacaataagaaattgtttaaattatatatataatatagaataattacatttagttccacttgttagtttattctgattatttagccggttgattcataatttaccaacttgggtcagaaatatttcctattcttagcttttgctgtcagcagagataataataataaagagcctgaacaacaaaggattgtgtattgtttcaatttcattaaagttgaatccctgctttaagagagactcacattttatattttattgttttattaaaaagacaatctagatatttgcttttccaaatttcccataagataagaaagacatattttttcttaattacacccttgctaagtcacgctagcttcctgaccttggacaaaattcttaacctctttgtgtctcattttcaataactgtgaattaaagataataattatatatttctcaagggattattgtgtgaattaaataaaataatcctctaaaatacttagtacagattctggaacataataagtagaaaaaattaataactattattatttttatttactatattatatgacatactttttctttatgatcttcagga

SEQ ID NO: 708 - DNA, 1293 bp, Homo sapiens
cctccagcttctgtataccctgcagggtaagctgttgttccctgaggctgaggctgaggcagagaatcttccagatgataaaccccagcagccgactcgaccccaggagcagagtacaggagacaccatggggagagaccctggtgtgtccttcaaggtaaatgagagatggaacaggtgggcatgggctggcaggtggagacagaagctgggagattggccttacccactgtctatactgtatttctccaaggctgttggtctacaacctgctggagatgtaaatttgccatgacttcctggaggacagcagcatggagaaagatcctagaaaaggtcagacccaactcaggccttggtgtccctggactgcaagtgtggaaggagggaaagcctggtttacctctctctgcatctgagctctgctacccatggagcagatggatggtgggaacaggaaagagcttatgttacacctcattcccatgcttagcccacccagagctaacccctgtcttcttccccaggcctctgacttccctcacctcccaaccatcattacaggaaagactgtgaactcctgagttcagcttgatttctgactacatcccagcaagctctggcatctgtggattaaaatccctggatctctctcagttgtgtatttgttcatcttcatatgctggcaggaacaactattaatacagatactcagaagccaataacatgacaggagctgggactggtttgaacacagggtgtgcagatggggagggggtactggccttgggcctcctatgatgcagacatggtgaatttaattcaaggaggaggagaatgttttaggcaggtggttatatgtgggaagataattttattcatggatccaaatgtttgttgagtcctttctttgtgctaaggttcttgcggtgaaccagaattataacagtgagctcatctgactgttttaggatgtacagcctagtgttaacattcttggtatctttttgtgccttatctaaaacatttctcgatcactggtttcagatgttcatttattatattcttttcaaagattcagagattggcttttgtcatccactattgtatgttttgtttcattgacctctagtgataccttgatctttcccactttctgttttcggattggagaagatgtaccttttttgtcaactcttacttttatcagatgatcaactcacgtatttggatctttatttgttttctcaaataaatatttaaggttatacatttcttctgacttcctttatt

SEQ ID NO: 709 - DNA, 1175 bp, Homo sapiens
gtacagtatagaaacctccatttttgccttcgaatgcatatttaagagttaacagaatgaaaaaaaaaagtcttgttggataatagtgtttgactagcgttttaagaacttgagagtaaaagcaacaataagattttttcacctcttcctgcttccacccccaaactgagaacatcactcaattgtttggaagaaactgtaggtctatataaattttatttataatgtatgtgtaatatacataatcataatacagttctcagatgcagggaagaagtttggcatttaatcattgaggctttaggtttttgatgtgatcagactgggccatgtcaaacccggaattttcaccaacagttcactcaccctcctggtacattgccattccaaggaattctgagagtaggcaaacaaattttgccttcatggtacagttctcagtttttcttataggagaaatatggtatatgtttataagaatcttttatgagattatagatttcaatgctgtggatagtgtcttgcacccaaacaagaaagtccataatggaatgatcttccctcagcttcctatcgatttagttacctcttgaaagcacaaaaattaaaacattgccatatgttgaatttttaaaaagcacttggagtgagcgaacatttcctgataaatgccttttagagataggttcttgatattcagacatctgcagaaatgttctggttcccaaagtcatttcacttcgaaataaaacacagctccttcaaacagcactttttccacataaatctagttgcctctccctgtggacattcagaactgatagaacaaacactactcttttgaatttgatggttcgtgtcctttaaagtgtttgaggacctatgcagagcctgtaacacttgggtagtacctgctaggacaatttcttggcaattgtcttactactagggatcagtaagatttagattctgagcccataatggcaacagccccctcacctatgggaagctgacttccctcagtcgggcacttctcatgggggctgaacatggttcctgccattctgttacccactctcccaggtgagccctggattggctcccagaaggcctttgtaaaatcagtagccgtcctgcaggcaggtgggagcaacaggggcttcagtagcttcatt

SEQ ID NO: 710 - DNA, 1178 bp, Homo sapiens
ctctgaaatctgcagcttgagcagcatctatggagtggtttcagctaaattatttcatttgagtctcacggcaagtctgtgggagtaggtagtgtgtacctccttagaaaataaaggatctggggctcaggtgaaatgctgttaaattattggccagggaacagtgctggtaaatgggacagttggcatttccagggaggtggcctcacatccaggctagggttctttctcctctgttagctccttggcagaggaggaggttaaaaaaagggtctgatagttcagcacttacaagcaaagggcattcaattccaaaatttctaggaaattccaatgtcgcatttgacccagcaacaaaaattgggaaccactagtctatacatttgtgagtacatatgatatttcttctgagatttgaaataatgccccatttaaaaaatatttttaattgaatttttttgactaggaaggacatcacttggtatttggtccccttccctttaacacaaaaggtggcgtatatgatattatattctgttctgcccctccccctgccatttaattatattttggatacttctctttttttttttttttttaacagttgcatggtaagccattgtgtgggtatctcttaccattgtgcatttaatttgttttcagtcttttgtctcaaaatgtcaccgtcaccttgaacgtaggtcattttgtatgtgggtgagtgtatcagaggggataattcctagccactctcttcaaccatttccttatgttgactcaatcattacatcagtcttgtgaagtagccagtagcatattatccttgtttacagacaggaaactgaggctcagagagggttgggtgacttgcttaaagtcataccgcagagagtaggagagccagaattgacacctagctaagcaagctgattctagggaattccctcactttttgatgctgcctttcttggtaaattcacagaagtgacattgttgtgtcgattgccctatatatgtgtaattcgaatagatgttgcttctacaatttacacttccattagtaggatatgagagatatgtggccccatactacactgtcagagggttttctcaaactggattttggtagtctggtaaatggacagtgacatattagtacagtctttgcatttctctca

SEQ ID NO: 711 - DNA, 1208 bp, Homo sapiens
agtttgttatcttgaattcgtctatttatgcaattctaagtgaaaaatgaaacgaaagtagaaaagaggtcagtcatctgtagtatgcccctaaagtttagcagcttgttcaatcatattctcaggctcctagtggaaaagaaccaaaagggttacctacaccagctgagccattttctacaatgacatattcctaatacctgtgaataaatgacaccaaaaaatatgacagtgctatgcttccagggtcctttagactgtgttgatttaaaaacagcttgctcactaaatataaagaaagttttaaaattttaaataatcatcctataaagaagttgtcagactcacttgctgcaccactcaaaggagagagaacgttgggtagattcatatgaatgtgaaaataacttcagctaaagcaaacaatgtgtcagattgaaagaacagtgacttgacaagcctaattttactttccaggtagtgtttaccttccgtaagtgaacttagggaatgagtccaagaatactgcctggaattccaggagactgaatgtatgtgctccggaaaaatcaatttgcaaatatattgagagtttttatagtcatgctggctgcctctttaaaaaaaaaaaaagaaaactaagcaagtagaatgctgccaaatatgactgagtcttagatggtaacatcaaaatttgtatttcccattttagaagcagttgaattttgagctatctgaactctgcccctgcttttctttaatattgagtcatagccatcctatttttaaagagaaaagccaatgactttcaagatttgtacatagtatatagtgatttatagtttacaaagtacttttacatttttgtcttatttaatccttccaacaagccttaaggcaagtcaggcaattttgcttgtgaccttttacagatgaggatattaaggctcggacagctcaaatgatgtttctgccttcacacagtttatgactggtatagctaagacttgaagtcaagattattgattctcagcctaatgttctgttacactaagctatctctctaaaattatttacaaagaataataacaatcatcttctgtgaaatgattgctatgtggcaggcactaggtaaataattatatatataaccttaggaaatccccaaaacaatgctataaggtaaatacaactatcccccaacccct

SEQ ID NO: 712 - DNA, 1177 bp, Homo sapiens
ccatatgaacttgagaagaatgtgtattctgctgttgttagatgaagtactccatgaatatcaactaggtgcagttgcttaatggtgctttttacttcaactatgtccttactgattttctgcctgctggatctgtcaattactgataaaaaggtgtcgaagtctccaccgtacttgtggatttatttgtttctccttgttgttcttttagtttttgccttacatatcttgatgttgtgtttttagacctatacatattaatagttatgtcttcttagaatattgatctttttatcattatataatgctcctttttatccctgatatttttccttgctctgaagtcagcgttttaagaaattaatatagctacatcagctgtcatttgattcatgttagcatggtgtatcttttccattcttttacttttaatttatgtgtttctttatatttaaagtgggtttcttatagacaacatatagttgggtgttcttttttaaattcattctaacagtctctgtcttttaatttgtgcatttaaaccctttgtgtttaaagtatttagttgtgttaatatctaccatatttttcactgttttgtatttgctgcccttattctctgtttcttctctggtattgagcactttatatgattccattttctctctaagcatataaattgtattctttaaaaaaatattttggtggtttccctagggcttgcattaacaaccaatccaagtttactttcaaataataataataccacaccagtacatgaataatacaagtgccttataacagaggctatccaattcctccctttcatcccttataatattgctgtcattcatttgatttatcctgcaggatctctaaattactggtaaattaacagatccagcaggataagctataatcactgaattacaagctataatcaccaaataaactataatcactgaataccttgttactcttgttattattttagagactgggggggtctcactatgttgcctaggctggccttgaattcctaggcttaggcaatcctcccacctcagcctcctgaatagctggaactacaggcatatgccactgtgcttactgttattgcatggcaggtcttctggtgacatattccctcaatttttgtccagaaaagtctttattt

SEQ ID NO: 713 - DNA, 1284 bp, Homo sapiens
catttttagctatttttataacacattgtgctatggggggttttggaacttgctggaagctacatcagaaactgccatagttaattgccatttcaagaatgttgtaaataactcaggtggccgtttaattctcaatgtaaatataattaactagacgtctttcctatatttgtgtctcagttttaaagctatttctggatgcttgagtcttaccgtaattgataacaaaaagaggttattgagaatatctatgatttacagagtaagttattctagacctcaagagtgaaatgtaggggaggagacatttgtgtgttaaactaatggaaatgctcatttaatagatattcactgaaagtattagttttggtttattgctagaaaagttgaggttttatggagatttttgtaaaaaatggtttatttcctaaataaatatctctttttcttttttctcccagaaaatgttaatctatgatccagccaaacgaatttctggcaaaatggcactgaatcatccatattttaatgatttggacaatcagattaagaagatgtagctttctgacaaaaagtttccatatgttatatcaacagatagttgtgtttttattgttaactcttgtctatttttgtcttatatatatttctttgttatcaaacttcagctgtacttcgtcttctaatttcaaaaatataacttaaaaatgtaaatattctatatgaatttaaatataattctgtaaatgtgtgtaggtctcactgtaacaactatttgttactataataaaactataatattgatgtcaggaatcaggaaaaaatttgagttggcttaaatcatctcagtccttatggcagttttattttcctgtagttggaactactaaaatttaggaaaatgctaagttcaagtttcgtaatgctttgaagtatttttatgctctgaatgtttaaatgttctcatcagtttcttgccatgttgttaactatacaacctggctaaagatgaatatttttctactggtattttaatttttgacctaaatgtttaagcattcggaatgagaaaactatacagatttgagaaatgatgctaaatttataggagttttcagtaacttaaaaagctaacatgagagcatgccaaaatttgctaagtcttacaaagatcaagggctgtccgcaacagggaagaacagttttgaaaatttatgaactatcttatttttaggtaggttttgaaagctttttgtctaagtgaattcttatgccttggtcaga

SEQ ID NO: 714 - DNA, 1178 bp, Homo sapiens
cttgtgatgaagtagatgctagcattgccaaggctacctattgcccaatgttgaagttcagccctacaggtgaccggacttgctagcaggccaacgtgagtatccagtaggctataaatgtgtgccagctgtcccgacagtggctgaatggagctccagtaggcaggttgtgtttagagaaaaccaaggagaaaataacagttaacgggaataaactgtttggggtcaaaataacagtcccatgtttttgtacttgtgtgagatataaaaagaaaacttgagtgtcaattaggcttagtacgaacttccaaacattctttcctgtgcttgtgcacctccaaggaagtggctggacgaaggcaaaactccctgaacctcttacgtctttgattgctctggaaagccttggtgtccttactgtggtgttcactctcttcttacagagtttcataaatggacgctgacatggactacgaaagacccaacgttgaaactatcaaatgtgtggtcgtgggtgacaatgccgtggggaagacgcgcttgatctgtgccagggcgtgcaacaccacactcacgcagtatcagctgctggccacccacgtgccaacagtgtgggcgattgaccagtaccgcgtgtgccaggaggtaagatgcacagagtgtcttcagcatccctagggcacatcattgctggttgccagtctgattttttctaaaggaggagcgtggataaattacacattcaaaacaaaactaacctttttagtgccacgagagaaaacaaaagcaaaatgcaaaccggagactgtggctctggtatcctgaatgagggttgagacagatgattccaggaagggaattaagacttagcttaaatcccgtcagatagaataaggaaacttaatgcaagtgaattgatggcactgagggtgctgacttgaacacgcttctcctggggaacttctgactgacaccgagcacagatgctctctctctctcctgcaggtcttggagcgttctcgggatgttgttgatgaagtgagtgtttctctcaggctttgggatacttttggtgatcatcacaaagacagacgctttgcatatggcaggtaaaccaagactagtacagcgtggttgagcttgaatgcaatttccttttcaaaaccagcagcgggttt

SEQ ID NO: 715 - DNA, 1211 bp, Homo sapiens
gatctctgcagcaaaccaccatggcacccgtttaaacctacccatcctgcacatgtacccttaaagttaaaagttgaaggaaaaaaaacagtttaatgacaatgaaatcacataatatttttcattttgatgactacaaagcagttttataaatatgaaggtaacccagttatcaaaagtataagtgtttgaatttaacccgatattaagtttacccaaccactaaaagccctagtcaattttgggagagcagtttttagaacatgacccataccacatgaaacttaactgacaataaaatggaaatttcatttgatgcccttaacacactctgtcatgtgtctgtgatttgaaaaaaactaataccaaatttcctcccccacatgactgtaagtactggcaaatctagttgtacatttttacagtgtattgtatcatgtatacaaatataaatacttctgcagctttttagtataaaacatcatttacatatatacggcccaaatacacgtctgccgttgtggattctacctatttttgggaattaggcgatagtaatctcaggtgtacactcaatataagaggcatatacccaaaataagaaaatcaaccctgccgctctgtaaaccacagggtattgcacttccaggcatcaagccagacatcttgaattattttcacttcatctctcttcaatttaggactaagactaaatgtttgacaaaataatctaggaagttgagtcagtcagaagcagaagaaaatgcattatcgcagctgaagtgtcactttgttcccatgtagcaccacctaatcgctcctggtaaagctggacaaggccctagtcctggccttgcccccaagcctgcagctttgaccaccgcatacaaatcatgcatttcgttttcagtgttaagaagtgaatttccctcttggcatgggacaacctaattcctatatgcaattaaaagaataaggctgaaagattatgaaatttcaggaaagaagatttatgaactaagttctttgtgtgatgcaagatggagaaagggaaattttatgccggttcactgagaggaagccaagctgtttccaaaatactctatagtctttaatttttctacttaaaatcagttattgccagtctaatattttttatcttaaggctttctctaggtaaccagcgtaagttagggagagtttgaatttat

SEQ ID NO: 716 - DNA, 1212 bp, Homo sapiens
cagacagcgtttggcacggtttaggactctgagcttccaaagctgcctgcctctgtgccacctactgctgatttatttataaccatagttatttatattcagtaaataattaattgtgaacttcaatgaatcaatagctttttctaaaagattccattaggaggaaagaaaatttgcattcttaaagggtagttgacattttccgatgctctgagaacagtaagggaaaataatattttgaacatacagaattgtttttataattttcctgagtcatttgatgaattgctatagaattctaagcactaatttttaatcgactagcttttctaaaacaccattgatctatggttttatgtgtgtaaaagttaggtggtaatcgttgcctccatttcacttaatgcctttaagaattccaaacttttcttctctgatattaacatactcttggatttggggcaattaaccttttgtatatcaaattaatggataattccatcacattttaaaaattctaaataactaatttaaccttgataagtattttgatgtatttaaagtgataataacttaaaattgatagtctcttgattttttttttttttttttcagcaaatggtagaaggtctgattagttggagaaggttgtattgtgttttgcgaggaggtaaactctattgtttttacagtccagaggaaattgaagctaaagtggaaccagctttggtagtacccattaacaaggtaaaggaaatgctattttgagaaaaaaatatacatcttaggaagtttgtttttgtctgtgcagtttacattgttgttgtcttataaataaaagagaagtactggtaaaaacaggttacttcataaatatgatttaatctgtttctgtttttctattagagcttatctgttataagaaaatgtatatttcctaagaaaacatagtaatggacatctataccagtaaataggttttaaggcagagaatgtaactccacattagcagtatatttaaattttttatgaatttacttaagagattaaacataaattgttagctcatgttattatagtgatgctgtttctagttagcattcaaatgaagccataaaaagacattcttgactatactttctgatttcttatgggattgataggcaattgtccagtcttctgacagaacagaaaagcctgacagtccatttagaa

SEQ ID NO: 717 - DNA, 1202 bp, Homo sapiens
gcgtcctgagtggctgggatacaggcgcccgccaccacacccagctaatttctgtatttttagtagagacagggtttcaccatgttggccaggctggtctcagactcctgaccttaagtgatccactacctcggcttcccacagtgctaggattacagtcatgagccactgtaccaggcctatagtttcctttttttgttgtgtctgggtaatactggcctcaaggaatgagtttggaagtattccctcctcttctttgtttgttttgttttgttttgttttgttttatgcatttgagtatgattcatatagaattcagtagtaaagtcattagatcctggacttttctttggaaaagaaatgggaaaagatgcaaggtttttgtttctttttttttttttttttttggctctgtcacccaggctggtgtgcggtggctcagtcttggctcactgcagtcttcgcctctctggcccaagcaattctcctgcctcaacctccaagtagctgggactacaggcatgcacaaccatacattttgtatgttttgtagaggcagggtttcaccatgttggccaggctggtcttgaactcctgggctcaagtgatccaccttctttgtcctttcaaagtgttgggattacaggtttgagccaccatgcctggctgggagatttttaattaaggctttgattccattatttgttactggtttgttgaggttttcttttctttcctggttcaattttggtaggttgtgtgtccatgaatttatccatttttctgggtttttcaatttgttagcttgtatagttgttgatagtagtctctaatgagtctttgtatttctgaggtctcagctatatcttttttttccatttctaatttatttgggtcttctcctttttttcctcagtctagctaaatatttattgattttatctatcttttcaaaatccagcttttcatttttttaaaattttcttctgttttttgtttttttgtttttgtttttgttttttttgtctcagtttatttccgttctcacttttattatgtccctcttactactaattttggatttagtttgttcttttgtagttccttggagtgcattgttgcgttgtatatttgaagtctactttttaaatatagatgtttattgctgtaaactttcctcttagtatcgcttttgccaaatc

SEQ ID NO: 718 - DNA, 1116 bp, Homo sapiens
taaaaccattcattcatagacttttaaaataatagctttattgaggcataattcacataccatgtaattcacccaattaaagtacacagttgtatggtttttagcatgttcacagagctgtgcaaccattaccacaatttgaaattcttcatcagccctgaaagaaactgtcttttagcagtcacttcccatttccttcaacccatctggctgaggcaaacgctaatatccttctgtctctatagatttgcctgttctggacatttcatataaatggaatcatataatatgtggtcttttgtgactggcttctttcacattgcaaaaagttgtagcatttattggtacttcattttattactgaataatagtccattgtatacataaacattttatatcatcagttgatggatatttgggttgtttccactttttggctgttacgaataatgctgctgtgaacatatatgtacaaatatttgtagccatatgttttcatttcttttgggtgttttttttttaagtaaactaagattaatcaagttctaaaggaaaagaagttgggtgctacttttggaaaaaatcttctgtgaataatataacatttctctcattctctttttatcctcatgtatttttgccaggttatgctgcactaacatgttcggataacatgtacaataacaaaggtttgtttctttcatatgttacatgttataattggctggggctctgtcttacctctcttttcatccagtattcagactaaggaaacacccttctttgggacatcttgttcttattataaccaaaggaaaaagcaacagaactagtggaaacatgcatttaaagcctttgctcagaactgacatatgtcacgtttctggtcacatttcactggtctaggcaagtgatatgaccaaacctaagaattgagcagggaaatataaactgactataggtaggcactgaaaatcacatggcattaggtggggtcatatatagtcttcatttgtagaaggagacacaaatgatttgggacagaaactgaggctatcacagctcagaagaagtaatgaaacttgtggaggaaagctgaagaagactcaagtggca

SEQ ID NO: 719 - DNA, 1216 bp, Homo sapiens
tataaggcagcaacagctttgctttggaagattctctgcccttctgtgaaatgattggcaatggagacctggaagacaaggagactccttaggaggctccctaactggagagaggggattaaagcctctctccagttaaagtacttgagctacagaatgtaaggtttgaggctaacgacagggagcaataatgtgaggaagaaaatgtcatgaaaagaaatgtatttctcaagtgtcaggaactgttattttgtgagccgtgaacacattagcacattagaaagcacacttgtagagaatataaacatcattctatttttcctctttactcagtttctctctctaaacatgaaagagcaatcacaggatctacacaaacttggaaacctttttcacaccaggaggtagaatttacttgattctttctaacccactgagacaaccacctcctcctgagcaagatcagacccttctctcaacatgaacctctggtagcatgggcagggaacctccataaccaaagcaccctgtatgtagaagcactttgtcccaagatcctgcactttaacaccagagaaattagccctggacaccactcttttttttttcttttttgagacagagtctctctctgtcgcccacgctggagtgcggtggtgtgatctcaactcactgcaacctccacctcccaattcaagcaattctcatgtctcatgactcaacctcccaagtagctgggactataggtgcacgccaccacacccggctaatttttttgtatttttagtagagacagggtttcaccatattggccaggctggccttgaactcctagcctcaagtgatccgcccaccttcctcgctaagtgctagaattacagccatgagccaccgcacctggccctggataccactgtttacagctgcgtggtcttgggcagcatgctaaacccttctgagcttcagtcttcttgcctttaagtcattataataaataccacatgaaaccgttgtaaagaaaattagccgggcgtgatggcgcacacctgtagtcctggctactagggaagctgaggcactagaatcacttgaaccctggaggcaaaggttgcagtgagctgagatcgtgccactgcactccagcctgggcaacagagcaagactctgtctcaaaaaaaaaaaaaagactgttgtaaagattaaattagtttaacta

SEQ ID NO: 720 - DNA, 1180 bp, Homo sapiens
aactattatagggagaatgttctagtttggggcttattaacactatttttaagtaaaactaacatctgtggctttttcccccaggagattgatgattatattgtacaagcaaaggaacgaggctatgaaaccatggtaaactttggacggcaaggtttaaaccttgcagctactgctgctgttactgcagcagtaaaggtaattgttcatttacctttttaatccaatgtcatattaagtcaacaaataaaggtggcttcttatttcaaaccattataaaattgtggcattttgctatatttatttttctaatactggaaaacaagtaaataattttaaagatattttaattttgtgttttccatacttgatattttgaatctcttaattcatcacaaaatgaggtcgttaataaataatacatacctgaaaatgtcatttagtcataattttcccacttaatcaccttaaagtagtttgagtaaatcacctgatgtaaagatgaccattgtttatttctctgtctttggtgttctttctctctctttttttctgtctctttgtcaatggcaatatcttggtaggatttctggcttacttctgcacctctacttcaatcaatttgaggtaaccgattattcaaaataaggcatgaaaaagtctgttcttaaaacttggtacttagccagttactaatgtcatttgttgtgtttgcaagccaagttatcaaatgaatgtgttctgtaaaaatttgcattatggttttggatttctttgcatgttgtaatttgtgtgatttattttaaatactttagcataattgattttggtgtgtttggtatggaaagaaaatagccttctgtgttccttagttgcttcatgtataaaatgggggtaatatacctgtgagaatatttaaaagcacagtgcttgcttgcatatagtaggagcccaataaacataaatatcatgtgtctatctccattcaaaattcaagtgaaaatttaagttttttgctattaaattaaattgagattgaatagtattctgctttcaagttagtctgttttagttatcttgaactaaaacaactctatggaaataaatattccagttgagtggtgattttatataactaatagtgaagggatatgaaatgagggcactttcacttttcaga

SEQ ID NO: 721 - DNA, 1336 bp, Homo sapiens
catattactttttaactttaaatctcaaagagattttgagttattgaattcttaaggctttcttagcttgaactgataactatgcattatgaaccctaagtcaatatatttttggtggttttagtgatcagtaatcaaatttgtacttattatgcttgttcaggtaatttacttgactgttctatttgtttgtccaaaagataaaatgatgagagagattcgagaggtctttgatctgtctcccttttaagaaatgaagccagctggtaatgtatattcaggacttcctcagagtattggccaagaacataatgtttacacaggagtaccttggtataatgcatacattgtctcatgatactagtcataaaatattttatggattatttcacattcttcatatataacaagtaaaattaattcagttttcttctcccaacgtttaattctgaataactctatctactttaccctaatttttagcctcttaatttctggaaggactctaatttctattccaaatttctatgaattctaattgtaaattatcggaacagagttttatttatatgacctggtactagacttcttaatataactgttacactgtccttgtctttcctactcaaagacagtatcatctgaagttgcctaataaggtcatgtgagtcaagaactttatctgtgggagctgatttgcaccattttaccttttttttttttttttttttgagacggagtcttgctctgtcaccaggctggagtgcagtggcgcgatctcggctcactacaacctctgcctcccgggttcgagcgattctcctgcctcggcctcccgagtaactgggtctacaggcccgtgctaccacgcccagctaatttttgtctttttagtagagacagggtttaaccatgttgcccaggatggtctccatctcttgacctcgtgatccgcccgcctcggcctcccaaacttctgggattacaggcgtgagccaccgcacccagccaccattttatctctctaaagtctggtcccagtattaaacctattctttagtaaactcatattactgttctaaattgaagaaattatttattactctgtacttctagactcaaaattctttatcaaagatagtctcaaagaggtagtacaagtcctgtttaactgcactttttcacattcacagtgcttcctctgatatctttccttacatcattatacactgttgatatcattttactcttctttctcttctacatttcttaaattttggttcttttcctgtacatgtgttttagcggggcccttttctttgaactttgtctaatt

SEQ ID NO: 722 - DNA, 1120 bp, Homo sapiens
ctctccaatagggtactccagtcaatacacaaagtggcttattccaaggaaaaacccaaatacgaggtaaaaggagttgttaactctacacaccagagtgacctactcagtcctggagcatgtcagcttccccagacacaccacttttcctaacaccagtgaagtgttgcaggcagctgatgctgggaagaggaaagaagggagatcccccaagccaaagcaattttggcagctggggtgtctctagaatcccagctatggggtcagctagcaacaagtagcttgcattcaaagtgattgatgctttgcttggtagtgtgaacgctgctgttcccagttgctccatctgttggataccaggcaagctagaccacttgaagtttacaatcccatgttgggcaccaaaaattgtaacttaacccaggttcagctgcttgctgctcgaaagccaaactcgaaagagaagtgttgatgagaggaaatgcaggtttattcaggagccaacaaccagaggatatgaccaactagtgttgcaaaactatctcaggtttctcagggtgaccaaaatggttttaaaggggaatgagattttgtaattatgaatatacatatatttttttttgagacggagtcttgctctgtcacccagctggagtgcagtggcaccatctcagctcactgcaacctttgcctcctgagttcaagtgattctcctgcctcagcctcctgagtagctgggattacaggtacgtgcccccgtgcctggctaatttttttggaatatacaaatttttaaagggaaatggtgacttgcccaataaaatgcttaaatttaggttaaatatgtctcataagtattaaaggcagaaatattttgttgaattattatactactcttttttgtatttcatttatgaatgcaaagtatttactctaatgcaggggtatccaaccttttggcttccctgggccacattggaagaagaattgtcttggaccacagataaaatacactaacactaacaataacactaacaatagctgatgagctgaaaacaaaaaaatcacaacaaaatctcataatgttttcaggaaatttatgaatttgttttgggccaca

SEQ ID NO: 723 - DNA, 1199 bp, Homo sapiens
aattcagttctgctgaggcccagttaccatttttcaacactaaaaagaataggaaaatgcccttttgtttcactttataaagtttcaaaagcatgaatcagaaaatcattttactttggaacaaagattttctaggaaatttaatcttttattattcaagataattcaaccaaacactttgagccaattttaaatattttgtctacatctcattagactaatgcacttttcttccttttatttttctagacttaatcacacagattcctataagtaattaggtttttcattctttctaaactctttatcttagcacttcattcattcagtcatgacatagtaatgtttgtggaatcccagttgcttttattgagaatggctatatattctctcattaagtaattatttttctttatgtttaataagggagaaagtagcctattgcctcagattcaggagtaaagatgaaattcactgggaagacattatgtttgaaattttccttagggttcctcttcactgggtgaattcagttttagtgataaagcctaaaagttctcaacatctctaaaaatattatctttcttactctaaagcatgtggaaaaagttggctttggagaagttatgtttggctaggaaagatactatatctcatctcaagaatgttaacacatatatattcatctcactctgctaccaaggaagggaaagatgttcagatggccacatcacttgaatagctgagtgatagaactgccttctaggtcactgttccaaatctgaactagcccattctgtccctcccccggccctcccccagttggaggagaatcctttgttgattctcacaatactatgactagacaacatttgggagcaaaaataaaaaaatatgcttctaaatagccttaaatgaattgttttgtctttgtgataattccctgtgactttatgcttgtgacttcctgctgcctgcaagtgatgttggaaaatggaaacacagcagtttattcacttttctttatcctgcatgtctcaagcttggactttggcagttgaagtaagataatcattttgtgccataaaagaagaaaaacagtttgccaacaggagcctaaatttaacattagaagactgggaaatatggaagagaggtgatatcccagcaacactactccaacacagtaatctggcagt

SEQ ID NO: 724 - DNA, 2017 bp, Homo sapiens
gaagcccgagggggcgggcggggggggggaagggacgagcccacaggcagcatcccgacacctcacacttcctgcctcaatgcacagaagaaagtgttctgaaggcgacgcccccagtcttggcgggaaacgccgcggaagacgcttctctcgcagaaatgccaaattttcgggagcgcgggctcgcagcacgtaacagaacagatctttttgtttcacggccctctcgtagacctaataagcgcgagggcgaaaaccaggtcagcgaccagaagccaggcaaggttgcgattttcggagcacagcgaaggggagagtttctaagttctgaatgtacctctatttagggtggtttctattatttcttcgcgtctaccctgtagttgccgcaccctgagccctcagccccgccgcttcgcacggagcggagctcagagggtgcgcgctccgccctttcgcgggcctggcatgagcgcagtggttgttacactaaagtgtctccgcctgtcgaatattctcgtggcagcgatggccgagtggttaaggcgttggacttgaaatccaatggggtctccccgcgcaggttcgaaccctgctcgctgcggaagcgggtgctcttattttttctatttttttaaataaacaccttcaaatgaaaacttttactcttctctgtattttcaatgcctgtcagctaaatggcgcgcctacggagtggttttatacgctgtagaaaagcgaataaatgtcagtgctgcaaacatgtactgtttacaccaagaggaaaatccttccactgtcctaaaaggcaaggtaactcttcgtgctccatgagaagagcaaggtggcaaaatagaaataaaatgaatataaatattgacgcaagttttcgggctatcacagcctgagcaagctatcagctcactaaaactaagaaaaagctatgccaccttcccttccatcccagaatcacttccgacggtttccagaccacatccaaaagtggtatgaaatgggaaataataaaagcaattttaaagttctacttataaagcatcttagatacatccacataatggaacactatgcatgtaagcattaaaatgatgttaatggccgggcgcggtggctcacgcttgtaatcccagcactttgggaggccgaggcgggcggatcacgaggtcatgagatcgagaccatcctggctaacacggtgaaaccccgtctctactaaaaatacaaaaaaattagccgggcgtgatggcgggcgcctgtagtcccagctactcaggaggctgaggcaggagaatggcgtgaacccgggaggcggagcttgcagtgagccgagattgcgccactgcacttccacctgggccacagagcgagactccgtctcaaaaaaaaaaaaaaaaaaaaaatgatgttaatgatgtgtgagggccttcccaatgcattgccaaatgcaaaaaggacagatcaaaaaacagcacatcatactatgatcatatttttgttaagcaactcatgtatatacccatctatgtgggaagaatgggagagaaagagagagatggagaatgaatggaggctggaaagaaatacaccaaagtgttagcagggattattatccctgggtggtgtgatttgggaagatttttattttcttaaataattttttccttaactgggttttctaaaatttgtacatggacccagtattatgttttaaataagaaaattgtgaggttagtctttgggaccctacacatcccctgtctgctacctttaacccactttcaccatatctctcccaccccatgtttcccaggtgctcttatggacatacctgatacctcaaggctagggatagttttctgtggtatctacgtggattccacgcacacagccccatcctatttgagacttggctgaacacacacactcaccacatttacattttcaatccatcctctctgcccaatcccctccctttctgcccccatttaagtcacttaca

SEQ ID NO: 725 - DNA, 1206 bp, Homo sapiens
actaaaaaaaaatcttattaccatggaattcaattatagtacttgtatttcaagcgatccttttgccattgacttttaacttttgaaaggtttttgaaaactgtgtaatttgtttcaaatttctttgcatgtgaattgtcaaattccccaccaccagaggcatctatgtatttcctcttattaagtatttaagcatgtgaggtcttatcatccatataaattgtaattcgtgttcataagaattccagtctgtttaagttaatccatttctctaagatgttaataattcataccaaagtcttacccttacattgtacctgctgcagtgaaatattatccccaagctgttttactataacaagatcgacttttcctacttctgattttaaatatttactttctttcctttaaaggttttgcagatgtgaatggttggcaccttcgtttccgctggtccaaggatgctccctcagaactcctgaggaagttcagaaactatgaaatatgaaatatctctgcttcaaaaaatgaggaagagcaagactgtcccctatgctgccaacatgcagtctttgtttatgtcttaaaaatgtcatgtttatgtcatgtctgtgaattgctgagtactaattgattcctccatccttgaatcagttctcataatgctttttaaataagaaaaattcagaagatgaatttcttccaatatttgaataaattaaagctcttagatacagagtagattgtattatatgctttttcctattaatactacttatagaaatccattaaaaagcaatctctgtacagtgtatttaaatatttcattgacatactgtgatctctattagtgatggatgtacaaaaaatgttttcttacccttgacttacaatgaaatgtgaaattacttgtctgaaccccgtggggagaaataaataattttcccaaagttcataaatgaatttataattcaattttttttagggtcttgctctgtcacccaggctatgcagtggcataatcatagctcaatacaacctcaaactcctgtgctcaaattatcctcttacctcagcctccctagtagctgggactagaggcacacgccaccatgtctggccaattttttattttctatagaggtgaggtcttgctatgttgcccaagctagtcttgtactcctggcctcaagtgatcctcccatc

SEQ ID NO: 726 - DNA, 1188 bp, Homo sapiens
catacaagtcttgacaacagcatctggtctactagactttcttacagatttaatttcttttgtattttaagaactttataatgactgaaggaatgtgttttcaaaatattatttggtaaagcaacagattgtgatgggaaaatgttttctgtaggtttatttgttgcatactttgacttaaaaataaatttttatattcaaaccactgatgttgatactttttatatactagttactcctaaagatgtgctgccttcataagatttgggttgatgtattttactattagttctacaagaagtagtgtggtgtaattttagaggataatggttcacctctgcgtaaactgcaagtcttaagcagacatctggaatagagcttgacaaataattagtgtaacttttttctttagttcctcctggacaacactgtaaatataaagcctaaagatgaagtggcttcaggagtataaattcagctaattatttctatattattatttttcaaatgtcatttatcaggcatagctctgaaacattgatgatctaagaggtattgatttctgaatattcataattgtgttacctgggtatgagagtgttggaagctgaattctagccctagattttggagtaaaaccccttcagcacttgaccgaaataccaaaaatgtctccaaaaaattgatagttgcaggttatcgcaagatgtcttagagtagggttaaggttctcagtgacacaagaattcagtattaagtacataggtatttactatggagtataattctcacaattgtattttcagttttctgcccaatagagtttaaataactgtataaatgatgactttaaaaaaatgtaagcaacaagtccatgtcatagtcaataaaaacaatcctgcagttgggttttgtatctgatccctgcttggagttttagtttaaagaatctatatgtagcaaggaaaaggtgctttttaattttaatccctttgatcaatatggcttttttccaaattggctaatggatcaaaatgaaacctgttgatgtgaattcagttattgaacttgttacttgtttttgccagaaatgttattaataaatgtcattgtgggagataatagtatggcgtctgtcctagaatgctttgtgtcagttactaattctaaaatcaaattggtagaagg

SEQ ID NO: 727 - DNA, 1185 bp, Homo sapiens
ttcttacagttctggaatctgggaagtccaagattgggcagctacatttggtcatcttctggtgagggctttgtgctgcatcataacatggcagaagacatcacagggcaagaggggtgtaccgagagtcaaactggcttttattttttatttttatttattatttttcttatagagacatgatctctctatgttgcctaggctggtcttgaactcctagactcaagtgatcctcctgccttggcctcccaaagtgcttggattacaggtgtcagccaccattcctggcctaccaaactggctgttataacagacccattcttgtgataacctgttagtccattaacctgttaattcattcatgaaggcagagacctcataagccaattacctcttaaaggcctcgcctggtttttttttgtttttttttttgttttttttttttgagacaaggtctggctctgttgcccaggctgtagtgcagtggtacaatctcagcttactgcagccttgacctccccagttcaggcaatcctcctgcctcagcccccctagtagctgggactataggcacacaccaccacacctggctaaattttgtattttttgtagagatgaggtttcaccatgttgaccaggctggtctcaaactcctgacctcaagtgatctgcttgccttggcctcccagagtgctgggattacaggcatgagccactgtgccggcaaggccttacttcttaatattgttaaattgggaattaagtttcaatgtgagttttgaagaggacaaacattcaaaccataacagatgccttattactgctgggggttaggaaggttcaggctcccacttggcattttctgatactaccacagcagggtgcaagaactttacctcatcattgccaggcaagagtagaaatccaggctcctcactcagcctttgctgactgaggtttgttgcgggggcatgggttttttctcgggtgttttgctggaatagggcatttattgtccagagttttctgtcttgctaggctatttcctggccctttggcccgggaacagctccacttggggctttttttgtctatgcccattagtatttaatgggttgagggcttcatcaacacccaatatgagctatatatgagataaaaagaaacctgaggtaactcatcacc

SEQ ID NO: 728 - DNA, 1099 bp, Homo sapiens
gaatgtgatcgatgctaatctgtgtgtgaagggagaggatttagactcacaagtaagtgaaagtgactagtgccaaatgcagagtgttttcagtttgcacagttcctccttgatcaggtgtcatttgaagttgtaaacaggactgttaaacactaaaggaatattaagagtaacattcagtaaaggtacttctgataaagtattttctcccctttaaattaaaaaaaactttatttacttcaggttggagtgattgatttttctatgtatttaaagaatgaagaagatattggaaataaagaaaggtatgattttcataagttatttcacatattgggttttttatatagctctttacaaatcattataagatccatctatttacagtgtggttttattttgttgttttcccccctgtgacttcttcatttcattttcacttccattacaagctttacaaagcagattatggaaaatcacttaggagaaggaggttttattaatagtatgaagtgggacctttggttatacctgtagttactgagacccattttaatagtggttttttggaataaaagagatgaaagcttattattcacaagtttgcaaatactggtttacttcaagatcgaactatgtttttttttttttgagacacagtcttgctctgttgcccaggctggagtgcagtggttctatcttggctcactgcaacctccgcctcctgggttcaagcgattcttctgcctcagtctccccagtagctggaattacaggcacccgccaccatgcctggctaatttttgttatttttagtagagacagggtttcaccacgttggccagactggttttgaactcctggactcaagtgacctgcctgcctcggcctcccagagtgctgggattacaggaatgagccactgtgcccggccctaattatgtttaaatttaaaaatacactaatggtattgttaagtgtattattagcaagtaatttattcaacaaaggttatagatacttagtacacagtttactattattcttatgttttattttaaaggcaagacaatgttttattattttagttttataataa

SEQ ID NO: 729 - DNA, 1142 bp, Homo sapiens
ggtcttgaactcctgacttcaggaatccacctgcctcggcctcccaaagtgctgggattataggcatgagccaccgcgcctggcctagtttcaactagttcagtttgattttattcttgctacactggatttggcttcatgcttcaagacttatacaagctgtagatttcctaaaagtcttaagaaagagtaaattattaaaacaacccaattcataattggagctatatattacattagcaaaggttttttgatagcttttgcaatagactttactggcactaagttgttttccctttgggatttatagaagacccttgagtattctcagatgtgtttgacacatagaaaggggtagaataactaggggttgttttagaagactgtatcctgctatttgatttttttttttaaagacccagaaatttagaaatatttttttcttcttcagataaaatactcatttatttttttgaagcctccctaatacgtttacatgtaggaacctaagctatgtatttatactttaactttgctttattttcaggtgttctgttccagtagagccaggagatatcattcatttggagggagactgcacatctgacacttggataatagataaagattttggatatttgattctgtatccagacatgctgatttctggcaccagcatagccagtagtattcgatgtatgagaagagctgtcctgagtgaaacttttagggtaaataatagtaacagttaatgtttctgcagggtctgagagttttacagagcacttttacatttattatttcacttaatcctcccagcaaccctataaaataaatggtattaattagctgcattttatagatgaggaaaatgggctcagagaggtgaagtgacttgccccatagccacataactatgaggtggcagtgctaggactaaaggccaggtgcctgagtccttcgaatcttgttcagggcttaataaaataactaattataataagaaaattaatttaaatgataaacttttaaatttaaacacacctagacatttccaaagttggcttcatgtgattcccactaaactaaaaataaatgtgcaaactgcttttaaaaaatgtattttgctagaaaaattagcc

SEQ ID NO: 730 - DNA, 1137 bp, Homo sapiens
acaggcgtgagccaccgcgcccggccaggttgtgggttttaatgggaccatctcactgcctaccgtttcctttttccgtccgaacagaaggggcctgagcagtgaactgacagtggcaacgccgggtgaggcgggatggaggagtttacgagcctgggtgacgccctgttccgcgtcctggccccgcccctcccggcagagccccttggcgcgtgacacaggccccgcccttgctgtacgccatcagccggcgccgcgccgccgggtgttactttgccccgccggcggggcggtcagcctcctgtcaccgcctgttccggctatggtcccgtccggtgttctgtaagttggcaacctaggctcctgacgcgaccctggtcctgatggcggcggcgacggccgcggcagccctggcggcggccgatccccctcccgcaatgccgcaggcggcaggggccggagggcccacaacccgcagagacttctactggctgcgctcctttctggccggaggtgggtccatgccacgaagagccagccgcgctctgagtggcgggggcaggactgtgggcaagtgggatgcaagcggcctctatgacattcctggactctggctgcttcaatgttctgttagatgtctgccctgacctgctgtaacctctttctagtaatcacttgactaatgacagctaggttatggggagtgggacctttggcactccggcagaggctggggaggtggaaggtctgaatcaggcacccattcttcagggctggataacagggaaaagaggaggatcccttacagagaccctggggttttagtgagacatgctgggcactcctttcttttataaaaaccgtgagtgacccagtgtagacttggattttgctgtttgcttaaaggaaaacaaatattggagatcagctttttaatgactactggaaaattgtgcaaactgtctacagccaaaactggttccagtgattctagtaaactgtgacacagtacttgacaagccctattattgatgtgactttgggatcaaaaagttcatattgtctcttaggaatttcctgggccttcaagctccacccttccttaattacttctctgggttgtgtaggggtgggttg

SEQ ID NO: 731 - DNA, 1148 bp, Homo sapiens
tcaaactttatttttccaaactttccaggttatcttacttaaaatattcatatcacttactgcttttgcagagagcaatgccgagcctagaattagcactcaataaatttgtgttgagtgaatgaatatggagcttaaatatggctatttagaaaatgtattttagggctgggtgaggtggctcacgcctgtaatcccagcactttgggaggtcgaggcgggtggatcacctgagctcaggaatttgagaccatcctggacaatacggtgaaactccgtctctagtaaaatacaaaaaattagccagacatggtggcacgtgcctatagtcccagctactcaggaggctgaggcacgagaatcacttgaacccaggaggcggaggttgccgtcagccaagatggtgccacggcactccagcctgtgcaacatccagagtctagctccaaaaaaaaaaaaaaaaatttcccatttgggtgcggtggctcatttctgtatatctgtaatcccagcactttgggaggctgaggcgggaggaccactggagcccagtagttggagaccagcttggacaacatagtgagactctacaaaaaaaattttttttctttttttttgagagggagcctcgctctgtcgcccaggctggagtgcagtggcgtgatctcggctcactgcaagctccacctcccaagttcacgccattctcctgcctcagcctcccgagtagctaggactacaggcgcctgccaccacaactggctaatttttcgtatttttagtagagacggggtttcgccgtgttagccaggatggtctcgatctcccgacctcgtgatccgcccacctcagcctcccaaagtgcggggattacaggcgtaagccaccacgcccggccaaaaattttttaaattagccaactgtggtggtgtgcacctgtggtcccagctactctggaggctggacgattgcttgagcataggaagaggaggttgcagtgagccattattgggccactacactctagcctgagtaacggaatgagccctgcctacagagagaaaagaaagttgagtatcttgaatttgaattggtatcttgaaatagtatggctatggtattcattattagctatattctgaggcatg

SEQ ID NO: 732 - DNA, 1155 bp, Homo sapiens
gtgcttaattttctattgtacactgatggaaacttggaatatccagaaaaggcacaaatatcatcagtaaaaagctttttagcatttcctatacaaaaactttattaatataaattcattgttaattttgacaacttgaatattaaccaaaataattttggtactatatatatatataattttgcatttgagattatttgcaagcactgtgttattatttggctgtaagaggacgtataaatatagaaaaaattttaatataaataattgtgtctagggggaaggtcctaaagccaactctactcaagggatgccttggtagcaatgattgttaaccatctggagtgacagaagaaagtgatattgggtaactaacttcttaagaagtttcatctcaagttttgtaatattatagcaacaaaaaattatgctattggttgctccattctggtcacatggatgggcgttttcatcatgtcctggttatgtactgattaatgtggtcaatctctgcactttctaaatttttgatacatggaggcagttttaaatggttggatggttttatgtggtgacaacatttgtatagaattttttttttttgtagttaacactcagaccactgagcaaattttaaatactgccgaagcctttttaacatcccaataattggatgcagtattaaataaacaaataaatatttacaattaatttttctattttgcattcaccaagtcaagtagaccacattagtcttatgaataaaatgcatataatgcatccttccaataacatgtaaaaatcatagaaaccacagaggcattcctttgtgtatattaattctcgatagtaaaatgagtcacccaaaggaaaagccataacattcctcagatggccaaaattcgttgtcaagtttatttttaatgttgagagttcttggttatttccatctaactacattagatggtttttttccatcgtctacatttgttcccttgtgacatttgtggaatttcagtgcagttttctaccgggccctctcttgtctgttgtgcaaactataacagcagtgaaataaaacacagactgccttgtactacttctacaaataataaccacgtgtcacagatttttgttctgcctgttgtttgttag

SEQ ID NO: 733 - DNA, 1167 bp, Homo sapiens
agaatataaaatttgttcatttgcaaaacatgcttctgaaatattttgtttccattatttatttagccagctagtttcttatgggtactaaagaaggtctcccaaattacctaaattccacaatagggcttagatttatgaagttttatattttttcctccttataaaaagctctttttataaagaatatccatgtaatactaaaacggggaaatctcctaaataatatattttttaatattacttttttaaaaagctagggtgagcacctcacaatcaaaatttaatgtatttgtcatattgaaatgcagggttttttgaaggaaacatggtaggtaaacattttagttcccaactcctgatcgttaaaatgcaaaattgggcctggtgtggtggctcacgcctgtaatcccagcactttgggagaccaaggcgggtggatcacgaggtcaggagttcaagaccagcctggcctagatggtgaaatccccgtctctactaaaaatacaaaaattagccgggcatggtggcagacgcctgtaaccccagctacttggtaggctgaggcagagaattgcttgaacccaggaggcggaggttgcattgagccgagattgtgccactggactccagcctgggtgacagagtgagactccatctcaaaaaaaaaaaaaaagcaaaattgttggcatctctaagacagagcaagactccctctctaagagatagtagtgtctcccacttaattgaattcgttttgttttgtttgctttgctttgattcttgccacgtaaaatctgtgggtcttgacccagagatttgctcagacagttaagaaaaataataagatgtatttgtaaatttttacataatgaaaaatgagatgtatttgtaaaattttaaaataacctctttataaatacgtttataaatataaagaggtaggatgttttggctaattagcacattctgggtcatacacacacacacacaaacaggccaaacactctagatagtcaaataaattccccttttggtgattcagttcagtaatggtgattcagttcagtaactgcctatcctcatcaatgcttgtttgtgatgatgaaatagttgacaaccgggactttacaaaaatagctcctgaaaaaaattaaatattttatt

SEQ ID NO: 734 - DNA, 1245 bp, Homo sapiens
gtattacttcctatttttatttaaatttcagacatcttatatttaaagataattagtagtgcttctcattttttcacattactttagacttttgacaggattgaattatttgactataataggtaatgctgatggctagccctagtatggaagatttatatcataagtcatgtgctcttgctgaggacccacaagaacttcgagatggattccaacatcctgctagacttgttaaggtaaaaggacacatttgttttaactttagatgtattcactttgcttagctgtaactttgtacacataaaatctaaagccctacattttaatatttgttgattaatgagtaattttagtattaaggcacccagaatttaatgatgtagatgtttttctcattgcagattacaactatatcttatttgtacgctactagttcaacagtcattttgatgttttatatttgtaacatagtagaatattagtggtaataggattcagagtgtctttggatgttgttgaagtttgaattatagcttgtttctttaaaagaactctatctgaagaaatattttaaaaggatgagttatgatgtgtgtaaatcctattccattgctgaaatgcagtgtggaacacaatgaactgaactcttccttgactgacagataccagaggtagtaaaaatgatattggaaaggtttgtacctttccttctcaagtatcttattggtaatttgacagggtgcgtaatatatgtaaatgattctttgttttgaattagtttttagtgggcatgaaaggcaaggatgaagctatggccattggaggccactggtctccttcgttggatggaccagacccagaaaaagatccctctgtgttgattaagactgctattcgttgttgtaaggctctgacaggcattgatctaagtgtgtgcacacaatggtaagtactaattcatttcttgattagaagtgttttactgatagtttatgtagttgttcttatcgatcagccttttccccccggcttattttagcaaccctggtcaatgcaggtaatctcaaaggaaaatccccatttgtagctaaagtttatttggtgccaaaatgttttgggggaaaagggattaagaactaatcaaaataaactgaaaatttaaatgttttgttatgttgtactttggaagttggatgtatgttgaaaatacttttcatttcatgcatagctggagaagatcgtcaa

SEQ ID NO: 735 - DNA, 1245 bp, Homo sapiens; identical to SEQ ID NO: 734

SEQ ID NO: 736 - DNA, 1168 bp, Homo sapiens
aggcgtgagccaccgtgcccagctatttatttattttttgagatggagtttcgctcttgttgcctaggagggagtgcaatggcacgatcttggctcaccacaacctccacctcccaggttcaagcaattctcctgccttggcctcccaagtagctgggattacaggcatgcaccactacgcctggctaattttgtgtttttagtagagaaggtgtttttccatgttggtcaggctggtctcgaactcctgacctcaggtgatccgcttacctcagcctctcaaagtgctgaggttacaggcgtgagccactgtgcccggccatgcatatgcgtttattaaggtgcaatttacttattataaaattcaaccttttttgtgaacagttctgtgagtttttacaaatgcatatagttatataaccaccaccaacaccacaatgaagatacaaaacagttctaggtaaaaaggccgggagcggtggctcatgcctgtaatcccagcactttgggaggccgaggtgggcggatcacgaggtcaggagatcgagaccgtcctggctaacatggtaaaaccccgtctttactaaaattacaaaaaattagctgggcgtggttgcaggcgcctgtagtcccagctactggggaggctgaggcaggacaatggcctgaacccgggaggcggagcttgcagtgagcccagattgcgccactgcactccagcctgggcgacagagtgagactctgtctaaaaaaaaaaacaaaacaaaaaacaaacaaaaaaaaaacagttctaggtaaatggctcagaaattgagttctagtgaagtgcttattccagaatctgtctacttctaaaacagtatgtttgattgagtcaaaccttgagactcagactatttattcaagctgttttatgcttcagttttatgtccaatagaataactcccggatgcataagcctgttacttgttttctgaatttgaaatatagggatatcagaagtgtgttttagcaccagtaattggataagccacataatcagtttctaaatcttatacattgtaaagtacacatcattatttatgaagaattacttccagaaatgtttgctctaaatctgattgtgagaaaacagataaatctagaatgtgaaattttcttttttaaa

SEQ ID NO: 737 - DNA, 1235 bp, Homo sapiens
ccagctaatttttgcatttttagtagagacggggtttcaccatgttggccagcctggtctcgaactcctgacctcaggtgatctgcccgcctcagcctcccaaagtgttgagattacaggtgtgagccaccatgcccgtatctctgaaatctctttgaatgcctctttcattctttcttttttgagacggagttcactcttattgtccaggctggagtgcagtgatatgatatctgctcactgcaacctccgcctcccgggttcaagcagttctcctgcctcagcctcccgagtagctgagattacaggcatgagccaccatgcccagctaattttgtatttttagtagagacggggtttctccatgttggtcacgctggtctcgaactccaacctcaggtgatctgcccgcctcagcctcccaaagtgctgggattacaggcctgagccaccgtgtctggccctgaatgccttttcattgcttgtttttttgagtttctgttgtttttttgttgtagtctacttcttgggaaaaaatagatgatttgtcctctaactttccttacagactcacttttgctgattgcatttctgtggtatggtttatgtgttcctctgtcctctgtatttcatgtaaattgattgttggatctaaatttttaatcaagtccagttctgttttttccctaagacgctttcataagtagtgtggtatgttctttcttcaggatatccataatgtctagttgtctcttttggggatgaggtaatgctttattattttctctagaattaaaatagcatttaataccatttaaagagataaaaaatttaacttgcgtttgagttgtaagagaaaataattgtttaacttttcattattaatctattttttgtatcattattttatgtatttatttatttttgagacagtctcactttgttgcccagaatggaatacgatggcacaatctgagctcactgcaacctctgcctcccaggctcaagcgattctcctgcctcagcctcccgggtagctgagattacaggcatctgccacaatgcctggctaattttttgtatttttagtagggacagggtctcaaactcctgacctcaagtgatccaactgcctcagcttctcaaattgctgagattacaggcgtgagccaactgcacccggcctatttatttatttattgagacagagtctccctctgtcacccaggctggag

SEQ ID NO: 738 - DNA, 1229 bp, Homo sapiens
aggagttcaagaccagcctggctaacatggtgaaaccctgtctctccaaaaatacaaaaattggccaggcatgatggcgggtgcctgtaataccagctactctggaggctgaggtaggagaatcgcttgaacctgggaagtggaggttgtagtgagtcgagatcacaccactgcactccagtttgggcgacaagagcaagactctttctcaaaagaaagtgaaaattatatcatagtttttctaagagaatcaagaaatgtattttcatctctgtattttgtttacttgcatgcataacaggtaaagaagcttcttaataaagtagtgctccgtgaatcttgcttttaccggaaattaacagacacctcaaaagatgaagagaaccatgaagagtctgagtcattgcaggaagatatgctaggtctgagtaatattaagattttgctttttaataaatatactagtaattaaagaagaaaaataacttactaaaatatggtatattttatattataggaaacagattattacttccaacaccaacagtaaagcaggaatcaaaggatgtggaagaaaatgttggcctcattgtgtacaatggtgcaatggtagatgtaggaagcctcttgcaaaaattggaaaagagcgaaaaagtaagagctgaggtagaacagaagctgcagttactagaagaaaaaacaggtaagggtcagctttgaatatgttaatactttcagcaccctgctgggacacgtatatgtttatgtgtgtacatacatatatacgtacctgtgtacacatttgcatatgcataccagatattttcatcgaagtacataaggaactttttaaaattttttattatttatttgtttttaagacagggtctcactccgttacccaagtggagtgcagtggcacaatctcaacttactgcaaccactgcctcccggatccaagtgattctcccacctcagtctcccaagtagctgggattacaggcatgcgccaccatgcccagctattttttgtatttttagtagaaatggggtttcaccatgttggccaggatggtctcaaactcctgacctcaagggatcacccactttggcctcctatagtgttgggattacaggcaggagccaccatgctctgcagggacctttacttttcactatttctggttcaggttataaaattgcttagctttatctgaatcttaggtctt

SEQ ID NO: 739 - DNA, 1237 bp, Homo sapiens
tcttcattttccaagatagtgaaactattgatatatacccgtctatatatatagctaagaagcgattttagaaaaagcttactattttgatttttaccttatcacagcatgaaagtacaaatgtcgaaatgccccaaaattgtattttttaaagttgaaaatgatcttgaaataatccagaattgatgaatgttgcaaatgtataaatgccttattcagtgtttgtattttccttatgaattttttttagaaagagaaaaaagagaagccaaaatctgataagactgaagagatagcagaagaggaagaaactgttttccccaaagctaaacaagttaaaaagaaagcagagccttctgaagttgacatgaattctcctaaatccaaaaaggcaaaaaagaaagaggagccatctcaaaatgacatttctcctaaaaccaaaagtttgagaaagaaaaaggagcccattgaaaagaaagtggtttcttctaaaaccaaaaaagtgacaaaaaatgaggagccttctgaggaagaaatagatgctcctaagcccaagaagatgaagaaagaaaaggaaatgaatggagaaactagagagaaaagccccaaactgaagaatggatttcctcatcctgaaccggactgtaaccccagtgaagctgccagtgaagaaagtaacagtgagatagagcaggtacatttgcacttcattgggtagaagatatctttcattgttgtttcagataaataagtaggtaactgctatatgtactctttaatagtaggagaaaatgtgatgtgtcagcaccttgtgggttgggggataccttaggctgactgggacttcatcttaaaaattagcatacgacagggcatggtggctcagctaagagtactctgtcttttttatttttttatttttttgagacagagtctcgctctgtcacctaggctggagtacagtggcacgatctcagctcactgcaacctctgcctcctgggttcaagtgattctcctaccttagcctcctcagtaggtgggattacgggtgtgtgctatcacgcctggctaattttttgtatttttagtagaggcgggctttcaccatgttggccaggctggtctcgaactcccaaccccaggtgatctgcccgcctgggcctcccaaagtgttgggattacaggcatgagctactgttcccagcggactctgtctttaaaaaaaaaaaaaaaaaa

SEQ ID NO: 740 - DNA, 1083 bp, Homo sapiens
ttttcatgcaaagttaaaagcacattgtgcctccttttgaccacttgccaagtccctgtctctttcagacacagacaagcttcatttaaattatttcatctgatcattatcatttataactttattgttacttcttcatcagtttttccttttgaaaggtgtatgaattcattacatttttattctaatgtattatctgtagattagaagataaaatcaagcatgtatctgcctatactttgtgagttcacctgtctttatactcaaaagtgtcccttaatagtgtccttccctgaaataaatacctaagggagtgtaacagtctctggaggaccactttgagcctttggaagttaaggtttcctcagccacctgccgaacagtttctcatgtggtcctattatttgtctactgagacttaatactgagcaatgttttgaaacaagatttcaaactaatctgggttgtaatacagtttataccagtgtatgctctagacttggaagatgtagtatgtttgatgtggattacctatacttatgttcgttttgatacatttttagcttctcattataaggtgattcatgctttagtgaattcttcatagatagtatatataaaagtacattttaatagaaagccagggttttaaggaatttcacatgtataaggtggctccatagctttatttgtaagtaggctggataaatggtgcttaaatggtaatgtactccacttcttcctattggaagattaacattatttaccaagaaggacttaagggagtagggggcgcagattagcattgctcaagagtatgtaaaaaaaaaaaaaaaaaaaaagaaccaaaccactggaaataatcaaatgcaaaaaggtaacaaattcataactggaaagcaaagagaagaacaagtatgatttggatgataaagcattgttttaatggtgaaaacttcacagatcactaatgtttctagaggttaacttcaagtgggcaagctggggtttttaggtagtcagtggcctagttcctaaagccacagtataggatctgttaaactgaatgtctgttgaaagttt

SEQ ID NO: 741 - DNA, 1233 bp, Homo sapiens
tgccaagaactcagccacctgccaactctgccagagcagctccaggtgccagagtttgactgcagggcagggcccagtgtgagtaagtaatctgtcctggaccaggtttactgttatttggaaaccatttacaggaaagcctattatctctggtgccatctctggtgccatctctggggttgagggaagggttacttgctttgtaagtccaaactgctagcaatttgcatctcagtttttaggtctggagggccataagttttatgacagccttgtaccttctgtaagactttttgcttactttaaaaattactactggggccgggcccggtggctcatgcttgtaatcccagcattttgggagactgaggcgggaggatcacccgaggtctggagtttgagaccagcctggctaacatggtgaaacctcatctctactaaaaatacaaaaattagccaggcgtggtggtgtgtgcctgtaatcccagctactcgggaggctgaagcatgagaattgtttgaacccaggaggtggaggttgcagtgagctgacatcgtgccacggcactgtagttgggtgacagtgtaagactcggtttaaaaaaaaaaattactattgaccaggcattgtggctcatgcctgtaatcctagcactttggaaggccaagatgggcagattgcttgaacctgggagttcgagaccagcctgggcaacatgatgaaactctgtctctactaaaaatacaaaaattagctgggcgtggtggcatgcacctgtagtcacagctacttgggaggctgaggtaggaggatcacctgagctcaggagacggaggttgaagtgagttgagattgtgccactgcactccagcctgcatgagactctgttgcagaaaataaaaaataaaaaataaattactactgatagaaatgcatgcatgggcttgttacaaaatttagaagtagaaaagggtaaggccgggtgaggtgtaatcccagcactttgggaggctgaggcgggcggatcgtgaggttaagagatcaagaccgtcctggccaacatggcggaaccccgtctttactaaaaatacaaaaattagctgggtatggtggcgtgtgcctgtagtttcagctacagcgagggctgaggtggagaaacgctagaacccgggaagcggaggttgcagtgagcctagatagcgccactgcattccagcctggtgacagtctca

SEQ ID NO: 742 - DNA, 1105 bp, Homo sapiens
tgtggaggtcaaggctgcagtgagccttgttcgggccactgcattccagcgtgggtgacagagcgagaccttgtctctgaaaaaaaaaaaaagataacctctgtctttttcagtatcttgtacacttctcataggaattatctacatttgccaaactggttgtttcattatgtagccaccagctgtttgcccttacctaacagagattactattgtactgattgttctctgtacttagtgtcagagctattcagagatactagatgattttctttcaatgtatatgtgtatggcttctcttctcaacaaggggcttcgctccaatgttatcttgaacttccgtgataagtcattccacagctctttcaaaataagtacttggaatttttgttgagtgtataattatttgtgcatcttgaaatctgcttattctcttctttctttttaaaaaaatcattctcactgtcatcttatgcttcttctcttcttagatatcaatgatgtcaaacggctgaaacctggctacttagaagctactgtggactggtttagaaggtataaggttcctgatggaaaaccagaaaatgagtttgcgtttaatgcagaatttaaagataaggtaatatgtcattcagaactgtagctttaggctcatttgtattgagactcataatttaaccatattgttaccatctaaagattcacaaaacagaagtctggaaacataacacagtcttggtgtttatttattcactttaatattctcttccatttttagaataaggaaatgattcagaagagacaaagtatcaggctttggggaaatgttgataataggaaaataatacctttttatcattgtaatgcaaacctcttcaaattataggactttgccattgatattattaaaagcactcatgaccattggaaagcattagtgactaagaaaacgaatggaaaaggaatcagttggtaagtgtaaacactttgcatgtttaacacacaaagcagaccagcttgcagaaaaggttttaataatcataagacactgtactgttactttcacttagaaaagagatacaaggctgggtgcggtggctcacac

SEQ ID NO: 743 - DNA, 1140 bp, Homo sapiens
agaagcaaagccagacgtggctgtggctgtgttgggctggaagcccaacacactggccgatcccgtggctggggctttggccacacttttattcttcctctgaactggaaacaacagagaaaaccttaaatgcctggtttggggccatataagagataaaaagaaagccaaggcatcagcagccttgctggccccagttggccttcgtggcctcagtttccttatctgagaaatggggaaacatctactccatagtgattttgtgaggttggagatattgcttataaggtgccctgtgtagggtttggtgcatgcaagattcttgatgagtgatgcttctgatacagtgatggtgaagacactggggggcttagttgtagacaagagaggtctctggccaagtagtcaggatgatggtccagtcataggaatctctctccacaaggaatttcagtgagaacagaactggagagatccccaagtccacgtcttcacggatggggaccctgaggctcagaagggagaagtggcttttctgacctgcctccaggaagatgtagggcgagacctcagttcagggtccccgggtccccggtcaggctctttgccatggaagcaggtggtgtggtcacctgcttctcagctaatgctaagaggctgtttttaactggttgtgtatatatacctcaccttaccgcacagaggatttgtggagcttgtgacgcaggcagcttgggtagagcagtggaaaccacagtgggagcagaagcaactcagagaccctgctgggccgtggcttctgagaagtgaagctggatggctgggaagaacttgctctcttgccggtgcctccccaccccatcaggatgcatgccccattctgtctaattcaaggcctttctgtggaatgcttccttcccatggagctcagatttggctacctggagatttactctaacaattttggtggaatttggcacatacattgacattcataaagccctaggggttggacaagtgggtgactgacaggggtgggacatccatccccaggaacctgctgtctttgccctcccttggggagggggcctagaagcagctccatggtttggttcccactcaaaacctaccaggtttatt

SEQ ID NO: 744 - DNA, 1231 bp, Homo sapiens
ctttaaaaggggctgtttattttttctcatacttgtttattctttcatttaaaactttttttttcttaaagatgttaatgttagggcctaggtcacatataaataagacatagccctgacataagaaactcagagtctataaagagagacagatggataaacaggagtcctgtaatacatgatgtgtgtaagatggagaggaagaaccttttaaaaaagtgaggggtgggggtggcttcataaaggaagtgatggttggagctgagtcttgaaggatcaacaggagtgtccctggcagaagagaaagggcattccagatggcagaagagcctgtttacaggcagagaggttagagattatgctttcaacttgaattgtaaaatccttaaaagttaggattacatgggatttaaattaaattcctgggtggtattatatgttgataaccccttaaattgtttcaaactctttttaaccctgttttccaggaactcgaatcatttatgacagaaagtttctgttggatcgtcgcaattctcccatggctcagaccccaccctgccacctgcccaatatcccaggagtcactagccctggcaccttaattgaagactccaaagtagaagtaaacaatttgaacaacttgaacaatcacgacaggaaacatgcagttggtaagagaatggcgatgttggagacctagagcgtggctcttggaatttgaatgtctgtttgctgtaggttgagaagctattgattcttcagttttgttttttgttttttgttttttttgagacacagtctcattctgtcactgaggctggagtgcagtggcacaatctcagcacactgcaacctccgcctcctgggttcaagcgtttctcctgcctcagcctcccgagtagcggggattacaggcgcctgccaccacgcctggcaaatttttgtattttttagtagagacggggtttcgccatgttgcttaggctgttcttgaactcctgacctcaggtgatccacctgcctcagcctcccaaagtgctaggattacaggtgtgagccactgtgcctggccaattcttcagttaataactaatgttcagttatatgtctctaaggtttccctcctcccccaaaggtttcttgaaatactctgaaaaccctgaattctaaatcataaatctgatgtagttggtgggagaaaagaatccagaatcaggatgataaaccc

SEQ ID NO: 745 - DNA, 1161 bp, Homo sapiens
gcaactctggtagcgttaccctgtgacactgttttgaggtccacttcctttctttcctctgggaggaatgtcttctgtctttggtattatagttcatcttcccattcttttacttagtgcatttgtgcagatatttttaactctgtacatcagaagagagcccttggtaaccagttttgctcttcttctgccactcctccctgcttgcatctcgttgctggcagagtcctcttgtacttcaagaaagcaaagtgattttgtctgctcctagagcaggtccataccaagtaatagaggcactttagcttccacttggtgggtaaggcctgatcatagtattctgtcagataatgcctaagaatgaccgctgaagaacgttgacccatttgagtacccggtctcagtcgtcatttttaagtccagtgagcattgtggtagttgttcttagattgcagtttcttatgttttgagtttgaagttgattttcagaatgttcttagaaaagaactgcatttttttcctttgtggatctgctttgtttggctgctgggatagataagcatgggcttaaaaaatgtgttcctcccagttttcttgcctttcctgttgtactctgaatttctctccctacctccctcactttcttcctctctccttcctttccttcctttttctctaccaggccatttttcaaatttacatcaaagatacctgaagtgttggtatctgagaatatctgtcactcctcttatctgagaagtgaccttttatttttaagatgactacagacctatttttagatatgttttcagtacaattttgaacagcaactttttaattaaacatcttccagtgttaggaagttgagaaacgttcataggcaagtctgctgttctatgtcaccatcttttgtctcccctagtcccccaggagctctttcctttcccctctagttttgggtgtgcatgtttggagtttgtagtgggtggtttgtaaaactggaccattctgccttgctatgggttgttcaagaaagcctcattcttttctgtgaccctttcgcttttgcattcaccctccttcccacctacctgtcctggggctgttgagcagcataataatcccgggagaatgattcccctcatagaaagacaaaagcat

SEQ ID NO: 746 - DNA, 1947 bp, Homo sapiens
tcttgtttggatttatgctctgcctcttcccagcattttcttatctgtagccctgcttgcttgagagtatacttggataagaagtattgctgttgagggagctataagaaaaggattcttcttccagaagtaaagaactcatctttagagtacctttaaatgaattttgtttttctttcttattttgaggtggattggtcttctctttttttgggtttccagctcactgggactctcagaccttacctttccagctcaaacaccattagttaaattccttcattctcattagaatgcagcctgctgagtatgtgggtttcactgccggagtccatcatttagccagtatacatagaggaactgcttcgaatcaaggcaactggtgaagggcttagcatgttggcagcaatatcccagagattgaatctgtttgcattttcctcatctaggataacagctgcttgaagccagggctcttagccctttgcattccccttgagcgaggaagccacactgcctttctgtgtctggttcagagctcttccttcttggcatgttttctggactacatgcacatgggcagctatagattaatctgcaaaacctagtcacttacctacccataatatctgggaaggtgtggtatttgttttaaagaaacattgtttctttgggagggcagtttctgtctggactttgaggtggacttagttatccctacagttctttaactctcagcttttaataaaagatgaaatcagatattgatgcagttgggtcacaattctttagaatgcttctaccccagggccgcttcctgttcctagtcatggttttccagtttagtagtggagtttcttgaggctaacttacagaaatttctaactgaaaactttaagagttattgatacttgttttttcagtcagtcacttacatcacctagcctactctctggaatttaaatttatttctctaggctggtcctggaagttgataaccttttggcaaagcttagatttaggagaaggcttgagtccctgttcagcgggtctgtggattctctttgcttatggctctctgcctgcagccctggcagaccatactgtatgtcatggatacccagtggaaatattactgagatgaaacacatttccaagggtatttaaactctcactctgccacctttctaagggtgggaggctggcagagatgctgcaatgcttgataatcatttggccacactgaaatttccaaagggagctcttgccggtgcttaaaaccaaaactcctggacacttagaaaattccatgaatctagcacaaaatatccattcttgcccaagtgtatcccctttctctccagcttaatcttttttttttttttttttttaaagcccaggccaagggtacttttaactggaaactggggaggagggaagaacactagcagggagctaagaggcaggttgctgggtaagccatcctgctcctacctggtgcctgtatctacattgctgagtgctgtgcgccagtgcctttccttcatctgcagatggagcccatctctttccacctgggtgaggagaccctctgctactccaggggtaaaccttaaagaaggtgtcttgaagagcccagaggacactcacgtgctaaggtgtccattttatgcatctttaaaatattttatttaaaaaaaaaaatagccctgccctgtcttagtgccactaacggcccagttccatccattctgaatggaaaagcggagactgccagcactttccttggtcttccctttgtctcccatgatgtgttgttccctcatccctcccatccatttcactgtgtgtggatggatagcagagggtaccacgcagtccttgaggcagtcctgtgtgattccatgatcagttgtttttgtattttaactattcttccaaaccagc

SEQ ID NO: 747 - DNA, 1239 bp, Homo sapiens
tcagcttcccaaagtgtcgggattacaggtgtgagccaccgcgcccagccattttaacgatttttaattaaacactacagtggcattaagtacattcttgtagctgtgcaaccatcagcaccatccatctccagaagctttacatcttctcaggctggaactccttacccattaaacaatcaccgaggcttttaaaatagtggtttttggagatggcaggcagccctccttgagaagcgtgagggaagttgtaagagaacgtgagagaatgtggaacactctggggagaaggggcaggaatttgaggggagaaagcaagggccccggggcaggcaggcttagcaagctcacctccgggatgctgccagggctccgagagtcccctgcatgggctctttccttccttccacagccaccccagccccaccgtcctggcctcaccctctctccctgtaaggaaatggtgggcattttaacaatttcgctgcctcctgccagcagcagcccactcctgcaccctcttcagagacttgaagtgggtgacaactcctgacgggcgggcctgggggtgcagaaagggacttgtccatgggtctctaagtgtcaaatgtcaggtaggtgtgaagtcagagccaggagaccagcttctggggggtatgggaggtgttgagtgttgagagaaagcagggtttcattctcttcttgacccccttgggaaagaggccccctggggagctggagttagaatcacagttaaggcctcttctggtcctagaggttcccaccagcctttgaaagtcctggaatgtttagctggagaagcctgggggtgggggtatgagatggtgtttctcaaatatttgaggggcagtcccccgggaggaggtacctgtgctctggtggtcccagtggtggaggtggggggtgggaggtgaggggaagtaaaagaatagctggagagtgaggggagccactgagaagtggatgtcgggttcatgtgtggagaagggtgaaggacgtcctaacaccccgcacagttcgcggggaagcggatggcgtctgaaggagtgagatccccgtcactgggaggattcaagttaggcagcagtttagtagccgtatacaagagctctggagtcagagagggctggggaacactgggcaagttcctcaattgctgtgtgcctgaatttcttcatttgtaaaatgaggatagcaatggaacctgctctaagggtt

SEQ ID NO: 748 - DNA, 1325 bp, Homo sapiens
tggcaggatggtggaggtttctcaaggagctggagacttcagggagcccctctcatggggaggaaagagcttccagggggcgaacgcagcacagaggaagaggcctgctccacttgtctgggaacctgggcaggaggcacagaggaagccaaggcctggagctgcaggtcccccggcatctctctctgtcccggcagcccaggatggcctggtgcccccacctgctgcagcaggagccccaaggagtgctagctgagggtggttgctggggtggtcctcatggacagtgaggtgtgcaagggtgcactgagggtggtgggaggggatcacctgggttccaggccatccttgctgagcatctttgagcctgccttccggtgggagcagaaaaggccagaccctgctgagttagaggctgctgggatccactgtttccacacagcgggaaggctgctgggaacaggtggcagagaagtgccatgtttgcgttgagccttgcagctcttccagctggggactggtgcttgctgaaacccaggagctgaacagtgaggaggctgtccaccttgcttggctcactgggaccaggaaagcctgtctttggttaggctcgtgtacttctgcaggaaaaaaaaaaaaggatgtgtcattggtcatgatatttgaaaaggggaggaggccgaagttgttcccatttatccagtattggaaaatatttgacccccttggctgaattcttttgcagaactactgtgtgtctgttcactaccttttcaggtttattgtttttatttttgcatgaattaagacgttttaatttctttgcagacaaggtctagatgcggagtcagagatgggactgaatggggagggatcctttgtgttctcatggttggctctgactttcagctgtgttgggaccactggctgatcacatcacctctctgcctcagtttccccatctgtaaaatgggagaataatacttgcctacctacctcacaggggtgttgtgaggattcatttgtgattttttttttttttgtacagagcttttaagcattaaaaacagctaaatgtgagtgcacctggctgctaatatgtctttagtgtcagacagacgttctagaactggtacaacaggctgaggtccctgccccttcagagtaagggtgggcaggcagagtgagttgagagcacctgttcttggcacttccagctctagagcaggcgggtttttgcagacacgcatccccagttttgcctcaccctcttacactggatgtcaggctgagctcctccttgaagaaagcaacggaaccagcga

SEQ ID NO: 749 - DNA, 1131 bp, Homo sapiens
atttagtatcaagctcattacagaaccagtttgctgactactggggtagagaataggaaagattcaaatagagaagagaaatgacattgatattgggggtattagtgtgagttaagagagtgggacagtgattctagcagtcatatagaaattttagggctgaagtgacgatctagcttaaccctcttactgtataaaataggcacaagattgaaaatagtctcaaagtccactagctgttaagtggcagtggagtgctgctggagtgactggtacagaagccttgagggctgtagatgataataagattattgctgaagaagggcaagatccggaatgaccttgcccttgaaaaatgagagttgaagtacaaactaagaacagacttcttttctctctctaaatgtaatgtttttatttttcacttgtatttctagaaggcctttgagccctacttagagattttggaagtatactccacaaaagccaagaattatgtaaatggacattgcaccaagtatgagccctggcagctaattgcatggagtgtcgtgtggaccctgctgatagtctggggatatgagtttgtcttccagccagagagtaagtatgctgtctcctctgtaaaggtatagtggtgtgtcactagcctcaaactaattgctgagagataggactaatttattgccttttggttgtttttttgtttgtttgtttgtttttgagacggagtctccatctgttgctaggctggagtgcactggcctgatcttggctcactgcaacctctgcctcccaggttcaagtgattctcctacctcggcctcccgagtagctgggactacaggcacacgccaccacgcccagctaatttttgtatttttagtggagatggggtttcaccatgttggtcaggatggtcttgatctcttgacctcgtgatccacccacctcggcctcccaaagtgctgggattacaagcgtgagccaccgtgcccggccctggtttggttcttatttttaaaatctgtttaaatgtaaagcagtactttgtcttctgattggtcaagttataacaggactcttgtataactaatactccttacattgattttttttggatttgtagtt

SEQ ID NO: 750 - DNA, 1234 bp, Homo sapiens
tctctattagtgtgttcttctgcctcttcccccttgattcagctttcagaggtactatggcagttttgcctcaggtgctgaacatttctcagccctggctaaaagggagcagcacagggagagaaacaggataggaaagcagaatggcgagcagcctatggcccagggcctgtaatcccttcccaagactagctgctcagggtggtgcagggacaggaccagaccctgcgcctatttcctgccttctttcccctatagggaactctgtaggctgagccactgtcctgctcttatgacattatatcttgtgcctttctcctcagcagtgagcagtgagctactcctggcccaggccctaggggaaatggatcagtctttgaggtttctatttggggaggggagtacttaagatgagtcaaaagacactttcctctgttccattccccatctcagggactcctgaatattcagcctctccaggctggtgtcttctagtttcccccactgggaatgctggctgggagagccatgactaccagacttttcctcaggctccttggcatgttagtctgaattgttcttgagcactgtactactgacccaacaactgtgactagctggccacgccattcagggctggtgtggcatttatgtgtgtgtgtgtgtgtgtgtgtgtttttcctgtttgcccagcagtgcattgtgggttccaagagtgggtagtgtgtgtatgtgtgtgtgtcagagggagacctggcaggcacctctttgagagtagctgtggtcagagctgtttggtcagtgcattatgttgaatgaggtccaggaacccagagccacccagcagacaccactgtggcttgccagctgccaagatggagaagcatgtgcccctgtagagcgtctccccagaaccagaccccgagccactcgcttcctctgtgctgtgacaacattggtgccaggggagatggtgtttttcaaagggacctactgtagccactttaatttacaattaagagccttagtttgacttaacacttttgtaggcttttcattgtgtatttttgtgtatgtgtgcatatagcagctactctgtagcagaggtgggtagagacacttaatagtatcatgtcgcatgcagatgtcacatcggcctctgcaaaaactgtactgtcttgtttctgcattagacttaagtagtcatgtgaatatactgctatgtcacttttaa

SEQ ID NO: 751 - DNA, 1470 bp, Homo sapiens
aaagcaaaaaggcaaaggaaagaaagaaagcttcagaccgctagtaaggctcaaagaagaagaaaaacaccaaaaccacaagggaaaagaaaaacccagtttcttaggaaacgcaaacgatttattatccagattatttggataagtcctttttaagaaaaaaaaagaaaatgaaaaacaacacaaaaaaaatagaaaactcttttcttgagtgtggatgagaatgggcacgctcacacttctggccaggagtgaatgtgcctgtgtgtgtgtgtgtgtgtgtgtgtgtgtgtgtacatgtacgcgtgtgcattgaggagagagagactgaacagagagtactttgctgctaacgaatccatcttggactaaattctgacaaggcctcagtttccccagttgtgcagggagtaggtcagacagggttttcactgtctagatttagctggttagattttcctctaaaatcttaagcagatgctgaatccataaagccaaggagtgctgagggctggagtgggtgggccctccctcccacagccccagggagatacatctggactcctgggaatctggattaagaaagttgggatgaaagaggaggactgctcaggccagttgtgagccagggagaatgttccagtctggttttggtctggtggctcctagaaagggatgtggcccagaagtgggactcaaacagagagatgaagtaggggaggggagtcctccacgggcatctctctcctggcggctggatagctttaccctagggtggggccagccctgacaccctcatcccctcctcagcccagcagcctctagagcagcgtggtgctctcttgatggccaggaatccagaatctgcccttccccaaccttggtttctccttctgtaaagcagagtgatggctgagaagtcctctctagctgcagaagcctgagcttcccggtgtcagtcagctctgcaacgtgggagccttggaggcgggtggcctggctgtgcttcatatgcccaggagtggagaaggaggctgagaagctggtttcccagctctgatctccacaggcacctcctataaccctcctctcacccaccccgctacggtctgagagatctgaaataacctttcccagtgggcagggttgccagggttgaggggacagcacataccacccccacccaacctgttcgaggggccctgcatggcacgggatgagtccctgccctgtgcagctgcctggcagtggctgggacaaggatcttgcagccagcacagaggcctcttcaaaggcctctccctcttggcactccaggcaaggcaggtgcccgcttccccaacacctccaggcagtgaccctagggcatgccccagcaggtctccgagcagccactgggacccgtctcagcacatcctggcctttgaaagtctgatatcctgagaggagggcaggttttagggccgcagt

SEQ ID NO: 752 - DNA, 2059 bp, Homo sapiens
tctggccatgtccagctctttcctccagctaggctccagcccatctccaccgccagccccaccccacagctggttctgctgctgtcctggggaaatgtgggcctgcttctcaaggcccgagctggtgtgtagcctaactcaggcaaggaggttctgcctgggagttagtgtgcaggctgctagcaggacgctgggtgccgggtgcaggtagatgaagggtcctgagccctgcctgcgtgggtactcatctgcaaactgctgcaggcatctgctgctctggactcgtgccttagaagttcccaaaactctgatggccacgtgttccctgtttttaagtgagatcctgtcctgggtcttcagcatctggtgccatccagctgacctaggacaagagaacaggtcctgttttggggtgatatctgatacattgatgggccgggaacggagtttttcatccgaagactaaactcagcttcctctctcctaccaggctgtcgagcattgcaaacgccatgtgtggaactaggaggaggaatattccatcttggcagaaaccacagcattggtttttttctacttgtgtgtctgggggaatgaacgcacagatctgtttgactttgttataaaaatagggctcccccacctcccccatttctgtgtcctttattgtagcattgctgtctgcaagggagcccctagcccctggcagacatagctgcttcagtgccccttttctctctgctagatggatgttgatgcactggaggtcttttagcctgcccttgcatggcgcctgctggaggaggagagagctctgctggcatgagccacagtttcttgactggaggccatcaaccctcttggttgaggccttgttctgagccctgacatgtgcttgggcactggtgggcctgggcttctgaggtggcctcctgccctgatcagggaccctccccgctttcctgggcctctcagttgaacaaagcagcaaaacaaaggcagttttatatgaaagattagaagcctggaataatcaggctttttaaatgatgtaattcccactgtaatagcatagggattttggaagcagctgctggtggcttgggacatcagtggggccaagggttctctgtccctggttcaactgtgatttggctttcccgtgtctttcctggtgatgccttgtttggggttctgtgggtttgggtgggaagagggccatctgcctgaatgtaacctgctagctctccgaaggccctgcgggcctggcttgtgtgagcgtgtggacagtggtggccgcgctgtgcctgctcgtgttgcctacatgtccctggctgttgaggcgctgcttcagcctgcacccctcccttgtctcatagatgctccttttgaccttttcaaataaatatggatggcgagctcctaggcctctggcttcctggtagagggcggcatgccgaagggtctgctgggtgtggattggatgctggggtgtgggggttggaagctgtctgtggcccacttgggcacccacgcttctgtccacttctggttgccaggagacagcaagcaaagccagcaggacatgaagttgctattaaatggacttcgtgatttttgttttgcactaaagtttctgtgatttaacaataaaattctgttagccagatctgggcctaatgtttctgtgacccttcagctggaagagtttgttcctctctgatgagctctgagcccatgacacctttggggcccagcactcccatgacccatcttggccagagaatgaaagcaaagtggataaaggaagatcccacctcatcctccccaagactcagggccagcagtaggtcaggcgcacctgaaggtcggctctgctcttcacctgcccctgtccctgctccctagaggccagagtcagagcacgttgccagttccttgagagttgccttgatttttaaacaaaccattccagaaacttgtagtgagtaccagttaaacaaaaccaaggggaaactattgagggaataacttaatttaaaaaaggaacacacacaaa

SEQ ID NO: 753 - DNA, 1099 bp, Homo sapiens
ggccttccccactcccacctcaaacccaggagcagaactcagtatccagagcttacaaggagctgcaagggtttgccgagggctgcccagctctgcttctggtttcctggacaatttctctgtcagatacggcccattgtaaacccagagggctgcattttgggttgagtaatatggacaccatggaagtacaggatctgagtccaacattgccatgggggagggaagagtgtgtcctggcaggaagccaccattggagaaggtgaggccagtaaccatctcatgggattcgctataatcagcctatttgagctgctgggtctctgtcactgtggactccagtcattcaaggaggtctccactcttgggttttttttattttcttttcttttgctattttgcctgaacaccccaacactcttggttttagagtccaagagtaagttgtgcagagacatggttctaatttggagttcaaaggaacaccagctctgaaaacatgaccgtggggccaggatgtttctggcaggcccagaagtgctggccgttcttccccagcctccccactgctccctcctctgttccccatgtggaggtcggaggggctgggactggggagggggcagccacctccatccaaggctcttcctaggggccctgctaatgtggacagtagactttatccctccttcttactctgggccaagacctcccactccgccctctgaggatggtaccaagaatgggcctttgggacttctcaggacattgacaatgtgcacactgcaggttgacttaatttatttattttttgaaaagaagagacagaaaataccttattatctgcagggactcaaagctgtacccaaatcaagaaagacaaaataacaatagaaaccattcacacactccgttcatgcatggacaccagaagacgattcagaacacaagaggagaatgagctggagcgccagcaccacgatggccccaggacgttgtttaagatctgagatcccttggtttctctcttgttgatctgagatgctacatcagggcccttgctgctgtattacctctgcccgggtgtttgagacaggtc

SEQ ID NO: 754 - DNA, 2149 bp, Homo sapiens
tcccctcgggacctgtttataaattgaggaatggatgagggccctggagggtccttgggagtagttagtggagggcaggattctcaggtccccatagagagggaaagagaagaccagatgtgcatagaagccagtctctgtcacatacaccgcaggtggtcaccgagttattttccaaaagctgaggaacataaagcaaatttaggcttttgtccttctgcaatacatgcacttgaaaataaacagaaaagagatgtttaataacaagtttacttccggtctgctagcaccctcagcctgggagctactgccagaggctggcgtagtggggcagctgctgaccaaaccccacagaacagagggcaccaggcatcacacgacatctttccctcccatctctgccatctgtctgtctggcaatggaaggagcttcagcaggaggtccttcccagaaggttgattcttggcctgggtggtagaggagatatcctgaccctaaagtcttccagccccgggtcatcctctcctatactagggcctattgaccgtagaggccaggtgcggtggctcatacctgtaatcccagcagttggggaggccaaggtgggaggattgcttgagcccaagagttggagaccagcctgggcaacatggtgagaccaattgactgtagggcttgtcccttgctaagacaggagcagaagactggatggctgtgtcctcaaggcagtcccctcccatccccattcccaaagtcagaaagtgaagccagatctcaagggctgatacctgaggcaaggagagctaaggggagagaaattggggctgagtggaagcagatgcctgcacaagccaagtgtgtcttattgatctgtacaagctgatagaaggaccatctgctgaaatccagggctcctgagttggtgggtttgcttgtgaagcttctaggacaaggcgcagccagatggaagggagagggtccagggcttcctaaatgcagccgcatcacctgtcaactcgctgcagtttcagagacagtggaagctgctctttacctcaaaagcacaaagcagaattggcaacttcacttgtctcaagagctccaagatcctttggtctcgtgtcctttggcaccccgtaactggactggggacaaatttgttacgtgtttccaaggctacagacatggcgccatcctcacaggcctagctcatgtcatggatcaggtgctttgctggggggatacaatgacccatgtggtctgcgtcttctgccattggcttgaactgggcaccccctgaagtctccatctcagctgtatattctagtccaaattttcctggctcccctgctccctcccaggtcctgcacactgtctttttgccaacacctcagccctgtttgctatttcatgtctgcatggtacgagacaccccttcacggcatacactgccatggtatgtacatatgcatccacgtgtgtgtatgtgtagcatgtagctcattctgctcagcctctggcgccgttccacattgctcccagccccattgctgtcactgtcgtcccagatgtccttgccatggccacagacaatctgccgtctcctggaaacgctggggctgcccttcagagagctggcagccccagcagtcagggcctgctttgcagaatagaatgtgaacccaactcctgatggcctacttgacttatttaattaaagatgaaatcatgcaatgagcaaaacctgcagcgtgtctctgccttttcctttgcatttgttctcagcagcaattgggtcataatttttttttttttttaattaacagtggtagaaaggaggtgacttccagcatgaagcaggacagagaatccccctgcccattcccaagggaccaaaggcactaggggaatatggggcaggatgaatgtaccttgcgtcaccaggctggcagagctgatggggactgcgctgagcggagagagagaaaacccaggtatttgggggcagagacaggagtgttgggccagcggtcagggggcctggggatgagtcccagctttgccactgtctggctgtgtgaccttgcataagtcacttcccttacttggacaccagtttccttttagaatgaaggtgtaatcagttgt

SEQ ID NO: 755 - DNA, 1192 bp, Homo sapiens
aagtaggatgtcagtcaaaactgaaaggtattagaaaattatttgaaaggttatggttaattttaatttgagaggggtaaggggggaaaggagctgtcatatcaaaaaaaaaaaaaaaagcaaaaactaatttgtagaagaaagaagcaaccaactccagaatataagacaaggacactgaaaaggtattatctaatagaattccagtctgtagcatgatcttgcttataagctgggattcacgtgcttagcaaataaccaataaaattgttacattttggcccggcacgatggctcatgcctgtaatcccagcactttaagaggccaaggcaggcagataacctgaggtcaggagtttgagaccagcctggtcaacatggcaataccccgtctctactaaaaatacaaaattagccgaatgtagaggcccatgcctataatcccagctacttgggaggctgaggcaggagaatcacttgaacccaggaggcagaggttgcagtgagccgagatcatgccattgcactccagtctcatgccattgcactccagggcgacaagagcgaaactctgtctcaaaaaaaaaaaaaaaaattgttacgttttaagaagcacgagtgtcaattatctaaaggtaaattaggtatgattcagaggataacagtaactgatttatatttcagtcttcaagaaaaaatattgaggttaaactagatttgttcaatcagaaagaaaaagagagatataaagaactatgttaattattctcatctgtcaataagaatagagacaaggccgggtgcagtggctcacatctgtaatcccagcactttgggaggatgaggcaggcggatcacctgaggtcaggagttcgaaaccagcctggccaacatggcgaatccccgtttctattaaaaatacagaaaattaggccgggagtggtggctcatgcctataatcccagcactttgggaggaagagtgggtggatcacctgaggtcaggagtatgagactaggctgaccaagatggcaaaaccccatctatactaaaaatacagaaatcagccgggtgtggtggcatgtccctgtaatcccagctgcttgggaagctgaggcatgagaattgcttgagcccgggaggcggaagttgcagtgagccaagattgcaccattgtactccagtctgggca

SEQ ID NO: 756 - DNA, 1197 bp, Homo sapiens
actagccagttttctcaccttttgtttctattttaggcagaaatggaccttaagagactgagagacccattacaagtacatctgcctctccgacaaattggtgaaaaagattgatctgcaaaaagcctctgaatcctggcagaaggaacacctgtttgcctttttaattaaagcattgcaggtggaagctgggagccatgtggggggtagagcgtttttacctttaattataaaacaaaaacagaaaggatctgagggaagaagggaatgttaaaacctgaggatcaggcattgtggaatataagctcaaagggcttagtgaatattgtcttaaccaagtatctcagtttctggatgaaaatgatgcagttatatagttgagagattcataaagagaaaacaatgctgggggtgttcgtttcttgcatcttctttgcagagtcagcaaaagagtaacacaccagcaccccactcgactctatttgtttttaatttaactgtccctatttttgacataggagtaaataaatatactagaaaagcaaattctcatgatatgctaaaatatcattagcatttattttaaattggacccagtctctgcagagttaccaggaatctttccttccagcatccctttactgaccacctacctgtacctcttggttacactcattttttccatttgataattggaaccaacttataactgtttaataattgacactttagattatctcttaataccttcttaaatgtctatatatcccagtgctctggatcagtgtctaaaaatcactggcaacactgcatgaggttgttggttttgttttgttttattaattagtctttcacaggaggaataattgccctcctttatatacttatctattgataatcccctctccctccagaacacaaatcagagggaaagggggtgttcagctgtactaccaaatcaggaagatgtaaggtttacaaattggctaagaatcatggctctgtagccatttcaaccagaataattttattgctaatctgctttgtgtgacagcattccaggccagccagatgggactgccttgtctggaggctttgttcatctcgaaggacacacacttccacactgtttgtgagccctcccacctccacaacttcagttgtaaatcaagtgtgtggatctcaaagggtgcaatt

SEQ ID NO: 757 - DNA, 1165 bp, Homo sapiens
cttactaaaaataatcagtgctatctttcccacgttcttttcttatttctgcaactatggagaaaatagtccatgaaaagttcaagtaaggtaatattaaaagtgctctgaaacagtgctagtcagtgtggcttatagatgagctgccgtggggtttcttgtccacaaaggcatttacatcaaaataaaaataaactacatcagtaagtacctccttcatttaattcagttgactttttgtagcaagtctttctagatgaagaaagcagtgttatttacattatagtataaacttctaatctcagtgtaaaccagaacttttcagtagtgttgctcatttccctcccttgaacgggagggaatagagcagaacttatttccagcattctaactcatctgggggcttcttgaaagagtgtgtttcacttaacagagggctcacatggggaaaggcagcatgtctgggaaaagctgcacaacttgaagctgtcaccccaggctgctcccaaggctcagaacacgcctgctaattagtgaaggaaggttgtcctcatcatgaaaccagtctgcaaaaactgggagagatgatttttttttttaattcccatttttccagcagaaaaccacaaggcaaaaacaggaaaacacccattcaaagggagaaaaggtgacagaaactgtctctgaagaaacacagttattaaatacttagaacacctgtcttaagtatgctgaacaagctaaaagaaaacatggacatagaaccagaagtagtcaggaaaatatatgaacaaaatgagaatatcaacaaagagatagaaaaggagcaaaacgaattctggagctgaaatgtacaatacctgagttgaaaaattcacttcaacatcaggctagaattcagattgttccaacattaagatgtaatcctcataactgcaaagaaaatatgtatagaatatagacaaaaggaaaagggtatcaaaaatacgttactaaaaaaaaaaaaaaagggggtagggggagccagtaatgaggccaaaaaaaaaaaaaaaaaagaagctgccaggggcagcagcttacacctgatatcaacactttgggaagctgaggcaggaagattgcttgagaccaggaattcgagactagcctgggcaacatagatgcc

SEQ ID NO: 758 - DNA, 1264 bp, Homo sapiens
tttaggtttagacgtagcttatgaatgaggctagtcttttcctaaaataatcagatgaagaattcagtctgcatagcaggaacgttggaagttaatttaaaaaacattttaaagggatttttagaatcaagtttctatggagaaaatcggtatcctaagacgatatattcaagaagctgaaagtgaacaacctcaactatattttgtcttcatgtgaaatgtgaatacacaccccgtgatttttttttttttttttttttttttttagcttgtgagcgtaatttaagaatctgaaatgtgaacttcaaattttacttttttctttatgtgggaaaagagactttatcacttacctttaataaaattcatagtcagttttggttttgggacattgtgccttaagtcctgccattgtttttgatagctgatgacaaatgtttcttagatttacatagactaactaggaaaaggactatttctgtctcttttaaatgggtagtgctgtttttattgacattttgaaatgagttttattttgaagtactgaaaatcaggactttggtaggcggataattacattggccattttgtgttttggtaacttagatggtaaaacagttgaaaaatgtgtacaacttttaattatgccaaaaaaattagtgcaaaagactattgaaaaaaagttttatattgccttgtagtctgggttgttgcagatgaatcttggctttttggcaaggagctgttaaccttttctattagtgcagaataagttgtatactgaaaagcagtgtttttcagtagggcaattaagttcaaacggcatttattccagagatgcagcaagagctgggacagccataaagcttgtgagccttcctttctgtggaaggaatgctttattttacttagcaaccagttatcaactaggatataattattgctcttgaattgacctgtgagatacataatagtggttctcaaactattttaaggtcatgaaatcctttgagaatctgatgaaaggtgtggtcctatgtcagaaaatgcaaatacaccctacatggaattttgtatgtcacttcctgcccccccactcaagtccattcatgaactttattataagaacccctaaaaagtaagagatgtgaagttactctctaagggtatctaggtgtcttgaggcagtattgaatgtttctgaaaatcgagctgggcatgtaagtctgactggacttgtatatgtgggtgaccctaatacatt

SEQ ID NO: 759 - DNA, 1343 bp, Homo sapiens
ggggtttcaccatgttatccaggatggttttgatctcctgacctcgtgatccgcccgccttggcctcccaaaagtgctgggattataggcgtgagccaccgcccgggcaaatttttgtatttttagtagagatggggtttcaccgtgttggccaggatggtctcaatctgaccttgtgatctgcccacctcggcctcccaaagtgctaggattactggcgtgagccaccactcctagccttaatgcatattcttaaatatacaaaggtagatttgttatgaaaattgctttggggctctaataacctaccttttaagaatgagaaactgctgggcttaagggagttcagtatgaatcaagattgaaccattcaaatgtggctgtgatttctgcatatatcatagatgggatccttctgagaatactggaatagggaattaggacaccaagccaattcagctgtgaaccttattcttgtacttttctttcttgctggtaattttatggagcaggttaagaaggctgctctgtgttaggataaactgtataccaataatgttgacaacctgtaatgagtgttgcattttacttcttgtatcttttccttcctaccttgatgccagtaatctataagggatctttatagtttgaatgtatttgaataacttcagtatactttagttctacttttttatttgactcacaaccattcttaggtctcaagtattcccatgtgttttaaaagcctgaagtcagtgagatgaaattcaacatcaagaatttgaagtaacttgtaaggaaaaataatataaagataccattggggcagtggctcacacctgtaatctcagcactttgggaggctgaggtggaaggatcacttgaagccagagtttgagaccagcctgtgcaacacagcaagaccccgtctctacaaaaacttaaaaaattagctggctgtggtgttgctcacccatagttccagctactcgggaagctgaggcagtaagatcacttgagcccaggaggccgatgctgcagtgaactgtgattgttccactacagtccagcctgggtgacagagaaaagaaaaagaaaacattacataatttggctagagcataataatttgattttctggtttttgaaaatttgagttgcaataaaaggatatttcagtgtgcgatttcaattttccgtagcaaatgtatatatagaaaaatgttaaaatagatgtatttgaataccttaaaaaatacaagaaactggaagaaagataatattgcaaagcatctacatatatcctaggccttttgtgtacaaggttatttgtgacaattgta

SEQ ID NO: 760 - DNA, 1176 bp, Homo sapiens
gtgttcatcacagtagaggtcagggtacaaagtaccagtgcattgaaggttgtccactaggtcagttcaggaaaaatgtaaaaacagattttaaatacatggtacaaaaataaaaaggtataaaagcatatatggtgaaaaccaagtctgtcttctaccagcccttcagattcagtttccctcctaagaggtactcatttttccaatttttaaaaatcagccgaggccaggcgtggtggctcatgcctgtaatcccagcactttgggaggccaaggatggtggatcacctgaggtcaggagttcgagaccagcctggccaacatggcaaaaatataaaaattagccaggcatggtggggggtgcttgtagtcctagctactcgggaggctgaggcaggagaatcgcttgaatccgggtggcagaggttgcagtgagctgagattgagccactgcactccagcctgggtaacagagcaagactctgtctcaaaaacaaaacaaaacaaacaaaaaaacccagccgaatttatagtaagtttcattcaatttatcgttcataaattcctaagcaattctgatcaggctgccattcttttttggaaaaggtggactctcctgcctagcatttgttctcatgtactttcaattcatttaatggcaaattgttcttttcctaggagagttggcttcctttcttctgacttctgtatcattcattgattcattcttttaaataaatgcttattgattctgtacaagattcctagcacaaaaataaacaaataaataagtgcttattgagtgtgttctaggtattgtgctaggtgctggagctacaatggtgagttagatatagtccctgcttttatggagcttacagtctacagtgagggacggataaataaacaaacagttataatgtgttaaggatttgatcctatgggaacataatagaagggatatttaaatcaggcttgaggtatcatggaaggcttcctggaggaagcaaaaagaatatagcaagtaaaagggacctgagcaaatattaactgaattaaaagaagcttatttagtatggcaggattagaaagtctggcaaggggagatgatggagagtgttgacaagagaggatacaaagaatattatggaccacagacagccctgtatgtcacag

SEQ ID NO: 761 - DNA, 1220 bp, Homo sapiens
agcgggatgcctgggtccaagccatccagagccagatcctggccagcctgcagtcatgcgagagcagtaaaagcaagtcccagctgaccagccagagcgaggccatggccctgcagtcgatccaaaacatgcgtgggaacgcccactgtgtggactatgagacccagaatcctaagtgggccagtttgaacttgggagtcctcatgtgtattgaatgctcaggaatccaccgcagtcttggcacccgcctttcccgtgtgcgatctctggagctggatgactggccagttgagctcaggaaggttatgtcatctattggcaatgacctagccaacagcatctgggaagggagcagccaggggcagacaaaaccctcagtaaagtccacgagggaagagaaggaacggtggatccgttccaaatatgaggagaagctctttctggccccactaccctgcactgagctgtccctgggccagcacctgctgcgggccaccgctgatgaggacctgcagacagccatcctgctgctggcacatggctcccgtgaggaggtgaacgagacctgtggggagggagacggctgcacggcgctccatctggcctgccgcaaggggaatgtggtcctggcacagctcctgatctggtacggggtggacgtcatggcccgagatgcccacgggaacacagcgctgacctacgcccggcaggcctccagccaggagtgcatcaacgtgcttctgcagtacggctgccccgacgagtgcgtgtagtatctgttttatttgactgcagtctccttggtgcaaaaacaaaatgggaaaaataaggataactcagaatttcaaaaggaaatcacaaattcagctagtaatagcattttcagtacttttcataaactaagtaaatacacaaaatgttgatttttctgaccataagacatattttatgtccttttgccaaggtggatgtgttagtctcaggccctcctggccacattgcccaagtcacacaggcttctgtattatgtatttagataaaatgtgtgaaaatatatttgaaaaaaaagttcataaatatgcattgatttttgtacacatggcacctctttttcatttttatttttattttttttttggacgatgttttgctctgttgccccagctggagtgcagtggcatgatatctgctcactgcaagctctgcctcccggattcaca

SEQ ID NO: 762 - DNA, 1204 bp, Homo sapiens
tgtgaagtgtggggtggggcattctgtgccacatgcctgggctcccacctggggccagtgggcttcagtctgtaggtgactacagaaggaggaggagctccgtctgttctctcttcaggcagttgttgtgtctctcagcgcttgttgggttcacaacctattaaataagccagctggtcttcaccctcccagacaagtcaactcaggggaggcagcagggtgtgggccttgacccgcagccctagccggggccggggccggggccagggatggtgcccggggccgcgctgtgaggtgggcaggcgaggagcgggaagaccatctctgcaagtgcagcatagcctcggcctaggacagtgggagtgtgtggccaaagctgtgagcagaggcacaggtggtggcagacagtagaggcgccccatggggaacatactgacctgttgtgtgcaccctagcgtcagcctcgagtttgaccagcaacaggggtcggtgtgtccctctgaatctgagatctatgaggcaggagctggggacaggatggcaggagcgcccatggctgctgctgtgcagcctgctgaggtgaccgttgaagttggtgaggacctccacatgcaccacattcgtgaccaggagatgcctgaaggtaaggaggtgataggtgccatctaccctcggtttgcctctggctgctgctgtccccaaggttccctttacggcatcccccactttgagctcctttctgcttgtagccagctttcccgggggctggccaggaacaaaagctggctctgccttgaattcccaccccttagtctttcctcaccgagtccagtcagtttcttttcgcctcccctcccaatcgcccagttcttgctctctcatctcattctcccaggctggcatgggaccatttatttatggctcttgtcaaataagcagcagttgaataaatgagttgataaatttttataaatgattacatcttttttcttttctccctctatacatatagctttggagtttagcctttctgccaatccagaggcaagcacaatattccagaggaactctcaaacagatggtgagacaacagtgtctgtagctctgtttattatcctgtgggactttgtttaggcttctttgagctattctcttccttttctcaataaaaactcaaatatcccaacttttcagtacccatctt

SEQ ID NO: 763 - DNA, 1191 bp, Homo sapiens
aaggatagtctcgatttcttgacttcgtgatccgcccgccttggcctcccaaagtgctgggattacaggtgtcagccaccgcacccggcctcaaatacatttttttaatggccttgtctttcctggttttaggcccttttccacaatttctgatggaaatacagaaaccttgccatcattcttactgctggtttgcatctcatttatggtgtatctgggatttcttctcatgaacagaaagattcagtggctgttatatgccttgtcaatttaatgtattgccctatcctctttttgatcaaagatagagactaagactgggaattatgacagaaaaagtcatatttttctttaaatgattttgaaatgttaaaataggccaatatgagtcaaagtgcaaattttttggtgagtaggttgacaaaaaaaaaaaaaaatccaggaaaaaaagtgcaaatttttataggtcctaattcttttgtttgcctaatgaagtgttccctctattttattgtttttatatgctacaaagtcccatcttctgcagttatggaaacagtgtggctgtatgttttagtaattatttcataatctgtagcacttttcactttaagtgcaatgaatagtccagcttcattcactgtattactaatacgcttccctatgactttttttttttttttgagatggagtttcgctcttgttgcccaggctggagtgcagtggcgcgatctcagcttactagaatctctgcattcccagttcaagtgattctcctgcctcagcctccctagtagtggggattacaggcgcccgtcaccacatctagctaatttttgtatttttagtagagatggggtttcaccatgttggccagtctggtgtcgaactcctgagctcaggtgattcacttgccttggcctcccaaagtcctgggattacaggcgtgagccaccgtgcccaggtgcccccaccttttttttttttttgaggcagagtctcactccatcaccaaggctagagtgcagtggcgtgattttggctcactgcagcctctgcctcccaggttcaagcaattctcgtgtctcagcctccagagtggtgggattacaggcacgcactaccatgcctggctaatttttttgtatttgttttagtagaaacagggttttgccatgttggccaggctgg

SEQ ID NO: 764 - DNA, 1188 bp, Homo sapiens
ccgatccggatcccgagcgcgcgagggcggaagtggtggtggcccgcgcggccggaagtccagatcagctgatgggggaggcggctccgcagccgcctagaggccccagccgccgagcgcttcgtcccggccctaagtctcggagactggccaagatcaccgcttgcaccgcgctgttgggcgaggcccggtcccgtctctttcccaggcctgagattctcgcccggcacggccgccctgagcgccccggccacccccagccccggctcgcccctcaggccccgggcctcccctcaacccccggccggcggcccaggccccggatccgcggggggggacccggccccggggggtgcgggccccatggagctgatgtttgcagagtgggaggacggagagcgcttctcattcgaggattcggaccgttttgaggaggattcactctgttccttcatctccgaggccgagagcctctgccagaactggcggggatggcgcaaacagtcagcggggcccaattcccccactggcggcggtggcggaggtggcagtggcggtaccagaatgcgaggtgagagtgagctggggggaagaggagcggcaggccctgcttgggcctcgctcgggagctgtccgggaccaggagctgtccccgaccaagagctctcttcaaccaggggaagaaaggggagctgtccccggccgggagctgtccccgactgggagctgtcccaagcttagaacagacttcagaactcgcttttccggccttcctggggtgggctggcttctccacacctgtgtgtgtgtgggtgtgtgtgtgtgtgtgtgcgcgcgcgcgcgtgcgcgcgctgtgacagggagatcctgtggacagaaagtaaatctttcgtcactcctttgccttagagaggggataagggagaagaatcttgtctttgacttgggaatacttaagtgagttcagtctgaggcataccggaaagtagaggaagagaatgtgggtagggggctgattgtgaagaagtgaccacttgtggcttgtcaccgcattgcaaagtgcattgggagcttcttgcttcggggtgatgatctctgatcccagaagcaccaagaagggatcctacccagaggaaaatagaggtgaactggcctgccagagagtccatagttcataggtttagatca

SEQ ID NO: 765 - DNA, 1216 bp, Homo sapiens
ttctggggcatctgggcagggaggttgggcatgggaaagctaagggcccagctcttgattcccgtatcctggagtttacagatgattgttggtcctctcatggcaacattttacccattaatgtgctttcacacccatctttcctttaccttacaactcaaaggttaggtttatttctattttacagataaggaaatggaggcctacggtttagggaccaagatgatcactcaggatagaaaacttagggaaggcctcatacatctaagacttgaatgggagggggctgttaaattagtttggaactgggactataacctgggtcttgactcattttggtcagtatttactcagtgtgtgaagcactcactgctctgataatggactctaagcattgacactgacctctgatgattccctgggaatgagacagctctgagggagacattggaatctcatctaacaccttccatgtggtaaaggcctttcccccttaacactctgtgcccctctcttccaggacaacctgatgttggagaaggcctgcatggcagtggaagaggcagctaagggtgggggcgtgtaccctgaagtgttgtttgaggttgctcaccagtggttctggctgtatgagcaaactgcaggtggctcatccacagcccgtgaaggggctacaagctgtagtgccagtgggatcagggcaggtggggaagctgggcggggtatgcctgagggtagagggggcccagggactgagccggttacagtggcagcggcagcagtgacagcagcagccacagtggtgcccgtcatatcggtggggtctagtttatacccgggtccaggactggggcatggccactcccctggcctgcacccctacactgctctacagccccacctgccctgtagccctcagtatctcactcacccagctcaccctgcccaccccatgcctcacatgccccggcctgccgtcttccctgtgcccagctctgcatacccacaggtgagaccagtgttctgctggggggtaaggcatgggaaaatactgggaattcatagggggttggagtgggtactctgggagtataattggtcagtcggagagtcctggtgaggtggtgggagtctgggggacccagcccaactaaaataagaaatgacggccgggcatggtggctcatgcctgtaatcccagcactttgagaggccg

SEQ ID NO: 766 - DNA, 1223 bp, Homo sapiens
agaccctgtcaagcttctcactgggcccttggaaaggagctatatgccagaccttatgcaaaactcttgacctgtaccacctcagttaaacctcagatcttgctgtctctattttagaagtgaggaacctcttggccgggtgccgtggctcacgcctgtaatcccagcactttgggaggccgaggcaggcggatcataaggtcaggagatcgagaccatcctggctaacacagtgaaaccccgtctctactgaaaaatacaaaaaaattagccgggcatggtgatgggcgcctgcagtcccagctactcgggaggctgaggcaggagaagggcgtgaacctgggaggcggagcttgcagtgagccgagatcatgccactgcactccagcctgggcaacagagtaagactccatctcaaaaaaaagcaaaaaaaacaaacaaaagaagtgaggaacctctttcccaagataatgtgcctggctcactgtctcacctactttgggtcctaatcaaatgtcacctccttactgaggctttcttggactgccctactcaaatctgcactccccactttctctgctttttctacgcagcacttgccgtgacatctaacgtgctgttgagttttcttactgtccatccctcccccatacacaacccactagagtgtcagctccatgagggcagggatttttgtctgttttgttcgccactgtcttcctagcatcttgaatactgtctgtcacatagtaggcctcagtaaatatttcttttttttttttgacttgctctgtcaccccaagctggagtgtagtggcccaatcttggctcactgcagcctccacctcctgggttctagtgagcacatttggctaaattttgtatttttagtagagatggggttttgccatgttggccaggctggtcttgaactcctgacctcaagtgatccacccaccttggcctcccaaagtactggactgggattacaggcgtgacccaccgcgcccagccacgataaatatttcttgaaggaatgaatgaagctcgggtgggtttaatagcttgctggatgtggcagtgttgggctcaatccagggctgtctgacttcaaaaccgatgtgttgttaattgccatactccacagcttagaatcagaatgaggatcaaggtatagtcctggggttcagagaagacctgggccttgccgggaacacagggct

SEQ ID NO: 767 - DNA, 1244 bp, Homo sapiens
tccccagtagctgggattacaggcccctgccaccatgcctggctaatttttgtacttttggtagagatagagtttcaccatgttggccaggctgatctcgaaatcctgacctaaagtaatccacctgccttggcctcccaaagtgctgggattacacgtgtgagccaccatgcgcggccctctttatgtacttttaatagaacaacacataaatgtaaaaagcagaatgcagcgagtgaccatatatgatcctatttgtgtaaaaaagtggggaaatgtacatttttgcttctttgaggcctgaaatgttttatgaagacatttacatacagaggaaatacaacattggaggaaactcagtattggttgcaagtgggatggaatgagtgcatggaagatagtgaagggaaagagatttctcattgtatgcccttttggttttaaatatgtgtatatgcttgtgtaatatgtatgaatatatattatatatttaaaataaaattaaaaagaacaaaatatccagtcctttaagcctgatcaaaagccacatcaaacaggtcttgcccttcactgatatttattatatactgccttatgtttttttttttgtttgtttgttcgtttgttttggagacagagtctaactctgtcacccaggctggagtgcagtggcatgatctcggctcactgcaacctccacctctgattctcctgcctctgagtagctgggattacagatgtccaccactatgcctggctaatttttgtatttttagtagagacgggctttcactatgttggccaggctggtctcgaactcccaacctcaagtgatctgcccaccttggcctctcaaagtgctgggattacaggcatgagccaactgcgcccggccatgtattggcttattctgccaatgtttgtgtcttgccttagtaaagtatgctcctcgagagttagaatagtgctttttacatctttatatacatacctacagtgtccacagcccagtgctttttatgtagttgaaattcataagttggtttaattctacttgttaacaatgtaatactgctttaaacttgtggagtttctgtattacttcatttatcctcaaaagaacctggtgagataggcttttatttgcaggtgacattttctatgttttcaaatgagactgtataattctggctaagcattttaactttaagcagtttgttccttatctttgtaagttagtcagt

SEQ ID NO: 768 - DNA, 1150 bp, Homo sapiens
taataaaattttccatgaatgtgggatgtttttccatttatttggatcatctttaatttgttgcaacaatgttttgtagttttcagagtataaattttacactgtaaagaaaacttattcccaaatattattttctttttgatgctattgtaagtggaattcttttcttaattttatgttcagattattcattgcagatggcttagagatacaattgtgtgtggtttttgttgttttgtttttgagacaggctcatgctctgttgcccaggctgaagtgcagtggcacaaacatggctcactgcagccacaatctcctaggcccacctgattctcctccctcagcctcccaagtagctgagaccactagacatgcaccaccatgcctggctaatttttaattttttttgtagagacagagtcttgccatgttgcccaggctggtctcgaactcttgggctcaagcaatcctctggccttagcctcccaaagttttgggattataggcatgagccgctgtgcctagctcagtttgtgtgtgtgtgtgtgtgtgtgtgtgtgtgtgtgtgttttaatattgatcttgtatcctacagcctttctgaacttacttagctctaatattttttagtgggttctttatgattttctataaacaaaaccatgtcatctgtgactatagttgtgtttccttctttctttctaatttggaagcctttaactattttcccccttccttaattgctgtgactagtagttgtaatgtaacagtgaacagaagtggcaagaagagatgtccctagtcttgtttctcatatagggggaaaatatctaatcattcaccattaagtttgatgtttctctgcagttttcttagatgccctttatcagattgaggaagttactttctatttctgtttttttttagcgtttttatcttgaaacagtacagttgacccttgcacaacatggcgattgtgggtgctgacccactgcatagtctaaaatccatgtataacttttgattctcccaaaacttgtcaattaatagcctactgttaaccagaagccttaccagtaacataaagtcaattaccacatattttatatatgtatcatataaagaatatattattaagaaaatcatgaga

SEQ ID NO: 769 - DNA, 1335 bp, Homo sapiens
ctgcttttgaatctcttaaggatggatgtttgtaagatgttgcttaatacagtctggaatactctgtccatttgttgaattgtaaatgactttcaaatgtgcaagttctgttaaatacaaagagaacctctatgggtaacttttgtgttgaagaagtcatttgtcaaccatggtaaaacttgcaaacccactttatacagagtggattcttgaagctatacagaaaataaaaaagcaaaagcaaaggccctctgaagagagaatctgccatgcggtcagtacttcccatgggttggataagaagacagtctctgaacagctggaactcagtgttcaggatggctcagttctcaaagtcaccaacaaaggccttgcctcctataaggacccagacaaccctgggcgcttttcatcagttaaaccaggcacttttcctaagtcagccaaggggtctagaggatcatgtaatgatctccgcaatgtggattggaataaacttttaaggagagcaattgaaggacttgaggagccgaatggctcctccctgaagaacatagagaagtatctcagaagtcaaagtgatctcacaagcaccaccaacaacccagcctttcagcagcggctgcgactgggggccaaacgcgctgtgaataatgggaggttactgaaagacggaccgcagtacagggtcaattatgggagcttagatggcaaaggggcacctcagtatcccagtgcattcccatcctcgctcccacctgtcagccttctaccccatgagaaagaccaggtaagcgaaggagtaatgttcgtgcattctcactactgtccttttgtcttttacggtttcacttaagttttatgtggacaaaagttctgaataaagtttgataaaattgaatgttttgccttagagcaggcttttgtattttaaaatgtatatattgtactgcattgtgtggaggacttcctcactggttggccaagaatttaatggaagagtcatgtggtttgtttttaagctctaattgctaactggttggtgtctgaagggaccaggaaggataatattgatctttcttcatccaggcagggtcatatatatttcagaaatctacgaaaaggccatcgtatatttttctctttattactattttcaaagaagaatctacagacttcttattttactattattatttttttgagacagaatctagctctgtcgcctaggctggagtgcagtggcgcagtcttgactcactgcaacctctgcctcccaggtttaagcgattctcctgcctcagcctcccaagtagctgggattacaggcacctg

SEQ ID NO: 770 - DNA, 1190 bp, Homo sapiens
aagtgctgggattacagacgtgagcctccgctcccggccttagcacaaggattaaatgagatgtttatatggcgtttggcatagacactgtcaaagagtaaatgggcaataaattataacaatgatcattgggggctggctattggagaagagctggctctctccagaggaattcggattacctccttctaggccctaaccccatttactgatcccacaggccccgccccggctccgctagccccgcttcctcctgtcgctttggcctccggcatgacgcatgcgccctcgggctcctccgcggcagcatctcggttctcctctcgggcccatctggagcctcgcgtcttttccagtgtgggccccgccccctgccggtagaaccccgtccccggccggtagggccccgcctcccgaagcagttccggttcggctccgagcagctgccggcgcggcggtgacggcggccgggacgatgcctgcgcgcagtcgccaccgcccccgcctccactccggctccccgccccgggctccgcccccgccgcttgaggcgcttcactccggcgaggcggggagggccccggactccgacggcggctcggacgccgactcggaggtgggtccggggagcccgactcggaccgcggaggtgagcgggagctgaggctgaggagaggggagcttggggggcgcctgctgccaagggtgagtggggagtctgggatggagccgggggctgccgagggaccgcgacctggaggggccccggggagacggttgagggaaccgggatagtcagctctggaatggaatctgaagcaaatggaggttgtcgaactgagggcctgaaggctgagggataagtggaggccgaggaacgagagggagagagcgagagggggaggcttgaagagcccagagcttgggggcttttgaaagctgcgcagtgggggaaaaagatcgaaggtcctgcgggaatgtggacccggaagaagagatgctctgggtttggcagcggggatgaggagtcagaggagcaagacctgggccggtgttcccttcccagggcgagggagggcgatcggggctgggactggagccctctcatggggttctcctcttacggagccctcttatccgcctcccaccccgggtggggctggtggtgatggagggcaggatttaggttt

SEQ ID NO: 771 - DNA, 1133 bp, Homo sapiens
tttcaaaaccagcaataatgaaaagactaattggatgaatactatctttctaatgaatttgtgattaaatatataatagttgttgaaaatgagtaactttgcgttctccccctaggttgttcttagatgcctggcttatgtgttgacaaagtaaagttttctgttctgagcaaagttatgattataaaaagcaagaaagaacaatcaagagtccttatgtagctatttgaacagaaagcttaagtagatgttttctgccccttctctttaggaagacttaatgttgtgattgaagtcaggctgtacccttacctgttgagtatttgcttattgaactttaaacaagtcaacttgagcagtttgctggttgaggaattttcattgatttccagtagggctctagtcaagaaataatatgttttgaagctccttattacctttagaagaagaaaccctaacaagtgacagtacttgttctttggactaatctttgtttcattttaaaaaatgcaaccctgggacatgatctgttttactgacaaagagtttttgccttctgaaccatctttaaatatactgagcataccaggatgcctgaaataagaagagaatgaaagaggccatagatgacgtgacagagtactggctaggatgccattggtctcctcattaatgcaaatgtagggctggcatatttcaccaaagatgcaacaaaagatgcagtgccagtgtgaccctcagtgagtattcatgagggaaaaatggctgcatccataaaaataaatgggcttaatgttagtggtataggtacccagaataacttctttgtgctatagttgttagatgacagttcaattttatgcttttttaatggtgttattaaatgagccaaataggagtgttttaccagatgttagataaagttcttaatgccgttaagtagggaggtatgcatgcaaagaattgttttctcctgaaaagaaacttacagcacgcaaaatataactttttggtttttgaaatttatcattcttggctgttggaagtaaacagtctcagacatacttggatatgaaaaagtttcgttgttttttacttttaaatataatggtgtatatacattctttctattt

SEQ ID NO: 772 - DNA, 1096 bp, Homo sapiens
gcagcttgggacccctgtgtcatttaatgactcctgggaattagtttggaaatgtacctagcctttcccacttcagtaatgttagctgccactccaattcagcagtacccagaagcattgcttaatgctccttgtgatattaggaagtatatatttggttctccttccctctcctggcatagaactcctaaaaaatccttggaatcccgaaagtattaagtatctttttgtatgctaatgagttttgactggtggctggccacctttaggtagcttcgggctggaggctagtcagtggagagaccaaggtgtgattagagggggtggggagaggggctgtaggtttaattgttcaccaatggctagtggtttaatcagtcatgcctgtataatgaagcctcatgaaaacccacaaggacagaggtcagtgagctaggtagctgaggttactggaaggtggcatgtctggagagggcattgaagctgtgtcccttcctatgttttgcactgtacatctcttcatctgtatcctttgtaatatcctttattaaaactggtaaatgtaaataaagtgtttcttgagttctgtgacctgctctaggagattaattgaacccaagaaggggcttgtgggaacctctgtttagaggtgccaggtcagaagcagagttaaaacaacctggggcttgcagttggcatctgaagtgggaggagggcagtcttgtgggactaagcccttaacctgtggcatctgatgtctccaggtagaattagaggacatttagccagtgtctgctgcagaaattattgcttgcttggtgtgtgaggaaagccctcacacatgtggtcacagaagcattctgtgttgtgagagaatagtaggagaaactgagttggtttttttctgtatcctcagaattgatgtcaggattgggatttgctagagtggctctagctagagtggctcatcgaagcatggtttaggaagaaaaaggataaatggatgggaaatgaggaacttttgactcctgggtggtcagatggtcacccctgctatggagccacaactgtgctgtgctcaggtacttaaaaatta

SEQ ID NO: 773 - DNA, 1200 bp, Homo sapiens
aggcggtgccccccatggcgaggccggcgagagcagtgcctgcttccccccgaggacagccgcctgtggcagtatcttctgagccgctccatgcgggagcacccggcgctgcgaagcctgaggctggtcagcagggcgcgggacggaaacgggcgtccctctcgacccctgcgggtcccacgtggctgtgtgaccttgggctgggccctggccctccctgggcttccggcttccctgggccgggtgcggtgggcgttccgaagggccagtcccccaggccacgcccagaaccgcgcccctggggcttgggacccccagggcgaaggtgggtgacctgcatggctggtgccaccctctcctttcacgcagctgaccctggagcagccgcagggggattctatgatgacctgcgagcaggcccagctcttggccaacctggcgcggctcatccaggccaagaaggcgctggacctgggtaggggcacgcggccgggatcccggagggccgaggtttccgggccgacccccactctgggctgagcccgtctgtgtcctggtcccaggcaccttcacgggctactccgccctggccctggccctggcgctgcccgcggacgggcgcgtggtgacctgcgaggtggacgcgcagcccccggagctgggacggcccctgtggaggcaggtgagcgcccgcgcctagctctgcagccccaggcgggggcgcaacggctgacccgctccctccgcaggccgaggcggagcacaagatcgacctccggctgaagcccgccttggagaccctgggtgagcaccgaagcgggaagggctttgaagccattcattgcaaacgaggctgctgtgtggccgagctgtgactgggcctgccgggcaggttaagggcagggccggttgtcacagagcccgggccggcctgggaggggcctcagggccgccggggccgcggactcagccgcacctgccctccctccccccgcaagacgagctgctggcggcgggcgaggccggcaccttcgacgtggccgtggtggatgcggacaaggagaactgctccgcctactacgagcgctgcctgcagctgctgcgacccggaggcatcctcgccgtcctcagagtaagggatccactgcgggggaggagaaagcaccctgtcgggccgggtccccatcttttcccttgact

SEQ ID NO: 774 - DNA, 1157 bp, Homo sapiens
gtcacccaccttcgccctgggggtcccaagccccaggggcgcggttctgggcgtggcctgggggactggcccttcggaacgcccaccgcacccggcccagggaagccggaagcccagggagggccagggcccagcccaaggtcacacagccacgtgggacccgcaggggtcgagagggacgcccgtttccgtcccgcgccctgctgaccagcctcaggcttcgcagcgccgggtgctcccgcatggagcggctcagaagatactgccacaggcggctgtcctcggggggaagcaggcactgctctcgccggcctcgccatggggggcaccgcctccctgacggggagagggtgttggattaacctgagccacgccgcgccctactctgcgcccgcccacccgcccgccgggaccaggtcctgctcacccaggaagaggccagtggcgaaggcggcgcccagtgcggctgagcccagggccagcgcggcgggcacggagagccggggcaccggctgggtcatggcgcgggcaggaggcggcgggaggcagtgacaggtcacgtgagctggagctcctgggacaggtctcggactcgcgggcccgccgggctccaccttgtcggggcactacccgcggagccgcggtctcgggcatcatctggcggccacacagccttactgcaagccccgcccgagagagccgggcgcgatctggtggccgcgccgggaactgcgcccctgcggggagcaggccaagcgcctagatctgaattttcccgcctgtgcccgcagtccaggtgcctgcctccattcccctcctgccaatgcttttttctcctcgccaccatttattctgaggccccttgggggcatatgtgaattgtgtatggagggcgccagtgtaagttacaagatagtcacaagtacaagagatagagattaaagggggaaggcctcctggacaagatgccccaaagcatcaggctgaaggagtgagggaactggtttgagggcatgcagcctcgaattggggttcaggagccctggggtgggcctgtggaactgagaccatattcttagctgttaaaatcctgcttttgggggccagatggatacgagtgtctaatcttggtcctgccagtctctctgagcctcagt

SEQ ID NO: 775 - DNA, 1178 bp, Homo sapiens
tgattggaaggcggcaaaggctttaatctcccccttggtgcagctgcttttgaagtgagtttcctcgccagagccccggctggacacgcagcggctcgcatcgcagagcgcagcgccggcgcggggccgcgagaacgcagcgcaggggagcagcccgaggcggacaccgcgagccgcccggcactcccgcagtccagccggctcctctagcccggccacggctccgctgcgggccacccaggattactcgcgtctggctccaggcgccgagaaggcgcgctgggcgcccgtggccgccgcgccagctcctcctcctcccgctgctcctgctcccggggcgagcgcgcagccccgagcccgccccgcgcctcccggagccctcccccccgctgctcccatgcgcgcgggtgggtcatgagcacagcgccctcgctttctgccctaagaagcagtaagcacagcggcggcggcggcggcggaggcggaggcggcggtgcagaccctgcctggaccagcgcgctctctggaaatagctccggccccggcccaggctcgtccccggccggcagcaccaagccttttgtgcacgccgtgcccccctctgaccccctgcgccaggccaaccgcctgccaatcaaggtgctgaagatgctgacggcacgaactggccacattttgcaccccgagtacctgcagcccctgccttccacgccggtcagccccatcgaggtaaggaccctctctctggatcgcactgggaccactaccctggctgccaccctagggctttctttttctcgggatctgggcggaggtgggggggtcggagtgattcagctcccgaatgggggaagaggctactgcttccgtacctcaaaactagggcggaaaagggggaggaagtggaatggggcgtgcatgctagggagcaaggctgccaatacttgtttctcctttcgatatgaaagcccctaccccgacccaggccccttcactcggcaccgaaggcaggcggaggtctgaaatacggttccaaagtcgccgtccttcgtatccgcagaagccagtgtgtgcacacagcctctgaggcgccagccgcccgagcccttactctgaagaattaaggagtgtttgtggggagggggtacagttctgggtctaggaaccgaaaaccaaaa

SEQ ID NO: 776 - DNA, 1199 bp, Homo sapiens
ggattccaagaagctaagaacatgaccccaggtgggacagatgggatctgagtccaaatgtgatgttcttttccttgtattcctctccttcctaactgtatgacataaacgtaaagtatcacaagagcttatgctgctcctcttcttggtaccaagctcggccttcactttcttatgaaaaccaaaagcagttttcaaagaatcatgcacaacttatatttgggtgattgatctgatttggcatacattttgtggagaacgtgaaccagtctattccccagtggagggctgttgataaacaaagagatatgtagtctttttagcatttcaagggctgtgagtctcctgagaaaactcaaaccaggtccaagaggagttactttgagacaagctatctaagaactgcaatatcctctgtggggaaggtggctttcgttgtaatggttcttgcaaatatttcttaaaccaaatagggttttcttctggggaacactgagatcaactatttgcctatttgatcctcttgcagttaatgtaacaggtttaaaactctggtctcagcagaaggggcttcattccgagctatgggggctaattctgtgcagtgcagtgtggggacagagcatcccactttccacagtttggtgaggcactggcccttagaggagagtttttgggtatacagctaattgttctaattatgtagtagtaaaaatcataccgtcctgtagccgcatatgaatagtgcactagagtgctttcttaaaagagttgggatggggttgggagggtcaggaaatgaagggataaaattattgttaattccacccccttgttataccatcaagagaatagaaaccaataaaagaactaaatgttggcaatccataaaattccataagcagtaataaacaaaagctgaaactgtattgatatacaaccaaacaaggaaattatcattattttttaataaagccatttatcatcaataaataccaaggggaataggaaaaattacaagcacaatgccatcttccataattatacctattaacaatttaaagcataattatgtgagggagaaaaacttttaggaaagctttgtgctgttttctccacagaaaagtcaaattctcacactcccagatattcaggattttctaaacatttcagaatgattggttatgcttgtcccaact

SEQ ID NO: 777 - DNA, 1183 bp, Homo sapiens
tattcataaaatcttttcccagaccaatgtcttgaagtgtttcccctgttttattctagaagttttatcacttttggcctcatatttaggattttgaatttatttttgcataggatgagaggtagctgggcacagtggctcacacctttaatcccagcactttgggaggtcgaggcgggtggatcacaaggtcaggagtttgagaccagcctggccaacacagtgaaacctcgtctctactaaaaatacaaaaattagccaggcgtggtggcacgagactgtagtcccagctactcaggaggctgaggcaggagaattgcttgaacctgggaggcagaggttgcagtgagccgagatcatgccactgcactccagcttgggtgacagagtgagatgtcttaaaaaaaaaagatgagaggtgagggtctagtttcattctttttcatgtgaatatccaattttcctagcaccatttattgaagagactgttcttttcctaaaaagtattgttggcacctttgtcaaaaatcagttggctgttgtacactcttcacaatagtaaaggcatggaatcaacccgaatgcccatcaatgacagactggataaagaaaatatggtacatatacaccatcgactactatgcagccataaaaaggaatgagatcatgtcctctgcagggacatggatggagctagaaaccagcaaactgatgcaggaacagaaaactaaacaccacatgttctcacaagtgggagctgaacaatgagaacacatagacacagggaggggaacaatacacactggggcctgtcagggcgtgggcagcaggagggagagcatcagtaatgcatgctgggcttaatacctaggtgatgggttgataggtacagcaaacctccatgccacacgtttacctatgcaacaagcctgcacatcctgcacgtgtatactggaacttaaaataaaaaacttaaaaaaaaatcagttgactgtagatatgtggattaatttctgtgttctcaattctgttccattggtctatgtgtttttatgccagtaccatgctgttttggttattaaaggtttgtagtagattttgagttctggtagtatgatacttccagcttttttcttcgttccttgtgctcagtattgctttggctatttggagtttttgtagt

SEQ ID NO: 778 - DNA, 1412 bp, Homo sapiens
tctgtccgtctatgaacatgcgggggaaggatccggaaccaggacccagaagcacctcctttgtagacagagggccacggctgcgtgcgatccaggcccaggcccacacactctgcccgtgtcacacgtgtgctttaacacaaaacagataacactaaagacgggttcagcacccacctttctttagccagctgatcagagatgctgcaaagagaacctttcggatcactcgtttacaagccttttctaagtatttggtggtttatgtttacttgaacggctccatgttgccggtgcccagcccctgtcccctctgtcaaccccctgtcgctttggtgttggtttcgttcccgtcttcagcaaaacgaccttggaacctcaatgggggctgctttgctttgggaggttcttgttggtgggaccagagctttgacaaacctcctgctccttggtggcacctctcctggaaggacgtcacaactccaggtgctcagactgcctgtggcagcagaaccagtgcctttggcattttcctcccacaatggggaaggtgactttggcattcttacaaactcgtctctcggcctttctctcctgccttccacagcctctcgtttctcctccatctgtgcttattacttgaggactgtgtctgctccgtgagagctgcgtgggcagggctgcagtggggtccaggtggtgttcagctgtgctgatgcctgccattgggtcctccttaggctctgtaagtcgtgacagccttcatcagtgcaatgtttgcagggtaattcttaaactttttagagggtggcaggtacatcagttctttttgatatgaaaacattcatgtttcagacattgaattgagagcttttaggggaagcataatggttattgtcactatcaacagtctaaaaagaaaaactgaggtctttttaatcttgattacagcactcacggcatgcaccctactcagtgtgggtgtcttcgtttgggggctttttttttttttgcacttctgaggctagatatgtctggctgaagatttgatgtggttcctccttaagctatgcgtcctgttaataataggtactgtactgggctctgtgtaagtgtcgttggggtaggacctatattttaatactgttcctaacatttcattttactagcgagaaatctttgatttcattttattctttgtaattctagacactagattgtagtttagccataactgatgttttttaaaaagggatatattttcttgcacagttgttcaaaaaagagacaagtttcagtcctcaatgctgtcctttgttttacaggtacaagttttctagctcagacaaactatgaaaaactgtagactattctcaaggtattaactcgcagaccctctgggggtaggggct

SEQ ID NO: 779 - DNA, 1197 bp, Homo sapiens
cctcagagctcctcgtggagtggccagaacatttttgaaaatatcaaagactctgataagatgctgagttttcgagcccatggcccggaggtccaggctcataacaaacggaacttgatacagcacaataactccacgcagacagacatcttctacacggacaggctggaagacaggaaggagccaggccccccaggaggcagcagctcctttctgcataagccattccctgggggacccttgcaggtctgcccccaggcctgtcccagtgcctctgagcgtagcctgagctccttccgctcagatgcctctggggaccgtggctttgggctggtggacgtgcgtggccggcggccactgctgccctttgagaccgaggtgggcccctgtggggttggggaggcctccctggacaaggcagactctgaaggctccaacagcggcgggacctggcccaaggccatgctcagctccacggcagtgcctgagaagctctctgtttataaaaagccaaagcaaagaaagtccatctttgaccctaacactttcaaacgcccccagacaccccccaaaatagactacctgcttccaggtcctgggcctgctcactctccccagccctccaagagggcggggcctctgacacccccaaaacctcccagaaggagcgactccattaagttccagcacaggctggagactagctccgagtcagaagccactctggtgggcagctccccatccactagtcccccgagcgccctgccccctgacgtggaccccggggagcccatgcacgcatcaccccctcgcaaggccagggtccgcattgcttccagctactaccctgaaggagatggggactcctcccacctgccggccaagaaatcctgtgatgaggacctcacctcccagaaggtggatgagctggggcagaagcgtcgccggccaaaatctgctcccagttttcggccgaagcttgctccagtagtgattcctgctcagttcctggaggtatagctgagccccagggtgtggggaggggaggcctagagaggggcagttggccgaaggagggctgctaagtggccctgcaccagtgtcccaggcccctgtttagcctggtgcctttgcctttgctgttggactcaagtgggaagtggcccagctaggaggtaggtaagtggcgtggaagtg

SEQ ID NO: 780 - DNA, 1199 bp, Homo sapiens
cctggcccatatgtaattttaaatctagtattggccaggtatggtagctcacgtctgtaatcccagcactttgggaggctgaggcaggagtactgcttgaatccaggagtttgagaccatcctgagcaacatgtcaaaaccctgtctttacaaagaatacaaaacattatccaggcatggtggcacgcacttgtaatcccagctacttgggaggctgaggtgggaggatcacctgagcctagggagaaaaaatgagaaattaattttaacaatgcattttatttaacccaacgtacccaaaatgtcatttcaacatgtaatcaatataaaaatgactgagatattttacactcttattttcatactaagttttccaattccagtgtctattttacacttagcacatagcgagtttcacatgctcagtagccacatagcctaggggttggccattcagctcctccatttactctccaagaactttccagtaaatgcttcctggggcttaggctaaccagaaatgattttctatttcctgctagcctggccccaaccctgagacctgtatgaaggtggatagtccacactcagaaaagagaagcaggatggtagtcatggaagctggaatctgccaaggagtatggaacaactcaccagccaaatgaactcgtcctaaaaatatggatctaatttttttaaaaaagaaaaggccaagtgcagtggctcacacccataatcccagcatcccagcacttgggaggccgaggtagatggatcacttgaggtcaggagttcgagatcagcctggccaacatggtgacaccccatctctactaaagatacaaaaattagccaggcatggtggcatgtgcctgtagtcccagctactcgggaggctgaagcatgagaatcgcttggacctgggaggcagaggctgcggtgagccaaaattgcgccaatgcactccagcctgggtgacagaagaagaccctgtttcagggggaaaaaaaagaaaaagaaaggaaagggaaaaaacatgaagagagcccagtgtatccagacccgagtctcatcaccttctcaggaagctttttgggttgtccaggccttaagtaggcctgtgcttccaaacttcatttctgggaggagtgccagtgggctggggaagtcggaggctagaagaagcctgttcttgtacc

SEQ ID NO: 781 - DNA, 1225 bp, Homo sapiens
agccacagcagtttttaccccagagaagtgattctcaacccggagtgatttttctcctaagggaacagttggctaagtctggagacatttttgattgtcacaactgggaaaggtgggaagtgcttccggcatctagtggttagagggctgggatttttatagttattctaaaacatacagtccccacaacatatccatatggaattatccatatggaaatatcagtagtgctgaggttgagaaaccctgccccagagatacacataacctagtgaagtaagttgtacagattcatgtgtaaaaccattgtgttttcctggtattttatgtattccttaggtgtatcctgtgagtttggccttgcccagtgggttttatttactttagttcgctacatgactaatggctacaaattggactgcaacattctaggtcttggaaaatcacagcaaggccaagaaaagttggagtagttttattaaccagagtgtttatgttttcagaacgacaccgtaactatccgcactagaaagttcatgaccaaccgactacttcagaggaaacaaatggtaaggaagggcacatcaatctttgcttaattgtcctttactctaaagatgtattttatcatactgaatgctaaacttgatatctccttttaggtcattgatgtccttcaccccgggaaggcgacagtgcctaagacagaaattcgggaaaaactagccaaaatgtacaagaccacaccggatgtcatctttgtatttggattcagaactcattttggtggtggcaagacaactggctttggcatgatttatgattccctggattatgcaaagaaaaatgaacccaaacatagacttgcaagagtaggtgtcttttcatttgttgatcagctcctgaagacctattttttcaatagcgttgtgttgtgagtgtggtaaaaagggcaagaccaagcaatctgggatacaactctgaaaggattaagagaaaaagttatttcataaaatgcacaggtggagtacgggggttcaaaattgaagtctgacatttgagctgagttcagaagggcagctgaagtagtgttcttggagatgggctaggggtaaggattgttttccagaggagaagtaaggggatgtgtttggaaaggtagcctggcaccaaattcacttagtttggattaagtctgcatctgggcttaaacccataggtagtc

SEQ ID NO: 782 - DNA, 1163 bp, Homo sapiens
gtaaagatacagaaacagtcttgtaggccccaggaacagcaagtgcaaaggtgggcagagtggagatgagtagatccggaatctccatgatgtgggggttgtaaatgcttgtctgtcataagggagtaatggggagttgaaatgggaagagatcccctcagccacttcggaggtgccttgttttggtagtgcaaaagaagaaaaaatagtgatctgtgagctcaagtctggacaagaacagccagtctcccaaactccctgttgagagaatgttgagtggaccatttgtttcctgtgaggctattccatacctaaaatcccttgatgatcctttctgttccagcaaaaacatgcattaaatgtacttgaaaagttttggtttagaaagctgtgtttcttaagctcagactgggtcagtttccctaccagagtggtgggtaatgattttaatgtttacaagtcacctggatgtactcttttctcattcagcatggcctgtatgagaagaaaaagacctcaagaaagcaacgaaaggaacgcaagaacagaatgaagaaagtcagggggactgcaaaggccaatgttggtgctggcaaaaaggtatagttcattaaggaaaatatagaaacgtcattaattgtaggtctttagtttctaggaaagaagggatcttattaatttttaaaataacttttcttaatgtttcttcttttccctcttcttctggattacagaaggtaacatgttttaagaaactatgtagcatagtgtcttaacacctcagtaaagtagcttggcccaccccttgtcagctcacagcacaatctggaggccacattggttcattgatcccagctggtgggcacctttcaagcctatcacaagaagttttaattttactaattggcatagaaccttcaatgcagagcggatcccattccctgtgattttacttattaatatggacactggtttaagaagcagttggatcaatgtggcccgtgttttcctggcacactggaaaggcaactgagatctcaggattgctttcctctccagttggccaagacaagtgattttagcgataagcagctttttaccagctttgctagctgtaaatagttggacattgtaaatcattgaatagaattaaggtgttgggt

SEQ ID NO: 783 - DNA, 1173 bp, Homo sapiens
aagaacaaaatggtcatctttaaggtacctgattgcatgcacttaaatgcagattattttggagtttgaaaagggactattaatgaaatctttcttttccctcctttctctttttcccttccccgccactgattcagtgagctggagattggatcacaggtataattcaagcttttcatgtagtcatgtagatcactagactccttggtgtactgacgtagcaatttaaaagcagatcatgtgtagtacatctagaagtagatttacaaatattctgaagagttgtaaccttttaaaatactaacagtgacatggttttgtttttaaggtttagcaatatttagcccattatttttgttttattcttaacttgaatgtttgtaaattttatttcttgatgctttcattgtgttatgataacatcaaaataacttgatattctaggttactaataattgttgtgcatgagtgttactacttttggaattgaagactttaaagaattttaaaggcagttgttgactaaacttctttctcttgattcacagccgaaggagtaaaggtgctgcaatgatgttagctgtggccactgtggatttttcgcaagaacattaataaactaaaaacttcatgtgtctggttgtttgaaatgtatttgcagtttcctgggactgctaggaggttagtctgctgatttcagttgctgtccaagttcacatgctccatgaagcattcagtgaaaacttaatgtcatggggtggtgtttgtttgctgcttggtttatagcttaggtgggttcatctgggagtcaagcttgtaaatgctgtgttaagaaccatgtccgcggtggacgcagtgtagtggctcacagtcatcagcacttttgggaggtttgggtgggatgattacacttaagcccaggagctcgaggctacagtgaggtgttttttttttcgagacagggtctagctttgttacctaggctggtcttgattgaactcgggctcaagcgatcctcctaccttggccacataaagtactggcatgagcgaccacgtctggcttagagtctaaaaagtaccatgtctggataaactggagaaatctcaggaagcagtagagagctgaaagacttggttgggcatgaaggggactcaggaaaagcaataccgt

SEQ ID NO: 784 - DNA, 1176 bp, Homo sapiens
cccccaatgttgctgacagccattgtttgactatagaatgcaatcaacaccgtggatgacagagtagagagagaaagaacctgagtcccaggtagcatctgagagctgctgaatcagccagccctgaagtctaccctacctctgtttgagattttcttttcctatcactgtaattcataacatatcctggcagatacactcctaccaggtatactcttgaccagctatactcctactcattccctctgagcccagtgcaaatgccacccctctgtgagtccctccctcaggtgcccacccatagtgccctgaacctccatctattccagcactttggtccattcttcatcccgatccctgaggtgacatctcccctgtgagttgctgagctcttaaacagcaaaccatctcacggaggctagagcaagtgtatctgtttaatctaattcattccacattcattcagcaaacatttactgagtgcctttaagacagtgaatgccaagacaggatgggttttgcatacacatctgtgcagggagtaggggtgcattcatgcaggagacagagagacagcagggaagagcaggacaccaccagacgtggtgtgagtggtaggcaggacttggcttagtgcaggaatgggattgacctcgggctttggggctttgaccctctttctatataactctcctttcagggaggcagtgcaggtgaacaggggacagggaggattggaaggctctggaaggaagccagaattgctaggacatgtctaagacagaggctgcatcctcctccactgctttggaagaggagtgagctcagcggagctgagcatgcattaatttatgcattcattcattcattcattcagctcacattatgattatgaagtacctcctgtgtatcaggcaccacatttggcattcaggattaatcagtgaacacagagtaaatgggccttcttctggctcaagggtcagacatcctctctgagatctggagatattcatgttcctccttcaaggtgaagacataacatgttagaatctgctttgggggtcatgggtccaaccccaggctaggtgacatctgggtgtcagggatgtccctttatatccttgagagtctatgatcagcctgtacaaatttgtcccctgcagatggatcctg

SEQ ID NO: 785 - DNA, 1158 bp, Homo sapiens
aatgtggcatgtacatacaagggaagattatttagccataaaaagggaatgatgttctgatacatgtttacaacatgggtaaaccttgaaaacattatgctaaataaaataagccagacacaaaaggacaaacagtatatgattctacttatatgaaagatcatgaatagtcaaattcatgcagagggaatgcagattgcatgtttccagggcatggaggctggggcaaggggaatggagaattagtgcttaatggtacagaacttctgtttgatgtgatagaaaagttatgaaaacagtgttaattatagaacattgtgaatgtattcaatatcactgagttttagaattgaaaatgattaaatggtaccttttatgttatgtatatttaccactgggtaataaaattgtattaatgtagaggcaattttaacagtcgtaccactctggaggaagatactgataatgaaggaggccatgcatgtggaggcaggatatattacatatataatacaatatataatatatattatatatacacattatgtcagggggtgtgtgtgtatatatatatatatattatgtcagggtgtgtgtgtgtatatatatatatgtaatataccctgcctccacatgctttttatatatatatagtaatatatggtatattaccatatataatatatattactacatatatatggtaaatctctatgtcttcctcttaatttttctgtgaaactgaaactgccctaaaaaattcaagtcctacaaaaatgaaaatgagttaaagtacttttttttttctttgaaacggagtctcgctctgtcgctcaggctggagtgcaatggcgcgatctcggctcactgcaagctccccctcctgggttcacgccattctcctgcctcagcctctggagtagctgggactacaggcacccgccaccgcgcccggctaattttttgttttttttagtagagacgcggtttcaccgtgttagccaggatggtctcgatctcctgacctcgtgatccgctcgtctcggcttcccaaagtgctgagattacaggcttgcaggcgtgagccaccacgcccggccgagttaaagtactttttctggaacaaagaaacttagcataaatagttaaaatagtaag

SEQ ID NO: 786 - DNA, 1099 bp, Homo sapiens
tgagtttttgtgtgtgtgttattttgtagagataaggtttcaccatgttgtccaggctggtctcgaactcctgagcccaggagatccccccacctaggcctcccaaagtggtgagattacaggtatgagctactgtgcccggccctgttttcagtttttgtttcctggcaattctgtccaaagtaattgtgggctaaatatcagctacttctgaattctacaaaagacagtctgggtaaattagaatgacaaatataccttggcctcaaggtgggaacttcggatttaaattatgtctgcagaagtagagacacagcaagtataatcacaatttgcctcctgtgtctgaatgaaaacagctaccaaagcctgtgacactcgaggctcaggctcctgcctgggtctgaatcctggaattgtagggccttgtgcctgcaggacactgttttctcagagtcctacagctctgctgcttcactttatccatgtccaagccagaagatggggaatggggtaccagctgagggcccagtgttcatatctttcaaatcttcttcctgctggtgccagccagcctcccttctctgtggctgtcagagggggaccagtgccaggggtcacagtcagtccctggacttgccctctgtgtcacagcagagcctctgacctggaaggctgtttgcttgtcattatgtaactggtctgtgcttttgagcctgccaaagctcagggtttttccattctggaaagggattggttgctatcagagggcctgggctggagatgccgggaagtagattttataaaacgatgttgtcctggtaaccctgagtggctgatgggctgctgggaagaggggaggagatcagggcagtgggccatctgggaaagggtgcttacaaccctggtggccactgtgtgaggaatagacagtgtccccaactatgaacctgtggtttgtccagcaaacacaggtgtatgtttcaaaaaagctgggggcaagcagccattcattaaccaagcaaatgccttgggtgaggctagccattgccaacccacagcccagcctgccctgccctggcttatgcttgtgccacct

SEQ ID NO: 787 - DNA, 1229 bp, Homo sapiens
cccaaagtgctgggaatacaggcgtgagccactgcacccagcagaaataatgtcttttgaagcaacttggatggagttggagaccattattttaagtgacgtaactcaggaatggaaaaccaaataccatatgttctcacttataagtgagagataagctatgaggacacagagacatacagagtgatataatggactctggaaactcagaacggggaggatgggtggggagtgtggaataaaatacgacatgttgggtacgatgaacactacttgggtggtgcacgcactaaaatctcagaattcaccattatacaattcattcatgcaaccaaatataacttgtacccccaaagctactgaaattttataaaattaataacaatttaaaaagaaacagttctctttctgcctccactgccaccatggctcccgggaaaaagcttgtggtgaagaggggcaaaaaaaagaagcaggttctgaagttcagtcttgattgcacccaccccgtagaatatggaatcatagacgctgccaattttgagcagtttctgcaagagaggatcaaagtgaactgaaaagctgggaaacttggcggaggggtggtgaccatcgaaaggagcaagagaaagatcgccatgatatctgaggtgactttttccaaaaggtatttgaaatattacaccaaaaaatattcaaagaagaataatctatgtgattggttttcgtagctgctaacagcaaagagagttatggattacattatttctaaactaatcaggacgaggaagatgaggattaaatttcatttatctggaatattttgtatgagttcttgaataaaacttgggaacaaaaaaaaaaaaaagaaaaagaaacaaaaaacttcttatttttttctttttttgagatgggtctcactctgtcacccaggctggcatatgcagtaatgtaatcatagtttactgccgcctcgacttcccaagctcctgccatccttccacatcagccccctgaatagctgggactacaagtgtgtgccaccacacccggctaatttttaaattttttttgtagagacagggtatggctatgttgtccaggctggtcttgaactcctgaactcaagccaccctcctgcctcagcctcctaaagtgctaggattacaggagtgagccactacttccaacttcaaaaaaacaaatctcaacccatcaagtcgccccct

SEQ ID NO: 788 - DNA, 1463 bp, Homo sapiens
ttttcttcttttctatattaagaattcaacatcactattagaattgcatcatatataatgggcataattttcttttctaggatgctgagtatctacatggatacattaaatatatttatgcgagttgcaactatgctggcaactggaggcaacagaaagaaatgaagtgactcagcttctggcttctctgctacatcaaatatcttgtttaatggggcagatatgcattaaatagtttgtacaagcagctttcgttgaagtttagaagataagaaacatgtcatcatatttaaatgttccggtaatgtgatgcctcaggtctgcctttttttctggagaataaatgcagtaatcctctcccaaataagcacacacattttcaattctcatgtttgagtgattttaaaatgttttggtgaatgtgaaaactaaagtttgtgtcatgagaatgtaagtcttttttctactttaaaatttagtaggttcactgagtaactaaaatttagcaaacctgtgtttgcatatttttttggagtgcagaatattgtaattaatgtcataagtgatttggagctttggtaaagggaccagagagaaggagtcacctgcagtcttttgtttttttaaatacttagaacttagcacttgtgttattgattagtgaggagccagtaagaaacatctgggtatttggaaacaagtggtcattgttacattcatctgctgaacttaacaaaactgttcatcctgaaacaggcacaggtgatgcattctcctgctgttgcttctcagtgctctctttccaatatagatgtggtcatgtttgacttgtacagaatgttaatcatacagagaatccttgatggaattatatatgtgtgttttacttttgaatgttacaaaaggaaataactttaaaactattctcaagagaaaatattcaaagcatgaaatatgttgctttttccagaatacaaacagtatactcatgattgctaagtgtttttttatttttgcatatttattgaactgtctaattgaatacagcttgctcttgtcacctcttcaagctttcaagcctttatagaaaagcttctttgtggcttacactggaaattatgaaagcagtttttctcctaagacttttggtttctcgcattgcctctcagactaagcactaaaaagcaaagcaaaacagaactagttctgtcttaatgaaatatatcaacccaaaagtgtaatgaggaaaatgcttcattagtttcccctagcagacttttacttctcttacactgctacaccattactttcttgagacatttgtaagttctttgatacagaagagttatatttagaagtctttaatgaagggaaagaagtctgtatgatgactgaggtgattgctctttttgacaaatgtttattacagtaatgcagaaatactgttaatcatctcaaagtac

SEQ ID NO: 789 - DNA, 1249 bp, Homo sapiens
atttttccttttattttgttttcagcaatttgattaagatgtatgtagacatggttttctttgtgcttatactttttggagttcactgactgtcttgaatccgtaatttatatatatatatattttatcaaatttggaatgttttctataattactgctttaaatatttttgcatgaaaatgtttttctcttcttctggggctccaatggcacatcaattaaaccatttaatgtagagtcctagaggctctgatctttctttttcaatcttttcccccttcttttctcttcagattgaattgtttctattgttctattcaagttcaccaaatataaagcaatacatgagtttccatgctaactttaggtaccaatgctgccattaccaccatgctgatacacagcaagagccctcttaagttgaaagagagcaggggaatatatatatacacacatatgtgtgtgtatatatatataatatacacacagatatacacatattaatacacatacatacacatatatatgtatatatagacacacacaaatatgtagtgaaagagagagattggggggagggagagagagagagagagagagaacttctgtttgcttgtttagttttgactttcattcacaatctgcctgcattacctcacactttagagtcctcaggtaattattttctgcatttttttccagaaattatagctccaactagcagaagggctgggctgtaatggattcctaccagcctagcggaattggaattccagttatgtcttttaagtaaattaagaggtttaaaaaataataaaatgctaatcattgctatctccaagagggcttttacagccactatacatcactgccattatcacaacatatatgtcacctttgtacatacaccctgatcatcattttttgaagcacatttccacaggttatcaagttccaggtttgtaattttctttattttaatactttatgtatgtaatcttattctcatgtcatagtaaggtttgattttttttctctttctcctttgtgtatctgttctaactatgatttttgtaattttgtgtgttttcatgatggtagttatcatcttttcacttccagatgtaggactcccttaatcatttcttttaacaccagtaaagttgtgaatcattcctgtagtttttgcttatctgggaaagactttatttctccctcctttctaaataacagttttgcctagttcttg

SEQ ID NO: 790 - DNA, 1192 bp, Homo sapiens
atgcaaactgacctaattgcaagattattctatgcagcacaatttttcatagcacaagaatgggtggaatctaaatgttatcattaggaagctggttaagtaggttatggcacatctacacaataaactactgtgcacctgagaaaaataggcaagcctttctaatacggaaatacctcttaagacgtgctatggaataaaaaaaaatcaatgtgaagaaaaagtatacatagcatacctgtatttgcatacagaagtgaaggaatgtgaatttatactcttatctgcttataattattttaaaaatctagaaaatccccctctaaaaaattaataatatatttatctgagggagtggggaggggtgaaatagagtgaagcttgggagaatttttacccaatacctttttacactgttaatttttgaaacttttcaaaaattaaatgaatatgttaaagttatttcttcaaagacagatgatgtctgtggccctaccaccctgaacacgccttgtctcctctaatcttggaagttaagcagagttaggcctggttagtacttgaatgggagactgcctgggaataccaggtgctgtcggctttttaaatgaatagacagatagatacatatgtttaaaaaaaatgagataactaaatgttaatggaacagatcacagagaacacaaaaataaaagaaactctggtactacagagataaagaacaaacatagagaagaagaatgggaaagggagtcaaactctgtggaactaaagcaaagtgctagaggcagataattgggattgtgaaggaataaggcatacaattatacaccacaacatgtttgaactattcatatacattacataaaactaatatgtatgtgcacacatatgcagatttcataattcaaaacatttcaataggcaatgaatgccctttgtccccagcaattgtagatctagaaatctttttaaagaaaatcactaagaatgtgctcaaagacaggtacaaagctgtacctcacacacaaatgctcagaaacaggtgattaatttagtaagtcatggcctcccatacgatggaatgccaaggcaccaaatttatgctgcagcatatttagtgatacaaaaagatgtttaccctccgctgcaaaggtatacactaacatattcactgcagttatcccaggga

SEQ ID NO: 791 - DNA, 1216 bp, Homo sapiens
gctcatccacccgggcccggggcgaggccgagggcagcgcgaagcggggaggcgctggtcccggtgcagtcccgggccgctccccgggagagccgagcccgcccgtgcgtcttcccccgcgcgcccgcccctgcgccctgcgcccgccccagcccagcccagcccagcccagcgcggtcgggctcccgctccggctccggtggcggctgcggcggtgctggcagcttgagcccaggccggcgcggcgggggcggcccgcggctgtggcagcggcgcttcccgcggctagagcggcttcgggggaggctgaggcggtggcggcggcggccgggccggcgtggcggctctgggctggctgtgtgtctgagccccggcgaggagcgaactgcggaggacgccccctcccctccccctccccctcagctccgctccccctcccctccctgcccgcctccctcccctccgcccgcctctctaccacgtgactgcggagcctcagcctcgccgcgcggctctcgcccgctcgcggctcggagggggcgccgggtgctccacgctcccggctcgggggacgctcggagaccggcacagcggcggggaccggcctgggctgcggcgcgccgagctctgacggttcgggcctccttctccggttcgccaggggcgggagaatggaggagggccggccgctaactgccctcgaggggctcccgaagcgccctggcgacctcagcagccgcgcgtctcgggtcatgtccccggccgaaacagaccgttcctcgtggagtgggacctggggagcaagaagagagaccggggcggggcgccgggccaggccccaggacagctggggagccagagggggccggccgccgcaagcatctcagagtagagcccgggccgtgggctcgaaccctggctggccgcgcggacctcggcgggcgcccatcccccgctccatgggcagcgcgctcagccgggagtcgggcaagaggctcggactctgaagcccaattcatggccggaaaccagcgcagccgtgaccgcggcgcctggacgtgaggagccttccaagcggccggcgggctcagactccgaccctgcacggagctttcatgtgcgagcccgggcgaagagcccgctcctcgcggccacagcggaacagggctccctccgcctccggtgcctgcctcgggccggccaccaccaaagagag

SEQ ID NO: 792 - DNA, 1218 bp, Homo sapiens
tttatgatttctcttgcgggagggacaagcaggaagggagaatggcagaatgaaacttcttattctagggagtattttgtcagctctgtggtgctgtgatttcctttattcttttcttcccattttcattcattcatgtatatataatcttgataggttgtctggtaggtaatttgaaatattagtaagctagatagttttgattaccatttcagaaaacttggattttacagaggacttgcctggtgtgcctgaaagtgtgaagaagcccataaataaacaaggagataaatcaaaggaaaataccagaaagatttttagtggccccaaacgggtaagtaaagcactgtcagtgatttttattatttatttgttattggagggctcaactcttaattttttatttgaaagttactaataaacatcatagcaactgtctttcaaaggatatgtgtaagtcgttttttcagatataaccattttttaaaaaattgtaaaatatacatatttttaaaaccattctcaagtgtacaagtcagtggcattactttcacggtgttatgtaaccatcacaattatctatacccaaaacctttttatcatatccaacaaaaactctgtacccattaaccaataacttcctcccccactgcacacctagtcaatactattccactctgtctctaggaatgtgctttttctaagtatcttatataaatagaatcatacaatatccatcataaaccagatacaaaaggacgaacattgtatgaatctggtttatttcactaagcctgatttttctaaggttacatctgtcttttacggtatgtcaaaatttcattcctttttatggctgaataaaattccattgtatgtaagatatatatgtatatatataaaagaatattccattgtgtgtgagacatacacacaccaccacacctccatgccttccacattttgtttatccattcatctgttgatggacacttggattgtttttaccttttggctactgtgaataatgctgctgtgaaggttggcatacagatacatctgtttgagtctctgctttcagttcttttggatatatacctaggagtggatttcctgggtcagtatggtaggcctataactttctgaggaactgccaaactgttctctgtggttgtctgcaccattttacattgctaccagcaacatatgagggcccta

SEQ ID NO: 793 - DNA, 1193 bp, Homo sapiens
taagagaaggtggtttatagctaaaagtgtgttttcccttatcccataaaatgaccaaagaggttattactgaaagggacaaagaaaggcagggtaacttggggggtttgggggagcaggaaagagttcagatagatgttacttaaagtgggagaatgagctgtctagagacaaagtagaatttctggacattattgaggccttagttgaagttggtgtcactaaaaacacatggtcactaatctacctagtgtgtatgtttttttcctcctcctctagtaggccccattatctggaacctggacagaatacagaatattggataagattattagaattgtcctcaatagacattttgtcagtcagcatgtggaatgaagagatagagaagcaagggaatttagggtgttattgcccagagagagattgagaagatagactgtggaatttaaaatgctgagtgcccggacagggctaatgaataggagaaaggggagaaaggggttagtatactgagaatcttcttaaataaaaatgaagaatgggagtactggcacaagcaagttggatggttggtaggttgtgattaaaaaaaaaaaaacagtgggctatctgattttaatgtttatgaagtgaagcattttaggatatacggcaagcttctggatgcaactgagaactggtggctgagatggaatgcggaagattgttgatgatgagataaggttaaagaactgggaaatcagagggttggaatttggtggaattcagtgtgatagcaaaattgggatggaggagtagattataaatatggtgtaaaatccttaaatacatgaacagtgaataagaggttgaataagaggttgttggatgacaagtattaggaagattagagggtaactagcacaagccttaaaagaaggggctttaattttttttttttttttttttttttgagacagagtctcgctgacgcccaggctggagtgcagtggcacagtcttggctgactgcaacctctgcctcccgggttcaagcgattctcctgcctcatcctcccgagtagctgggattataggcgcctgtcaccacacctggctaatttttgtatttttggtagagacggggtttcactatattggccagggtggtcttggactcctgaactcaggtgatccgcccgcctcggcctc

SEQ ID NO: 794 - DNA, 1233 bp, Homo sapiens
taatgaaatacatatacacttgtctgtttggttccacctttcattcccttgagagtaacccacaaagaatggcctagctgagtcagagagaggaagtaattactagaacagtttttttagttccgttctgcttccagcctgaaagatttagtaccaaatatgacagtatctgtcactgcaggctgctagactctagtgtaagaacatagttctatttctgtgagctaactgctgcccttctataaccttcagtttctgccagcatcgtctgcattcaaaccaatgacctcgaggtgaaaatctccagataacatgattggtccccatgctctcatgatttccttacttaagcaattaaaggccaaagcaagatgcttagtaactccttttccacatagaggcacaaataaaggaaagctggtcacaagttttgaaccaaagagttaaaagaagaatcataacttgtctctatttaatgattggaaactctcacagacttctgtgaagtctctcccccttttgtacctttcttacaagtgatgactatatacttttacctggcaggggagagaccacggtcacgaaggtggttttcccagggcgaggcttattcattgcactccagatgtgctgacccctgcgatttccccaaatgtgggaaactcaactgcataattgtggtggtgggggactgcgttcatgcttttccctggttaaattaaaaaatttttaagttattttaaaaatataaaaaacaagatttgactgtattctgccttgcgccactcttgtttgtctttcactagtgcaaaaattgtgatatagctgtcttcatgtaccccgcaatacctggtgcagtaattctgtgcataataatgtatgtctgtttgttgtatgaatgaaatttatatttctaaagaaacatgctagctacaattattgtgataagaaagcttaacaactttttctcattgaaaattgtcacgaaacaatgagcttttcagaaatgatttacttacaaattccatatttgaatgcaggacagaatctggatagtatgcttcatggcactgggatgaaatcagactccgaccagaaaaagtcagaaaatggagtaaccttagcaccagaggataccttgccttttttaaagtgctattgctcagggcactgtccagatgatgctattaataacacatgcatgtaagtattttatgcagcccttcttaagag

SEQ ID NO: 795 - DNA, 1427 bp, Homo sapiens
aaatgaaaaggtgttacctttggcttactcacaagaaactgtttcattttatgaagatctgaagaaccactacaaggacatccttcagagttgtcaaaccagtgaagaatgtgaattagcaagggctaacagtacatctgatgaactatgagtaactgaagaacatttttaattctttaggaatctgcaatgagtgattacatgcttgtaataggtaggcaattccttgattacaggaagcttttatattacttgagtatttctgtcttttcacagaaaaacattgggtttctctctgggtttggacatgaaatgtaagaaaagatttttcactggagcagctctcttaaggagaaacaaatctatttagagaaacagctggccctgcaaatgtttacagaaatgaaattcttcctacttatataagaaatctcacactgagatagaattgtgatttcataataacacttgaaaagtgctggagtaacaaaatatctcagttggaccatccttaacttgattgaactgtctaggaactttacagattgttctgcagttctctcttcttttcctcaggtaggacagctctagcattttcttaatcaggaatattgtggtaagctgggagtatcactctggaagaaagtaacatctccagatgagaatttgaaacaagaaacagagtgttgtaaaaggacaccttcactgaagcaagtcggaaagtacaatgaaaataaatatttttggtatttatttatgaaatatttgaacattttttcaataattcctttttacttctaggaagtctcaaaagaccatcttaaattattatatgtttggacaattagcaacaagtcagatagttagaatcgaagtttttcaaatccattgcttagctaactttttcattctgtcacttggcttcgatttttatattttcctattatatgaaatgtatcttttggttgtttgatttttctttctttctttgtaaatagttctgagttctgtcaaatgccgtgaaagtatttgctataataaagaaaattcttgtgactttactaccaggacttttctcttccccatgtcaaaatacaatcaataattgatggtaaaagtttggaaattcaagcagatttgactcacctggcaatttttttttattttttatttttgttatacttttaagttctagggtacatgtgcacaacatgcagttttgttacatatgtatacatgcaccatgttggtatgttgcacccattaacttgtcatttacattaggtatatctcctaatgctattcctcctccctccccctaccccacgacaggccccaatgtgtgatgttccccttcctgtgtccaagtgttctcattgttcagttcccacctatgagtgaaaacatgcggtgtttggttttttgtt

SEQ ID NO: 796 - DNA, 1208 bp, Homo sapiens
aaaaaggtacagtgattcagccatttccatttgtcatttgtttcaaccttttttaagttgagtgtttttatttctgcagttattagttggatcctccacatcttgcatatatacatgggctcaattattatgtttgtcaggataatcaaatgaaaatactagttcagtgatcagcattgaatggttgttaggcagccatgtgctcaacactgatttcacctcttgagtataaactttttaaatttaaattggtttacatgaaagtggattaaaaggcctttcaaaagaatgggtttgaaaaacctcagtaccctttaatacatgtacatttctttccttttttcatttaatgtaacatgtctgttgtaactatgtttcttaaatattattttaaggttatgtgttctttaattatggtcaaatataatttggtcaccaaaaatgaaataatagtttaaaacaagtagctgttactaagtgtgctaaaaatactcattttataattaattttagttttcttagtatattattataaattgtgccctaagtcaggtacaaatgtacacatcaaaatgcccatattgtatctatctgtagtcgtttaatgtgaattatatgtgaatttttttcaaaattttactaaccagaattctgttataggcacctaaccacgcagcatgaggaaaacggcacaacacaatcttgaggtgccttctgaatcatcagattaaattatgcttcatatgtttttgcttttactgtatttctttaaaaactctaaatctttattcatgtgtcactggattaatttatctgataatgtgtctcacaagaatctgttagatcgtttattcttcagttgtactttgaatggtggggtggaagtttcaggtgaacaatggataacaaaaagcaagttatggaagattgtgaagaggatggaaaaactgaatacaagataccaaaaatgaaaaaaagtgtcccatttttaataactatattctattattttataaatgtgtaataaaggggtccctctttattggttgttctccacttaatctttggtctttttcagtaattttaagttttctgggattttttttggtttataaaacttgtgtttagactttatcttgctatggagttttcacacttctatagcacatatcctagtatctagtcatttctgttttaatatgaatttc

SEQ ID NO: 797 - DNA, 1917 bp, Homo sapiens
gacactgagcttagaacatggcatcttcctttcttctatcttacctactataaacaagattaaataaaagcagaattgaatattgggaaagttttttgtggaaggaattactattctattgattatcatataaattgaagcaaatatccccttaaaggtaataaataacatattcatttccaggtgttcttctctatgggcctccaggctgtggtaaaacgttgattgccaaggccacagccaaagaagcaggctgtcgatttattaaccttcagccttcgacactgaccgataagtggtatggagaatctcagaaattggctgctgctgtcttctcccttgccataaagctacaaccatccatcatctttatagatgaaataggtatgctatgttttctatatgagtatttttaaaggccatttttagagatatttagataaccagatttagtttttaacatttattaggccatgttaataaaacaaagaacataaccaacatcataatatgctatgtataatttctgtgttgtagaatgaaccatagactatatactcccctacttgatagataggtttttctgtcttttctctgttacaaacagtatgcagtagatatccatgtacatgttttctcatgtatatatgtttgcccgggaaagatacctagaagttgaatcatttggttgtgtgatatatctatcttcaacctcactaggattaccagttctttagttattatacctatttatgttttcctgcttggtagtaaacttgggcatcttttagcatgttgattagccatttgggttttcttatttgtgaattgtcaatatttctttggagttatttgtagttttcttttgttgatgtttattatgattacacctattttctagtctatcttttttctgatagttttttttttacagtttattatttggctatagtcagtatttttcctttgtggtttatacgttttgtatctggtttacaaataccttcactatccccataaatgttctctttttaaaaattatatataacatgagataggaatctaatttcattcttttccaaaaagacagcaaactagactatcctttgctgtatgtcatgacttttatattaatggactcttgctatattatggatcaatatttttgttctgttcctggtacgatgtatatataaatatatatagttatactaatacagtattattagtattggatatatatttatatagctttattactgtagttttgaattatattttattattgttaaatttagtatgataggctatgtaaatatgtagagagaaaaatagatacaaatatgtagtatagctttgttttggttacttgtttgctttatgtatcttttctcatcaatttactccagttattttggtgttttggtgtgcatcttgaacagaggaatatatagctagtttattttgtttttgtttttttttaagacagcatctcactctgttacccaggctggaatgcagtggcgtgatcatggctcactgcagcctcaacctccccaggctcaagtgaaccttccacctcagcctcctgagtagctgggaccacaggtgtgtgctaccacacaccactaatttttgtagagtcagggtttctccatgttgcccaggatggtctaaaactcttggggccaagcaatctgccctgccttggcctcccaaagcattgcgattacaggtgtgtccaccacacctggcctattagctatattgtctaaaaattttaatctaagcttctctttaactgggaagtgtgattagtttgattttgttatgatagctgagataattcagatttctttttttttttttcacgctctgtcatggctggattgcagtggcacaaccatgactcactgc

SEQ ID NO: 798 - DNA, 1202 bp, Homo sapiens
ggaaatggaaaaatggcattatatatattatatatataaatatatattatacatactctccttactttatttcagttaccatccccatagaatttgacaagaattgctatgactgaaaggttttcgagtcctaattaaaactttatttatggcagtattcataattagcctgaaatgcattctgtaggtaatctctgagtttctggaatattttcttagactttttggatgtgcagcagcttacatgtctgaagttacttgaaggcatcacttttaagaaagcttacagttgggccctgtaccatcccaagtcctttgtagctcctcttgaacatgtttgccatacttttaaaagggtagttgaataaatagcatcaccattctttgctgtggcacaggttataaacttaagtggagtttaccggcagcatcaaatgtttcagctttaaaaaataaaagtagggtacaagtttaatgtttagttctagaaattttgtgcaatatgttcataacgatggctgtggttgccacaaagtgcctcgtttacctttaaatactgttaatgtgtcatgcatgcagatggaaggggtggaactgtgcactaaagtgggggctttaactgtagtatttggcagagttgccttctacctgccagttcaaaagttcaacctgttttcatatagaatatatatactaaaaaatttcagtctgttaaacagccttactctgattcagcctcttcagatactcttgtgctgtgcagcagtggctctgtgtgtaaatgctatgcactgaggatacacaaaaataccaatatgatgtgtacaggataatgcctcatcccaatcagatgtccatttgttattgtgtttgttaacaaccctttatctcttagtgttataaactccacttaaaactgattaaagtctcattcttgtcattgtgtgggtgttttattaaatgagagtttataattcaaattgcttaagtccattgaagttttaattaatgggcagccaaatgtgaatacaaagttttcagtttttttttttcctgctgtccttcaaagcctactgtttaaaaaaaaaaaaaaaaaaaaacatggcctgagagtagagtatctgtctactcatgtttaattaaggaaaaacacttatttttagggctttagtcatcacttcataaattgtataagcacatta

SEQ ID NO: 799 - DNA, 1222 bp, Homo sapiens
attttctttacctcttgaagttttgacttattcaattattaaacaggaagaataatactggctacttcgtaggctgttgtgaaaatttgataaggcctgtgaaatatatgcagtatagtaagtgcaggtgatacaatttcttttacaacatttatttatttaaaatattaatgaataaatacataaatattttaaaagtctcaccgtgtctcccaggctagaatgcagtggtacaatcatagcttactacagcttcaaatgatcctccctcagcctcccaaagggctgggataacaggcatgaaccatggtgcccagcctctgtttttaattttgaaatgtcaacatggatttgatggtggtctctgatattgacttcttcaggattaagccctccatgacagggatgtattctaaactgtgtggacaggaggaagatgcatttgtttacaatggacagaagtaagaaaagtaagaaatgtcatagaactatgtctgggggtcaggtgacaagcactgtgtcatttctagccctgtgtcccctgcaggtgctttcttctgtggaccctctgctccttctgttgagggagaattttggatgagagctggataatttcccaaaattcgctcaactgtgaagctctggaactcaagttgctgtgctgcaaagctgtctgaggacaggccgtggtggcagagaggggcagggaagacaggcaatttggcatggagatgatgggcacatttgtcacatgacctgggtttgattcccagctgcatcgtatactaattgtgtgtcctagggcaaatgatttagtctctctaagcctcagaggccccaaaggaggaagaatgatgtaaatggcccagcaccatcctgggtgcgtggaaaactctaattatgataatgtcctggaacgttctgcagtgaacaagacagaccacattactgccttcgtgttgcctggtgatcagagtgattattgctggttttggggaaaacagcattctgaggcatggaacggttttcttccctgctctgtgatgcagggtgctcttgttgtgttcactcctgcaggtcacctgctccccagcagggtgacagtgaagtgtgagtgcagtggactgcacagtggcaaaggccacatgactcctgaatgcatcctgtggacaggccaagcgctgtgccctgtgtgaatcatcaggtgaactctcatacaatt

SEQ ID NO: 800 - DNA, 1225 bp, Homo sapiens
catttttctatttgaaataaaacacaaaatacacttgtttttgaatatcactaataaaatacactccaagaatttgtgatcttagcaaagctcttaggtgtaatcttagatgtgtgattttaggtgtgatctcaggtgtgaataaatgtccagcagtgtgtttgggtcacgtagatcccttgtgattgccagcagctggacacatgtaaacaaaaatttgaatttattataaggcttggctcactgaccagcaggtcccagctacagtagggccttgggaaatagaactccagctagaatgctgtagaactcctgaaattccctcctttctaactcttgtctttgctcatttattttactcttaggttttgttgcaggtcagtgaccctggccacatggaacagaaaccttccctgtttaggtctcctttgtttgggagactgaggatgaaaactgctcattccaaaggcaaaattttaaggaaaatgattcttattgtcccagcagatgtaggtgcctaaaacagcattaataagccttggtcaatgaatgcagggatgtgttgtggaagaatagatgctcctgccgcagacacatggattgaagaggaaaaaatgaggggggtggccaggcaatagagtatgtgttataccgaagtattttgtatttcatcagactatacatttttgaaggcagcaattgggaaagactgttgtctcaatctcaaataatggaattcagaaactatgattaagtatagagtttatttgagcacaaagcttgagggtaaccactcaggaaatacagacacctaatgactggagtcagcattccaaaatggggaagttaagatttcacttacataggcagtaaacagggttgcagcattttccacataaggtcagtacacacgttatagcaatttgatcggttactacttgctatgttccaagaaagattgctttaccattccatcaggagggatgatactttcagggggtcttatgtctggtgccacaaggcctttcctgatcatttacaggaaaaagcagaagttgcagttgcatgctacataactcaggccacacagccacattcctctcaaggctcaaaataaggtaaatttccaacagctttaagtttgcattatttaatttcatagtcattctatttagttataagaccattaaatggataatggtgacctctatgttaaaatataggg

SEQ ID NO: 801 - DNA, 1105 bp, Homo sapiens
gccctgtagaagtaggtagatatagaaagaagggcccaaaaggtgagctcatcaaaaggaaataggaggtagagatggtggggcagcccagggtcctggcaggagatgcaaaaaatcacatcatcatatcacatgatcacatttgatgacatgatcaaatcagcatcataaaaaccacatatttagactcttcttacctactaatacctcttcccttcagtaggccagggacatttgataaatagataaaatttttaaatgagttaaaattttcaaacacaaatgagttttagctttaaatgatcacttaatactagatgaactaaatccgcattaaccatggtttacatggctgtgagataattttaatagcctaacaaaccaaaggaaataaacatgtctgcacaaataattattttattatttaaactaagtaattacatatcaggcactttgctagccactgggggtagagtggtaaataagataaatgtgaaatgtatacactattgagcaaacttatatgccaagaagaaatttctaacacatgtatttagatgtatgttcttttttttttcctgtgtgaactcatgtattctgagacttcagctacctgtgctgaggcctctcaaatctttatttttggcttacgcttttcttcttagctgcagaatcctactggatgtccacttggatgtcctgaagccacctgaaactcagcatatctacgaatgatcaaatgggatgccagcactcagttatccaagcaagaaatatgctccatgcttgactctttaccctcactaacaaaactgggcaaagtcctgctggtctctctctttaatacttctcaaatctgtccctttagtttcatccctctgttactgttctcattcagattcttattacatctcaccaaagccactgcagcacattcttaactgtgtccaagtggtaataattaaaaacagcttactgtctttatcattatcactcttaacccaccctaaaatttcctaaaggtatcccgttgacctcaggatacattaaagctacttagtggtgactggtttctgcctaccacttcctcccctaccacctaaca

SEQ ID NO: 802 - DNA, 1226 bp, Homo sapiens
ttcaatgtacctactccactccttagactctttaccttgcaccttacaagtgcattgtattatggtatcaatagtggacaaatacaagcaggctcctgttaattattcagctttcctgaagaatagaaagataatgactgatgaccttacagaatttattgaaagcataaggaagctattcagttttttgtgttttttaaaaaagaatttacctgtgtgattttcttttttttttttcttaaaaatcctacatatctctgttcccaggctatctatagctttagacattttatttctgtcatgatgaacagtctttctagcataagcagtgttcttttggaatgagaaaacaagcttttaagcacacttgccttttcccttacacactcttatctatccttagtcacttgtcaccagctatataaatagcaaaggaaaatctgcattgaactgagggggaacttatttaatgtgtctttaatgcattaagtaatagaatactttatgtattatttttatatttaaaatgtaacattcccattctgacaagatatgaaaggtctttaaacaactttgagactttgctggaccagacttcttgagaaaatgatttactaaaatcaagttgttaagattaccattgaacttcaaaatagtgttgctattttgcagtgctgttacagcatggagctgagccaaccatccgaaatacagatggaaggacagcattggatttagcagatccatctgccaaagcagtgcttactggtaagtctgtatactctggttattccaggaagcctgtaaagaacaaccttgccaggtaggaaatttgcctcctatgattaatgacttcagctagatttttaaaatagtgtcagttcagtagctatccttttctacgtctagatagctgacattttattctcctctaagaaaaataaagctttctttttattttctaattgctgtttaagtatgtcattgttgccttattgggggtgagggtgatagataattgtatgttgctttagtatattcaggacattttttaaatacccctgagtttttcagataacttatgcctgccctttacatgcaggttgagtatttctaacccaaacttcaaaacacttctggtcttaagcatttcagataagggatattcaagctgtactattttttttaatgtattttaattttgatggaatgctttcaaaaaacac

SEQ ID NO: 803 - DNA, 1199 bp, Homo sapiens
tcacagagctcaaaagatggatgaagatcaaatcagtagaaactctggttcaaaaatactgaagattacaggagaactgcgcttactaggctcactatatcctgctggtgattgtcaagatcctggtgggaaatttggaattaatctttgagtgacactcagttatattcctttacttacaatgtgacttattttattttgacattggaattccagacgcttgtagcaatttctctatgaaaaaaatcttattggtaaagctttctccagccttcctcagaagaaaaacataattttatattcctaatcatgagaaagttacataatattttccaaggagcaacaaaatgggcagatacttttataattgaatcataggcctggagggtcagtcttttccctcataatacagatgagaaaatggtgagccttttaaaaagttaaaatcttggtatcagtttgtttgtgaaaacatctgtcttggaaccatttcaaaatttccttaatcacttactcaggtgtaatggaacaactagatgttggtattgttccatatattgtccttttagttgttcctgtattaggaagaatgagtgatcagacagacagtgtgagattcatggccacgcagtgctttgcaacgctaattagactcatgccacttgaggtaagtcaaagatacttgctttaaagacataatgttttctataacttgatccataataattgtaaccctttttagggccaggtacaaaggctcatgcctgtaatcccagcactttctgaggctgaggtgggtggatcatctgaggtcaggagtttgagtccagcctggccaacatgggtgaaaccctgtctctactaaaaaaaatacaaaaaaaagacaaaaacagttagctgggcatggtggtgtgtgcctgtagtctcagctactcgggatgctgagacacaagaattgttggaacctggaggcagaagttgcagtgagctgagatcgtgccactgcactgtatgtatcctgggcgacagcgagactccatctcaaaaaaaaaaaaaaaagaaaagaaaagaaaagtaacacttgttaaagaacatgtcaggctaaaaaaagaaggcattatttcaaaaatgtttatattacaataattaagatttttaggcttttaattggtacttttttcctttaacacacagagttt

SEQ ID NO: 804 - DNA, 1182 bp, Homo sapiens
ttcgagaccagcctggccaacatggtgaaactccatctctactaaaaatacaaacattaaccaggcatggtggtgtgtgcctataatcccagctactcgggaggctgaggcaggagaatcacttgaacccaggaggcggaggttgcagtgagctgagattgtgccgctacactccagcctgggcaaccgagtgacactgtgtctcaaaaaataaaaataagaaagaaagaaagaaagaaactttaatgcagcagtcttgagagatgggattattaagaggtgatgaggttgtgagggctctgccctcatgaatggattaatatagttatcaagggaatgagttcattatcttgagagcaggtttgttataaaagtgagtttggtcttctcttgctctctgtcttgcactttcaccatgtgattccttctgccatattatggtgcagcaggaaggctcttaccagtttatgccccttgatcttggacttcccagcctccagaactgtgaaccaagtaaatttcttttctttataaattacctattctcaggtgttctgttatagaagcataaaatggacgaagacaactggttaaatcgggagaatagttaaaaaaccttgaatctattaattcatttaaaaaatattgattgtatgtgacaggcgctaagctagggactgaagatacaatgatgagcaaaaacaagcacagtttttaccttgtttgtggggtttatagtttattatgagaaggattatcacataaataaatgtatcaaattgcaaatgtggtacatagtgttgtgagagattataactaggatttgacttagaccaggaggtcatggaaagtttctctgaggtagtgtctgttataccgaggccccaagaaaagcaggcattaactagataaagggaagagggaagaacattccaggccaaagaacagcgtgtacaaatgccttgtgaaggaaatgatgaatagaagaaactgaaacagaaaggagatcttgaggcaagagaaaaccaaaaatatcagtgagtgaaaggctgtgaaacaaagagctttgtaggccagtttaaggaattttgccctaccctaggagaggaggaagctgcttgtgggagggtttaggcgtaagaaatagaccccattctggccgggcgtggtggctcatgcatg

SEQ ID NO: 805 - DNA, 1201 bp, Homo sapiens
gcactttgggagggcaaggcgggcggattacctgaggtcaggagttcgagatcagcctgggcatgtgaaaccacgtctctactaaaaatacaaaattagccaggcatggtgacacatgactgtaatcccagctactcgggaggctgaggcaggagaatcgcttgaacctgggaggcggaggatgcggtgagccaagatcgcaccattgcactccagcctgggcaacaagagtaaatctccgtcttgccaaaagaaaaaaaaaaaaagaaaaaaaaaattcacgtttgttggcttgggaccatataattaatacttttttttttttcccttaaaatgtccatttaacaacagattgagtcaagtactggccacagagtactgtggctaggtcctgtgccattatattccagtgccttgtagaaaaggccaaagtgccccatactgccaagtaccatgtgctgagatagctgtggcccagagggtccttgagagtgatgccaatcatcattaaaaagcattttttaagcaccgatctgtacatggttctgtcctaggcactgtacaaaacgagttaaacagacatggcccttgccccctgggagttttcagtctaagatgatgctgacatggacagacataaaggatattgagacaactgaacaaacattgaacaagaacataaagtactaacattatgcacaagcaaaggggtaagtgtattttgtggggtagtatgtaaaggaagcctcatgggacatggacagggtggggtagtcagcctctatcaagttaagttagtctttgctgagaagttggatttttatacagatttaatcaaagtaaggacaggacattccagacatgtagcaaaaagacttggagcaaggatgaaagtttatattgttaaactgtcagtggcctcaaaaatctgtacttctgggtggctctgaaaatggggttggtgtcttagctttagaaagttgccatttgagggccgggtgcagtgcctcacgcctgtaatcccatcactttgggaggccgaggcgggtggatcatttgagaccagaagttctagaccagcctgggtgacatggcaaaaccccatctccgctaaaaataaaaaaattagctaggtgtggtggcatgtacctgtaatcttagctacttgggaggctgaggtgggagaatcgcttgaacccgg

SEQ ID NO: 806 - DNA, 1215 bp, Homo sapiens
tccttatgtgtgtttaaggccagagaaccactgctgacattgcaaagataaggttgtccacaagatggagataaagcacttctcagtgaaaaatgctccacacactcaaaacccattctctggctttatgtctacaccaactccaatttatggtttcttcttttaatttttttttttagacggagtcttattctgtcacccaggctggagtgcaatggcgtggtctcggctcactgcaacctcctcctcctgggttcaagcgattctcctgcctcagactcccaagtagctgggactacaggtgcctgccaccacacccagctaatttttgtatttttagtagagacgggttttcactatgttggccaggctggtctcaaactcctgacctcgtgatccgcccacctcggtctcccaaagtgctgggattacaggcgtgagccactgtgcccagcccttaatttttttttttttttttagagacaagatctttttctgtctcccaggatggagtgcagtggttccatcatagctcactgcagcctggaactcctgggctcaagtgatcctccaggctcagcttctcgagtagctaggactataggtgctcaccaccttgcctaattttttattttttgtagaggcggggtctcactatgttgcccaggctggttttgaactcctgtcctcaagccatcctcccatcctggcctcccaaattgctgggattataggcatgagccatggaacctggctgactccaatttatgtaatgtgccaagcggggacaaacgtgggaagataggtaacattacctttggtgctgttgcttgccagtcaaagaaatttttgccacctcagaggaaaagaccaggaactaactttaaaaatgacagccagggctggatatggtggctcatgcctgaaatcccagcactttgggagactgaaacagaaggctcgctcgagcccaggagtccaagaccagcctggacgacatagggagacctcatttctataaaaaataaaaataaaaaaattagccaggcatgatggctcttacctgtagtcccagctactctggaggctgaggtgggaggatcacttgagcccaggaggtcaaggctgcagtgagccatgatcatgtcactgcactccagcctgggcgacaggcagacggagatcctgtttctaaataaataaataaataaaata

SEQ ID NO: 807 - DNA, 1202 bp, Homo sapiens
acatatggctaatttttgtatttttagtaaaaacagggtttcaccatgttggccaggttggtctcgaactcctggcctcaagtgatccgtcctcctcggcctcccaaagtgctgggattacaggcgtgagccaatgcacctggcgttggtgatattatggtgtaaacccataatttctcagtggttttcatgatgtaattttgttgttattgtttgtttgttttgtttaagagatggggtcttgctgttgtccagcctggagtgcagtggtgagatcatagctcactgctgctttgaattcctgggttcaagtgatcctcctgcctcagcctcctgagtagctgggactacaggtgcatgccactatgcctggctaattaaaaaaaaaattttttttaaagagatagcttgacatgctgcctaggctgatcatgaactcctggccttgagcaatcctctgatttcagcctcatctttactttttttgaagtgaaacttggagtcagacttttcttgagagacacttagtacaatttgacttattagtttgatcatgaggactggctttgataattagattttaggttttagggtggactttttaaaaaaaaaaaaaaacaaatgccctaagtctgcaggtcagaatttgaaccagaaagtatattattaatgggggaaaaaaaagtctcactcattctattaagatatttatttccaataaaaatgtacttttgggtttactcattatcaaaatgtatgatatacttaggccatttgcatcagtttagtactgattatgataatttcactcagaagaaaaaaaacccaccataacacctaaagccttataatctcaaagataagagtaaaacatatcatattagacaatgttttttaaaattaagttagaataaattctgtaaggataatggactggaaataagagttcaaaagaaaaatgtagactttctaaatgttaaggaataatgtgttcatgtatctctctatatttgtatattttatatttttttagatatggggtttcatggtaaaaaggaatctgaggagaaaagaaaaataaaaaaaaaaagaaagaaaaaaagagatgaggtcttactctgttgccccaactggagtgcagtggtatgatcatacctcactgtagccttgaactcccaaactcaaacgatcctcttgtctca

SEQ ID NO: 808 - DNA, 1151 bp, Homo sapiens
gggaggctgaggcaggagaatggcgtgaactcaggaggcagagcttgcagtgagctgagattgcgccattgcactccagcctgggcaatagagcgagactctgtctcaaaaaaaataaataaatgaataaaaaaagaaaattatacaccatgtgatttttttccccctacaaaattcttctgaagttatttattggtaaaataatgtcaatttattaaacactgtctatctgaagaaaattatctgaacataagtttggtgtagtggttcacaacaggaagcaaatttgtcccccagggaacattaggcaatgtcggcatacatttttgattgtgatgactgtggtggcgatagagtcttaactactggcatctagtggagaaagtccatggaggcttttaaacatcctaggacagtccccctacaacaaagaattctgttacccaaaacgtcagtagtgctaaggttgagaaacactggttaagtatgacattttatttttcagatatctgaaatgtgttgtgaagctgtgaagaaactctttaagcaagataaattaggccaagcttctcttggtgtaattaaagtgatttctggttttgtgaagggcagaaattacgaagttaggccagaggtgagcctttttttttttactttgcattttgtttttaaattacaaagttgattttcagttgttatgaggaatttattccttataagtgtatgaagtaaaaagtattcaagctccttaagtgtttaacatgtcaactcctgaaatgtttgatactattaacagttcggtatttatccttctagatgtttttctttgcagatatagtcatatatacttgcttatattttaaaataaaaaatgggcttatactttgaaaactgttctggaacagttttcattttctatattgtgaacttacatatagggttatcccattctttctaatgcctaccagagtattccattgtgtgccctaattgttgaacagctgagttttttctagatttttgctgccacagtcagtgttgagaacattttggccatattattttttcatattgtgtgaatattctgtgaattaaatttataaaatgtagatgctggatccaacagtaatcacatttacaaactcaaattg

SEQ ID NO: 809 - DNA, 1172 bp, Homo sapiens
agtgagggagtgaagacagaacacacaggtagatagaaagtggagtggtcagtggattgaaaggttacataattggttaaggaagaagtgctgtggaagtaactgaatgggagctggaaggataaaagcttgtggtcagagagaggggtgagcactagggtttggaatgtggccattagagaggctggctgaaatggaatacgaagtgaaagtaattggagatgagaaggagctgaggggctaagtcattggtttccaaacgtcctgaaaggcatttcagagtatgtggagacatttagtttttggttgttacaataacctgggaatgctattggcatttagattgcaggagtcagagatgctagcatttttccagactcagaacatcccagtacgacaaagaattgtttgcctagcatatcagtagttcttccatttagaagcactgggctcagctgtgagccatggcccactccctgtaatcccagcattttgggaggctggagtgggaggattgcttcagaaagcgtaagcttttcctgtttaaacccaaaatgcagagagttctacatctctgatacttgtttctaatttttctttgtgtgtgtgtgtgtgtggtacaggtaaaaggattgagagggaagaagaggaagaagaagaagcccttcctttagatatgatggatgaagatgacttacagttaatgaaggatttaggacaaagagtatcttttctaacaagagatctttcttctaggtaatacttcatttgggttataatcattcatatccatttagtgttaaaaacttggttctgaatttcacttaggtggttcaaggtgttcacctttgagcacaatgtttacaaagaataaagtattatttagcttatttcctaaataaaggaggttcatgtataagataagctgatttcatttaatgtacatctttcttttgagtctgaatagtcaagtagagtgaatgggggaagaatgctgttctcactttgaggtagtggcagaacagttctgagttcctacggctatgatttcacttaatcctcattaccctgctggtaggtcttattcccatttccagagaggaaactgatggttccctgcagtcacaagtatctggaatttaaagttggaccttttaaactccaaagtctat

SEQ ID NO: 810 - DNA, 1177 bp, Homo sapiens
ataaaacactaagaatcacagacttttaagtgaccaaggctgatgagaaatcattcgccatgctacaaacacggccagaatgtccgtcgaggggcaggcattacacacaaaaaataagcttctttctgccctcaggactgtatggaggaaaaagactacgaaaatcagtatctataacagcatgagataagcaacgtgaggagaggcacaaaatgcaatgaggtgaccgaaaaaaccaagtcctctcattctgagaggaggagcccgatttccccaaggttttaaaagaaataaatagggcgagagtcaaagaatcatactcagataaccttgcaaaatgcgcccctcccgcccggcttcccgcctttggcaccgacgccctcggggcttccctcgtgccagtccgcgcgcgcacgccggggggcaaccggtccagggccgcgagacagtcaccgcgagagggcgcgagcccgaacctgtctacggaagtcccgccctcacttccggcggcggaggattgggagggactgaaggccgtttccggctctggtagtgtagggacttcggcacgtgtgtcattccccgggatttctgtagtaaccctgcttctggtgaacttgtctggccggcattcatttaaggcctaaggatgaaggcggtaagtgtcctcaaaagcccggtcgccgcggcctagggccccttcgggtgatagagtcactgcctgagttagcttttaggcaggttttcacccgtgtctagggggcggtggtttagactgggggctttccattccttacaccgagctcatccttggttacccactgtgtgcgcgcaccacttcagagtatcacgaagagacaggcacggagttttgcatgcgtgggatttcatactttgaaggaatttttcaagaccgtctttcgaactcgtttttcacaaatgagaagcagggtcctaccctcagcgagtttataatgtgagtcacggtacccatgaagggtaaagagatagaaaagcaagtgatttgtcctggttctcccagaaaataagaggtagtcctggggttcaggactaactttgggatttctgaatgagtcaccagcaagagaagtggaatccaaagatccgaattcagttttgccctccttagtttatgggtcttttggcagcttcatca

SEQ ID NO: 811 - DNA, 1193 bp, Homo sapiens
ttgagtagagacggggtttcaccatggtagccaggatggtctcgatcttctgaccttgtgatctgcccgcctcggcctccgaaagtgctgggtttacaggcgtgagccaccgtacccggcctcttctccctttttaataattaattataattaaaggaagggtctagccgtttacaaatttacattatttgtctgttaatgagcaatttcataatgagcagtttcatgcagtgttacaccagtctgaagaaatatcctctgtactgcaaatttccggagccatatttcaactttaaggtattaaatccttttgtgtaagttcaaagtagttttatacacccttcatttttacctattgagatatgaaggcccttcctcttactttcagatattgttgtccatgttaaaattaaactaatttcccacaacatttgtatttgtctatagattgtcattttgtacataaaatatgccttattttgtttacatttagaacctaaggacatagctttataaactgaatttcttttaattcgttcccttttagaaagaaacaattgagttaagtcctactggtcgaccaaaacgacgaactagaaaatcaataaattacagcaaaatagatgatttccctaatgaattggaaaaactgatcagtcaaatacagccagaggtggaccgagaaaggtttgaattcaaaagtgaatttaagtattctttaaactgtgaccattttttgcatttcccatatatgcattatttgttttggtagagctgttgtggaagtgaatatccctgtagaatctgaagttaatctgaagctgcagaatataatgatgctacttcgtaaatgttgtaatcatccatatttgattgaatatcctatagaccctgttacacaagaatttaaggtgaatactgtttaattctaatttactgttttgatttccattacttttatattggtggaaagtgttactttttttgattataattattaaaaataagtatggtgctatttgtcatgaagattgtaatccttcagtaagctgagacagtcttctttccgaaatttcagagaaccttatcagggttagaaaaatggtcactttctatgagcaactagttttttaaatttttttattttttatagagacagggtcttgctatgtttctcaggctggtctcaaact

SEQ ID NO: 812 - DNA, 2140 bp, Homo sapiens
cccattacataagcatgctgacctaggcttgcttgaaactcgtgatcttgtccttagtgacccagtctttcctgttacattgtcctaaatgactggtttcatagttttactctgtcattgcacgtctcatatctcctccctctcactttgctccctattgccctgagaaaatagacgcagtcagaaaagaatctttaaaagttgtcaccgttgcatctgtaaacctagcatctgtgcccatctgtccccatctgccctttattatatactgcggatatattgtttgtcgtagcttgagccaattgcaatgtctcatttcttttataacaaagctccttgaaaaagagttctattatagcaaaactccttgcctgtattcattgtttttagtttgttctgttttttctgaacccattccaatcagatattcatttccattggagctggtatttttaaggtctcgtgacgtcagtgacctcattttacttgatctattagcagcatttcatacagttgttgactcttctccattaaaacatttactttatttggcttctaggaaacatattttcctgctttttcttcctatttctctgactcttttctcagtttcctttgctgtttccttttctatcctctaaacattgaaatatcctaagcctagtttgggattcccttgatggtcttcatttctttaatgggaactgtgctggtgactcaaatttatatctccagccagaacctttctcctgaattccagattcacatatccgactgtttactaggtgcttgataactatatctgtacttttcatcttgtttaatccaaatttacttcttttgcattttccttagttcaataaatgacaactttattcttccagttatttaaaccaaaaatcttagagtcattcttctcttccttccctcatatttcatgtctgattctaaaggaaatcttgttgcctgtactttttctttctttcctttttttcccctttttttgagtctcgcactgtcgcccaggctggagtgcagtagtgcaatctcagctgactgcaatctctgtgtcccgggttcaagcgattctcctacctcagcctcctgagcagctggggttacaggtgcatgccaccatgcctggctaatttttatatttttagtagagactgggtttcaccatgttggtaaggctggtctccaactcctgaccttgtgatctgcccgccttggcctcccaaagtgctgggattgcaggcgtgagccaccacatctggctttttttttttttttttttataaacagtttcacttcgtcacctgggctgaagtacagtggtgtgatcttggctcactgcaacatctgccccccgggtttaagtgattctcattccttggcctcccgagtagctgggactagaagtgtgcgccaccacacctggctaattttcttatttttagtagaaacgtggtttcaccatgttggccaggctggtctcgaactcctcacctcaactgatcatctgcctcggactaagtgctgggattacaggcctgagccaatgcgcccagcctactttctataaaagtcgtcatgtctctgcccccaccccccgccaccccccacatagtctgtttcatttgattttccccttagtttagtgttttattttgatgtttcttcagatgccttgggatcatttactgttcctcatatttaagagcaaatgcttaaaaattcttagaaataccttcttgaaaagcctgcattcctaccacctctcaccacttcaacatgaaataatgatcccttacatctttttagtgtagttatataacttttgattggctcaataattacttttattatggctgtgtaagtattattaaagctttagataagccatggaatatgctgtgattttattttcattcttgtgcagctttttttttctccctgaagttaatacttaactgttttttacctaccagtaatttatatctaatcactctggaaatataagcccctcagtatattaaaacagatctcatgattcagtaataaacctccccctccaaatatatcccatcacctctactccctggaacattcttctagtttggactgtagaactgattcc

SEQ ID NO: 813 - DNA, 1228 bp, Homo sapiens
aattccctatacctgtatgcattatagagcaaataagagcatcaaaaacaatcttagaaatctttcagagaaaggtcacctacaaaggaacattgatcagataatagatttttttttttttctcagatggagttctgctcttgtcgcccagactggagtgcaatggcacgatgttggctcactgcaatctccgcttcccaggttcaagcagttctccagccttagcctcccaagtagctgggattacaggctcccactaccattcccagaatttttgtattttaattagtagagacggggtttcgccatgttggccaggctagcctcgaactcctgaactcaggtgatctgcctgcctcggcctcacaaagtgctgtgattacagggtgtgagccactgcacctggccgataacagatgttttaatagtaagataaaaagtaaaatttccagtgtgtcgaaggaagaaaattacagcctagaattttatcttcatgtacattatttaagtgtgagggaatagtttcagtgacattatgtcattgaagaccttagaagatttccctcgctaaaggagataaagcgactggcacaacatgtatttctctgagtaattagaagtgttcttttctggctgtactgaagggactttcatgatttcttcgtttttgtactcttagttttataatattgcatagtagctaaggcctggctgtagcagttataaactgttctgcaagtgcgggaagtaatagttattcctatctcaaggatgtggggtttaaatgggttagtgcacaaaaggacatttattaaatttagtcataatcatctcaaggacatggtaagtgaaagagtgtacataaagtacttaatgtaatgtttgctacttaatgttcaataactcaaagagaccaccaccactactacattttacttttattagtaattaataataattaataattagtaattcagtggtaattagtatactaccaaagaaagtacttgagcagaagagccaaaattcaaaccatagaatcattttactgtgcttttattctacctcaaacactaatctccaggccttggataaagggattatttctctgaaggggaaagttatcctctttttgcccaagtcacacttgtgtcatttcttatactgtaaacatgtggttccaattctgaggtattttcccggtttgtaggacccaaaaagaagttag

SEQ ID NO: 814 - DNA, 1247 bp, Homo sapiens
taaaaattataaatgtcatacatgctacttaagaaaacacggaacattaaaaaatgaaaaatctgatcatagtttcactttcaatttattggtatatccttctgcgccaaggttttttgttgttgcttaaacgtttgccgccacttattccctccccacattttaaaaggaagataatttatgtagaattatgtagaaagtgaggtatcaattagtaggttggatttataaagaacagaagaggagccacactggcctttggggtaaagccaaccatattaactgtccagccctgttgtcaggtagaggaagtattcgtttgagggagatgtgagcctccctcattgtgaagatagtttttgatcaattattcaatatatacaggtttggagttcagtatgtcttctagaactactggcggcagcttctttcgttgacgtgggctacaatggttgctaaaacctgcgtgccagaagccagaggtggggaggcgccatttgctaaaccggaactggttaaaatctcagggtggagaccattcccagtcagcaagggcttgggaagtgcatacagttcctgctcctggtgtctactctgaagagcacagagtagacgtttgtctgccatttcaccggcagtaagatcagcagctgctggtgagcaaagaggtagtagtgggtcactggactggtgggcgccggggccgcgcgctagatggagaggtcagcggcgaacccagctccatggcctagtctcgtcagaccgagcgcggaccctgccggcctccgttctcttccgcttgtctcaggtaaagcgcagatccctccgccgcagcgtgcgctcccggtagcgctgcgatcagcttttcggcaatacccggatggaagtgtaatggccgccatcagggactcgcaggcaatgggtactacgacaggtattccccgtcagcgggactgcccagaccttttaggatgtcagaacttctagagggccacccagcaggcaaacggcgagtttgtggaccgtcagggtcccccaaacaggtccagggatccgcctcttgtgagaggaagcgcgagttaaatagtcccggccattcagcgcttccgcttaacttgccgcaaagtttttctggagaagtcggggtttttttgccgagcgcttttgccgactgctagagcttacccttactttcttaacctggggttgttttacttccgggctttttgaactctacactctcctac

SEQ ID NO: 815 - DNA, 1196 bp, Homo sapiens
gcaagaatagccaagaaacccttgaaaaagaaaaacaaggaatgggaagggactagccttcctagacattaaagtacagtatgaagcctctctaataaaaacagcgtggtattgctgcatgaccaatggaagtaatgagaaaatatgtagataaatagaagattataagcaaattaagtatattatgaatgtggcatatctaatggggaaaaataggcttttcaataaacagtacaattgcacagccattgggaaaagtacaaaacttagattcatacctcaaatcatttgcaagagtgaactcccaatggatcaaaaatctaaatgtaaaacatgaagccataatatacctgaagaaaacacagttaaatttctttataaacttatctatgatttaaaatctagaactaataaaagaaaatcttaataaatttaacctgagaaacataaaaattttttcatagcaaaaaacaccataagcagtatcaaaagataaaagataaattgggagtcaagagttgcatcatatatcacagaaccaaaggctaatatctccttaataggtagagatcctaaactttgagataaaaaaaaaaaaaaaccaactagacaaaaagtgggcaaaaccatgaacatgaaaggcaggaggcctttaaatggatgaaaagtatgcttaaccacactcctattaagagaaagattattataatcatgctgaagaaatatttcagataagcaaaaatctaaaagtctgatgatgctgttgttaaggctgtgaggaaaagacaccctttgcttgcaaaatgttgtactcccctaggaggggatttggcaatgaggtaggaggtggggcttggacaccagaccaaattgaggactgtataaaacaagtcaggctggaagcacctcccatgtcagtttaccattgccatggcaacacccagaagttaccacccttttctctggcaatgacctgacaacctggaagttaccacccttttcctagaaatttctgcattaaactaccccttaatttgcatctaattaaaagtggatataaatatgagtgtagctctgcctctcagccgctactctgtgcacaccgtctataagtagtcctgctctgcaaggagcagtgcttctgctgctgctgtaggctgccgcttcaatacaagttgctgtttaacactattgct

SEQ ID NO: 816 - DNA, 1172 bp, Homo sapiens
aatagtatatcttcaaatcaaagaaggcatgttttttgatttaacaaccttttgccattatcaaattattcttgctttataagagatgtattttaattctgtagttactgattatacaagaaataattgctacttgattagacttggcgtatgatggtcagactcagtgtattatggtatcaggtgatttgcaaagcaaatgatacagttttagtaagttcagagagaatactaacataaggatattttctttaaaaaagaataactttccagagcatagagtatttagtgtttttaaatgatggatactgctctgtatgtatttgtttcaaaacatcttattttatctttgcaggagcgattggttacatgggaacaagtgcctttgtccgaaaaatctatactaatgtgaaaattgactagagacccaagaaaacctggaactttggatcaatttctttttcataggggtggaacttgcacagcaaaaacaaacaaacgcaagaagagatttgggctttaacacactgggtactttgtgggtctctctttcgtcggtggcttaaagtaacatctatttccattgatcctaggttcttcctgactgctttctccaactgttcacagcaaatgcttggattttatgcagtaggcattactacagtacatggctaatcttcccaaaaactagctcattaaagatgaaatagaccagctctcttcagtgaagaggacaaatagtttatttaaagcatttgttccaataaaataaatagagggaaacttggatgctaaaattacatgaataggaatcttcctggcacttagtgtttctatgttattgaaaaatgatgttccagaaagattacttttttcctcttatttttactgccattgtcgacctattgtgggacatttttatatattgaatctgggttcttttttgactttttttttttcccaatccaacagcatccttttttttaaaagagagaattagaaaatattaaatcctgcatgtaatatatctgctgtcatcttagttggaccaacttcccatttatttatcttaaaactatacagttacatcttaattccatccaaagaagatacagtttgaagacagaagtgtactctctacaatgcaatttactgtacagttagaaagcaaa

SEQ ID NO: 817 - DNA, 1223 bp, Homo sapiens
aatgatgcctaaacatacagtaaaattagaatcagaaatacttctttaaaaaatattcaaaatgtgtttgtttcccatgggattattctctatcccacacgaatgtaaaaaaatccacattaatgatccatttaagtatagttttattgggtccttttctaatgattaaaggttctttctcaatttcattcctcagtcctgcaagtaaggactcatactgaagagtactgaaacaaggacttcttgtcagaaacagcttctggaatcttgggttttgtttttgttttttgacaaaatacactattggccatgtccatcacgagagtgtttgtagtaattaattaccttgtacaggacctggcacttagtagcattcttcaaatgttccctcagtgatccttttactctccttgtcacttatttgggagaaataggggcacgtgagataagaagaagaataattttgatgttggtatgcttgccctgttacttatagacagtctttgtcataggcaaacttgaatttgatttaaaatagggctgggaaaaatattcaataactgtaagcccccttttggatgccaaacttagaattttgtacattctctgatgaacaagcatttagatcgtaacatggtaaagcctattaccagccaatgttgttagcatctttgtatgcacatcactgtttgtgcaatatatgaatattttgttgcattgtattcttatataaaaataagtagaaaacataaaattgaaattgctgatgagaagccttgtctcgtgaatgtgatacacttgagacacggatggaactgatcaggagtgccaagtcaaaagcagcagatcttaagccctcactggttgttcctttaacatccaaaatggttggttatatgtaaaagaagaaaatgaaataatctggatgaaacactgggactgtgttatcaaagaatgtctgtagtgatgaggtgaaaattttcattttccagaaacagaactgctcatttataacataaatatattcaacttccacatactcaacacatgtgtatacatttttaggagtacattatgtaacaaaaccatggatttccaatacaatgagaagcagaaatgacactgcaagctagggtccaaagaaaccattaaaaaattttctacatgatgcttaggcagacagctctgctgccaccatccttgcccaagattttacaagctgg

SEQ ID NO: 818 - DNA, 1242 bp, Homo sapiens
aatacatgaaatgtgctccgtattcaacacagctttctgcccgggcacactttccaaaccagggtgcagagaggtgaagcctaattagaatacaaatatgttgctgagctgaagaagcagagatcagagttccaaatggtggtagtggctgtaatttttgagcggaatagaagaaagtagaggtgtacacagaaaaggagctcaagaaatacaaagggattcccttagtctttggctgaatactaagtggtacatgcacaagaaaacatccacaaattctggcagaaaacagctactggtgggttgcaagaagagagataacttggagtcgctgggagagtgtaggaataccaaattatagttctgaatagaaaaaagtacagagagtctctctgagcctacactggcttcagagcctgcctgattaaaaaaaaaaaaaaggctgggagcggtggctcacgtctgtaatcccagcactttaggagggtggatcacttgaggtcaggagtttgagaccctccctttctgtttctctctctctcgctctctctctctctgcctgtttctctccttctctctctgtctgtctctgtctttctctgtctgtctctttctctgtctgtctctttctctctgtctctgtctctctctctctctctctgcctgtctcactgtgtctgtcttctgtctcattctctttctctgtctgtctgtctctctctctcccttcctgtctgtttcggtgaaaccctgtctctagcaaaaaaagaaaaaaatatatatatgtatatatacacacacatatgtatatacacacatatgtatatatgtatatacacacacttatatacgtatacacacatatgtatatacgtatatacacacatgtatatacgtatacacacatgtatatacgtatacacacatgtatatacgtatacacacacgtgtgcatgtatgtatacacacacgtgtgtatatgtgtgcgtgtgtatacacacatatgtgtatatgtgtacatgtgtgtacacacacatatgtgtatatgtgtgcatgcgtgtatacacacatctatgtatatacacatatatgtatatatgcatatatgtgcatgtgtatatatatacacacgcatgtgtatatacacacatatatgtgtgtatacacatatatacacacatatatgtgtgtatatacatacatacacacatacgtgtgtatatacatacatacacacacata

SEQ ID NO: 819 - DNA, 1163 bp, Homo sapiens
tctgttgcccggctggagtgcaatggcacaatctcggctcactgcaaccttagcgtcccgggttcaagcaattctcctgcctcagcctcccaagtagctgggattacaggcgcctgccaccacatctggctaatttttttgtatttttagtagagatggagtttcaccatgttggccaggctggtctcgaactcttgacctcaggtgatccacttgcctcagcctcccaaagtgctaggattataggtgcgagccaccgcgcccagcctagacttgtatcattcttaaagtccagaatcccagaaggaggcatgtgtctctttcctttttttgagaccgagtctcgctctgtcgcccaggctggagtgcagtggtgtgatcttggcttactccaaactctggcttctaggttaaagtaattctcgtgcctcagcctcttgagtagctggcaccacaggcgtgtgctaccaaacctggctaattttttgtatttttagtagagaaggggttttgccatgttgcccaggctggtatcaaactcctgaactcaagcagtccactcttggcttccgaaagtggtgggactactggcatgagctgcggcacctggcctgatgtgtctctttctgtatagtaccagccaaactgagtggatagaaggacattggccaggcctgggtcatgtggcccatccctgagccagtcagtatggccagtggagtgtggttctctgacttgaccagggacaagtgcccgcttttggagaggggcttaagatcagccttcacttaagggcttgaaggagaagagtggttcttcaaatgaaaattggatgctgttatctaacagaaatggatataggttaggcaaaaattgataaatattctaaccatgaatctagatctaattttgaagaaattgactgacttgggccatgtggtgggttgaattgtgtcccccaaaaagatacaatgaagtcttaacctccagtgcctgtgaattttagcttatttatacataaggtctttgcagttaaaattaagatgaagtcatactatattagggtggcccctaatccaacaagtgataactccagaagaagggggaaatgaggatacagacacggaagatggaggcagggattagagttacactgccacaag

SEQ ID NO: 820 - DNA, 1208 bp, Homo sapiens
gagaagagagaagacgtccttattctgggaggccagtattatttatacgaaaaccaaagatatcacaagaaaactacagacaaataccatttatgagtaccagcacaaaaaaatcctcaacaaaacattagcaaatcaaaatttgcaacatataaaaagtgttatacaccacaaccaagtggaatttatcccaggagtgcaaagttggtttaactatttatttatttatttattatttgagggtctcgccctggtcttgccctgtcgtccaggctggagcacagtggcacaatcatggctcactgcagccttgacctcccaggctcaggaaatactcctgcctcagcccccaagtaggtgcgaccacagatgtgcaccaccatgcccagctgttaataattttttaactgatttgtagagacgggggtctccctatgttgcccaggctggtctcgaactcctgggctcaagcgatcctccccagagagctggaattacaggcatgagccgctgtacctggctggtttttaacactcttaattactgtaatacaatgtgttaatagagtaagtgacacagaccacatgatcatctccgtagacaccctccaaaatggcatttggccaaatccaacacgttttcttgatgtaaaaacaaacacaacaaactagcaatagaagagaactttctaaatctgaactacaaaaacactcagctaaaagatggaacagcttcccccgagatcagaaacaaggcaggatgtccactctcaccatgtacatccaccgttgtacatgaggttctagccagggaaattagacaataaaaagaaaccaaagtcattcaaattgcaaaagaagaggtaaaactgtcttggttttacagatgacatgatgatgtatatagaaaatcccaagaaatttacaaaacactattagagtttaacaagttcagcaaggttcagaatacccgtcattaaaaaaaaataataattgtattgctatacactagcagtgaacaatatgaacatgaaagtttgaaaacagttctgtttacagtagcatcaaaaataatacaacacttaggaataaatataaaagaaatataagacttgtatgttgtaaattacaaaatgttactgaaagaaattacatggaaagacatgttcatggatcagaagacttaaaattgttactatggtattactt

SEQ ID NO: 821 - DNA, 1149 bp, Homo sapiens
ctccagcctgggcaacaagagtgaaactccgtctcaaaaaaaaaaaaaaaaaaaaacccataccacctttgtttcccatagtaactctaccaggtggccagagtggctcttattcctctttacatgtgtcacttacgcagagagaagtaggagttaatttgtcttaaattctctacttagtagggttgcttgcactgaagccctagtaatccccagtttattgctgcctccttgagctgacaactgcttatactctgatgctgatcttttctctattccgcaggtctctagcatcaattcacgctttgccaaagtacacatcctgtatgtggggtccatgcctcttaagaactcttttcgaggaactatccggtaagaagtatccttttcacatataccttagcaactggaataagattaggatagactaggacaccagaattttgagcaacagttacaattcctatttttcttttgcccgtttttctttcttctttgtgctttgattctcccctagtagtatccaaaaaatacatggatgatctaggacaaaaggaaaatattaacgagagggtttaaaagtaaagcaaaggctgggcgcggtggctcacgcctgttatcctagcactttgagaagctgaggcgggtggatctcttgagatcaggagtttgagaccagcctagccaacatggtgaaaccccatctctgtaaaaaatacaaaaattagccaggcacagtggctcacacctgtaatcctatcactttgggaggctgaggtgggtggatcacaaagtcaggggtttgagaccagcctggccagtgtggtgaaaccctgtctctactaaaaatacaaaaactagccggacatgttggcgtgtgcctgtaatcccagctgctcaggaggctgaagccaaagaatcgcttgaacccaggaggcagaggttgcagtgagccaagattgcgccattgcactccagcctgggggacagagcgagactctgtctttaaaaaaaaaaaaaaaaaaaattagctgggcatggtggtgcgtgcctgtactcccagctacttgtggagctgaagcaggaagatcacttgagcctaggaggcagaggttgcagtgagctgagattgcaccactgcactctagc

SEQ ID NO: 822 - DNA, 1238 bp, Homo sapiens
tggtgactggcctagctgggtcttagtcttaggtctttgccctccaagtgagtactctaggccttcccactagcggggtagggagggagggctcagactagatcctcacaatggtgtgctctcgtaggaaccatgcgaggccagcggagcctgctgctgggcccggcccgcctctgcctccgcctccttctgctgctgggttacaggcgccgctgtccacctctactccggggtctagtacagcgctggcgctacggcaaggtctgcctgcgctccctgctctacaactcctttgggggcagtgacaccgctgttgatgctgcctttgagcctgtctactggctggtagacaacgtgatccgctggtttggagtggtgagtgatgtccagggagcaggaaaaggggtgttgtggggagcagagggacatgtctctcacagacccaacccaggttttggaggccggcccccacccccagggaaactccgagtctcctttgggcatagctcttgcgccatgtctccctgaccttgctggtgttggcaggtgttcgtggtcctggtgatcgtgctgacaggctccattgtagctatcgcctacctgtgtgtcctgcctctcatcctccgaacctactcagtgccacgactctgctggcatttcttctatagccactggaatctgatcctgattgtcttccactactaccaggccatcaccactccgcctgggtacccaccccaggtgggtcctcacaggagcactgggggaagttgctggctatgggagctggtcccaggagtggggagagtatcttggtatagttttgagagacagaactggtgctgccacgttatgctctcccttcacacagggcaggaatgatatcgccaccgtctccatctgtaagaagtgcatttaccccaagccagcccgaacacaccactgcagcatctgcaacaggtgggtcttggctttgctctctgggaatcccagctgtggtccttctgtagccctagggcaaaacctaaccttgagtttgctaagacatgggtgaatcacccatcgtgtcccaggtgatgtgccctcttctcctgacacctcatccttaggatggtcctgtgagttaggcattattaccacttgtgaaaaccgaggtttggagagatgagttaccttgtccaatatcttatagccattaaactgcagagctgggtttgaagcaaggcctggctgtcttc

SEQ ID NO: 823 - DNA, 1111 bp, Homo sapiens
caggttagctgcccagagtgtgacacacattgtgcccctcttcttggatggcaacgtgtcctttctgcctgaaaacagcttcccgagcagattccagccattccaggtaacagtcttagaacttacatccttcaagctggtttttttttagggctaatctggaatgggtagaggggcagacaagcttattgctggcaggcttgatcgggctctccttcctttataggatggctcctcagggcagaggcggctgattgcactgcttatggcctttgtctgctccctgcctcgaaatgtaagtgagcacatttgggaagtactgttatttaaccttgacaaggtgactccgggctgaaatttgccacaggctaagctgatcttttacttcccccaccagagaagttagttctcatccgtcccggtccctgctgccactatgtactggttctcttggagttcaagtgttctctgggtccattacatggccaggttttctgtaggtggaaatccctcagctgaaccaactcatgcgggagcttttggaactgagctgctgccacagctgccccttttcttccaccgctgctgccaagtgctttgcaggactcctcaacaagcaccctgcaggtactgagatcagactatgtaaggagcctcccagaatcaactacccatgaaatcttatagctcagtactcattctctttttaaaaggagcttgctaataacattaacagggcttcaactgctcaagcactgtcctgggactgcccgtgggaaaagcgtcaagaccacagttgggcagagctttatagtacctaagaagagaagggagcacaaagagtctagttctgccgtcctactccctacagtggggctagtgtggataattctttattggaagtagatgaccctctcttttcaaatggcagcacctctgtattatgagaataccaggctcttatgcaggtgtccaatcattttgtccacaggcaaaaatgatattttccctttctaacagcttctcagggagctctgcacttaaagtgatttgcatttcattgctaaagggaaaatgtgtagcctttatgtcagcatttcctctctccttt

SEQ ID NO: 824 - DNA, 1152 bp, Homo sapiens
ctcgagccaccgcccatatcccctcccacggtctctagttcgcgttatggccgctgccgcggctgtggaggcggcggcgcctatgggtgccctatggggcctcgtgcacgacttcgtcgtgggtcagcaagagggccccgctgaccaggtggctgcaggtacggcagacggcgccgcgcgccttccgcatgggggccaacaggagggagcggcctcagtacaggcgccgggcgggaagggaggagcggggtgactttgagagattggtctcaaggctggttagtgagcaccgcgaggttcagagccgtaacaagttagagagttgcctgtgtcttccttaaaaccatttacacttctcatctccctgtagccaattatagggaatcattacattttacagatgaggaaactgaggctcagcgagggcaagaggacttgcgcagggctgcagaccaggcaggagggggaggtgggactcggacccaggcgttcaggtccgaaccgggtgctcacgccacgaagccatgctgtttgtgggaggttgacgtgtggaggtgcatcctcgcagcgtccgctcccgtcgcgtggcatcctgggagtggcagatggccccgcgctctgactggctggaattaagaggagttgaggagacgggccaggaggagctggagatgttctgggtgtcctccttaagactttctctccgtttcttgctaaagttcttgattagtttgctccatgacgttttatgtggcgtttgtttttgtcttcttcccagacccccactttcctgcttttgaccagttcagagatctcttagttcagacagcttatctaaaattagaataaaacgatttccaggcttccgtggagttctgagactttgctcttctaggaaaaaaaaaaaactactaaaaagttattgaatgttaggaggccttcagatcttgggtttaagtaacaatataaaattatctaatgagtagtttttttaaaaaaactttggaaatttcgtatgcttggagagaagtaaggacacatttctcttggatattgagcgtattaacctttagaatatgtaagaaaagaatagtgaatctgctagaaatataatactttgttcgttagcagtattccactttaattcaatca

SEQ ID NO: 825 - DNA, 1178 bp, Homo sapiens
agtgtccgagtcagctgcatgtgattgtcggggctgggattggggcaggcaggcgagctgtaccttcgtccacagggcatgcacatccagctctcagaaattcttcctgtcagccaggtggaagcccgggacaagtggactcttggtggctggactggaaggggaccggcggggaccagcctggaccagctgaccagagggctgcacatctctgctctgcagccgggcaagcagaggacatgcagccatagtcctcactccctttctttggttgtttttcaaaccttcaagatagttactttctgaggttgactgaccaatcgcaaggtgccagaattgtgaaatgtccagtagcacagggcatgaacacagctgcccctccagacacagatggcaccctttttactccctcctgaggccgtactttgctttggtgtagaaatggctcaaacacctggcaagtgggggtggggagtgaggcagcaggggaaaagacacatggaagcaagaagatacgcactgagctgcgcaggacctgggacagtttgaaggcctctctcctttgggcctcacctttctcagggaagccatagagaaatcggcctaggacaagtcagagagaaaagggaaactgccacttatgaggcagaatccacgtcctgttacttccaccaagcagcagcggtagcacagaaaaaagtccaagaacctaatagcctgtcctcttggaagccaagactcatcccagagcccttgcagagacccactcccgaagacaaactgaactcttacatcaaaagagttggggggaaaaaatttaaaacgagaggaacaaatgagaagattgggaccaaggactcaggaagcaaggtgggatatgttcacccatagaccacttagctcccggcatacactccggctgcgtggatcacttttacatgctgggagtcaacttcctattaaaatataaatgctaagactagctcttcctgcctctgcttgagaaacagacaagctgtaggccagcagagagcagagaggttctctatgattgtgtgcggaagtgctggcgggggtaaagcaaaaacctcccttccaggagaactgtttcgaggcttgcagccagcccacagcactgatgggagatggaggaggcttggcaaaaacccaaaagaaag

SEQ ID NO: 826 - DNA, 1186 bp, Homo sapiens
tggtggacagttaatcgtcgctttcaagggaggcacaaggttttattgctgaagttttcattgccttgctctgtgaactcttttagtgccagtgtttgatgaatggttgttttcatggctgccaagagctgttgagtaagaatgtaactgcagacagtcatttccttgctgtgtttgtccaacaaccactgtctcacagctggaaaactcattactcatgagtacttctttcccaggtacaagaacataaagatgtatttattgaacactttttagggcaatgacactgaactgttaatccaaaaatatacactggtcaaacgataagcttaaatactagagaaaatccaaatattaaggagactttaaagatacataccagtcaaatatttctttcatttgtctattcattttttctttctttttttgttttgttgcatctattcattttaaaaatggaaacctaattcatataccataatatttcacataatatgacataaaaattcccagttttatttttatttatttatttagagacagagtcttgctctgttgtccaggctggagtgcagtggtgcgatttcagctcactgcaacctccgcctctcgggttcaatagattctcctgcctcagcctcccgagtagctgggattacaggcacccaccaccatgccaggctaatttttgtatttttcatagagatggagtttcatcatgttggccaggccgttcttgaactcctgacctcaggtgatccacctgcctcagctttccaaagtgctgggattacaggcgtgagccattgcacctggccaaaaattcctagttttaaagtgtacaattcagtggttttcagtatattcagaaggttgtataaccatcaccaccatctaattcgaggacatttccatcaccccaaagagaaaccctgtacctgttagcagtcactcccagttcctccctccttccagtctctggcaaccactaatttactctgtctctatagatttgcatattctggctgggtgcggtggctcgtgccttaatcccagcactttgggaggctgaggtgggaagatcacctgaggtcaggagttcaagaccagcctggccaacatggtgaaaccccatctctagtaaaaatacaaaaaaattagccaggtgtggtggcgggcgcctggt

SEQ ID NO: 827 - DNA, 1167 bp, Homo sapiens
catttatcttatctgttacaaacaatccagttatactcttttagttattttaaaatgtacaattaaattattattgactatagtcaccctgttgtgctatcaaatactaggtctttttttttttcccttgatggaaatccaggatggagtgcagtggtgtgaccacagctccctgcagcctctgtctcccagctaaggtgatcttcctgcctcggcctcccaggtagctggggttacaggttcgtgccactactcctggctaatttattgtaattttagtagagacggggttttgccatgttgcccaggctggtctcaaactcctgggctcaagtgatccgccctcctcggcctcccaaagtgctgggattacaggtgtgagccaccatgcccagcccaaatactaggtcttaagccttaatttttaatgaggaattcccaggtgaatcagaatcaagtggttcatagattacacttggaattgctagtcttgttcagctggtcttcttcagaaacagcgctgcttctcatccttggctacaccttagaggcacctgggaactttgaaaaaggaagcttgcagggcgtcagcttgggtagggcagggcagtggtgatctttgctgctctgacctatcctcccccttcccagaccattgactcagaatctcctggtgggggagacttgggcatcatagggtttaaaggctgctcagataatttcagtttgcagctggagctgagaaccattaagtccttgttactaaaactgtggcctgtggatcaacaatatcaacaatacctgggagcttgatagaaatgcagaatctcagctccctccctggatctgctgaatccgaatctgggttttaatctattccttgggttattcagatatgcatgaaattttgagaagctccacactagtccatccctctcatttaacagaggaaactgagggccagaaagaagtgacttatgggagttagtaagtaccagacaggcttaagtgccccgcctctctgctttttcacaggactcttattttcttgctgacacaattgcatcttttgtgggtacagatcaaactaaatgtcttcatgatcacagtctcgcagggaaagcttagagactcaaaggaagagctgcaggctgcttttcccttctc

SEQ ID NO: 828 - DNA, 1240 bp, Homo sapiens
aaacttaaacctgcccaaaactgagctcctactctttttgccaaacacactccttaagtgatcctcccacctcagcctccttagtagctgggattacaggcgtgagccaccatgcccagctaatatttttaattttttatagaaatgggctttcactatgttgtctaggctgatcttggaactcctgggctcaagcaatcctcctgcctcagcctcccaaagtgctgggattacaggcgtgagccactgcactcggccttatgtctattcttaacacagcagtttagcaaatgaacgcagaaacagaaaaccaaataccgcatgctctcacttatgagtgggagctaaataatgagaacacgtggacacaaagagggcaacagcaggcactggaggagggagaggattagaaaaaaatacctattgggtactatgcttagtacctgggtgatgaaataatctgtataccaaacctctgtgacacgaatttacctagataacaaacctgcacatataccccgaacctaaaataaaagttaaaagaaaaaaaaaacacagcagctagagttccttttaaaatataagtcagccaggcacggtggctcacacctgtaataccagcactttgggaggcggaggcaggtggatcacgaggtcaggagttcaaaactaacctggccaagatggtgaaaccccatctctactaaaaatacaaaaaaattagactggcatggtggcaggcacctgtaatcttagctacttgggaggctgaggcagagaatcgcttgaacccgggaggcggaggttgcagtgagccaagatcacaccactgcactccagcctgggggacagagcaagattctgtctcaaaaaacaaaacaaaacaaaaacaaaaacataagtcagatcatgtcacctttttgcaacacacacacacacacacacacaaatgttgcaatggcttgtttttatgtcactgagagtaagacccaaagtccttacaaaggccttcctggctctatcacattggcacctcccctacccctcaactccctgaccttggctcccactactttcctctcccacgttctacagccaccgcattggcctccttgccattccttaagcacatcagttacactcccaatgcatgacctttacaccctgttctactgcagagatctccacagggctccctacctcaccgccttcagggctttattgaaacatcacctcaggg

SEQ ID NO: 829 - DNA, 1188 bp, Homo sapiens
tggacgaacactcccgtcccgagcacagacgctgggtatttggctgccagcccgggcccgccaggccgggcctggcaccgccaacacctgctcggcgggaacaggaagacctgtgttcgggaactccctccggccacctccccgtatcctcctggccctcgaaggtcgaaaggtggcctctcagggacacccgccgctcgctcggctcctcccctcagccgggagacccaaggaataacagcctctgcgataggagcacgctctaccaatcaaccgtagtcttcgcccacgcctcagccggaggaaattgcattggttgcatcattctcggcagccgataaattgttttcttggattggctaatagcgttccttctcccctgtgccttcgtcgtcagaagctggcgattggttaatcgcgttgccaagctttggacgcggctcgaccattggaggccgcgggcccgcccccgccggctaggtgaaggtgagtgtctcctccagtcgcaacggccagacctgacctgccagctccgggcgtggggtgaaatctcttgattcctagtctctcgatatggcacctccgtcagtctttgccgaggttccgcaggcccagcctgtcctggtcttcaagctcactgccgacttcagggaggatccggacccccgcaaggtcaacctgggagtgggaggtaaggatgtagtgctctggagtgtgagcagctcggggagtggagcggacccaacccaggtcgtggagactgtgggagaagccgaggcccagtgtggcgctgcctgaagagggcggcgccggagaggaggctggatccacgaaggcttcctaaaacctgcccattttacagatgcaggtgtggagtccctggaaaggggcgatgtgtccgaggccgcacaaaccaggtgtagcagccaagacacaaactcagtctttccgattccccattctgccttctttatactgcatcctcctaagaaatgaggctgccggagcttgtagagagaggtagaaaaataggaagcctgataggcttagggttctggttgctaggaaatgggtaaaggagaacttttaacgctagaaagctctgttctgagtcggtaaatatttgagtgaccaccgagtatcaatcagccaccttattaagctttgtagggggagactgaggcttga

SEQ ID NO: 830 - DNA, 1219 bp, Homo sapiens
cctaatcatggcacaatctcagaagctataaagaaaataattgactttgcatggctatagacaccataaataaatatgtgataacatggaagaatatttgcaacatgcttattagtcacatctgttatatagtcagagcttcattgtattggtggaaaaattaggatataaagaaattcagaaaagaataaatacaaataaccagtaaacatgtccaaaatcatcctcattataaaattgaaaccacgctgatttatcaatgtttacccattagactgacaaacattttaaatgttcaaaaaatagtgttgagggaaaagagcaatgacatgcactattggggagactgtcaatgaataaagccttttcttgtattttggtaataacagtcaaaatgcacataataccatttgaccaagcaatttctcctctaggaatctatcctaaagaaatttatacaagttttcaaagataggtatgtaggcatacagttatgcattgtagctttgctttaacagaaaaagagtaaacacatgtattatttttgtagcctaaaaaaaaatcaagttttcattgaaaataaaaatgacaggtttgaagcaggacagtggccatggaagtcgaatccactaaggcgtgtgtaacaagtcacctgctgagtcaacaaaaataaataaaaattttttaaaaacaggcttgagagacacttcacaggaatagaaaatttagatagtttctaacaatgacaatgaagtaggacaggaaaaagtaattctccaaagcaaagtatgtatgtgtgtagtaacttaaaacttcagatactatgagaaactatttttaaataaagaacaatgtggtgtgctacagtttagagttgatctggaaatctggggagctattgatgctccttagttaataaattagtgatttttaaaaatatgaatccccattatccgtagcaaactaacgcaggaacagaaaaccaaatactgccaaatactgcatgttctcataagtggggctgaatgatgaagaacacatggatacatgaaggggaataacacacactggggcctgtcaggggtgggagtaggaggaaggagggcatcagaaagaacagctaatggatgcttggctgaatagctaggtgacaggatgatctatgcagcaaaccaccacggcacacatttacctatgtaacaaacctgcacatcctgca

SEQ ID NO: 831 - DNA, 1233 bp, Homo sapiens
aagtaaggagaaactttaattccaagggatgatcagaatgagttacttttgttttgttatgccttcattgcaattactatgcagtattgataattccctggaatctcacactattgggtttgtacttttagagtgaatatgtgttctcatgcagccaaattggccagtttgatgaattatatttccatttcttataaacgagaaggagatttatatgtcttctaattgcagacatatacatgggaaaagatttaccttttaaaatttcagtattgcatttttcagttgtaaaatttctattttgatcttcttaatattctatttcttttcttttctgtttctttgctgagaccttctatctttccattcattgtaggactgcccatatttcttggttatatggttgctctaatatctttgataattccaatatatgtgtcatctcagagttggcatcttttgattgtcttttctcttgtgagttgagattttcctggttctttgtatgccaagtatttttatattccatcctggacattttgaatattacattatgagactctgggtcctgtttaaatcaaagagaactttttttttttgttttaggaggcagttgatctcaagttctgagctgctttctgtaggctgtgaatctttttttttttttttttttgagacagagttgcactcttgttaccaacactgagtgcaatggtgtgatctctgcttactgcaatctccacctcctgggttcaagcgattctcctgcctcagcctcccaagtagcttggattacaggcatgcactaccatgcctggctaattttgtatttttagtagagacagggtttcaccatgttggtcaggctggtctcaaactcctgacctcgtgatccgcctgcctcagcctcccaaagtgctaggataacaggcgcaagccactgcggccggcccgtgattctattagttcatttttcttttctttctttctttctttctttttttttttttttttttttttttgagacagagtctcgctctgtcatccagactggagtgcagtgtcgtggtctcggcccactgcaacctccgctccctggttcaagcgactctcctgcctcagcctcccgagtagctgggactataggcgtgtgccaccacgcctggctaattttttgtatttttagtagagacggagtttcactgtgttaaccaggatggtcttgatctcctg

SEQ ID NO: 832 - DNA, 1173 bp, Homo sapiens
agagatgcttaaatccaagttgtttctccagctgtcacctcccccaggagatcaggattccactgacgtcctgggcagccagtgaatttaattttccatgagaaacaacagagttaacctgtggcattaggagacctacttcatgtggaccctttttttccttcagtttaacttttctggagcagtgtgctgcgtagttcggcctgagtttgtgcagcttgttaagacaactcttgtgtacgctatgttgaagctcaacaaaaaagtcatgggaccacttctagaaatctttcagctgtcaggcctgtcagtctcatgacagtttgttggttgtgccaaacactttatttgggaaaggaaagcccagatttgaatgggtctttcccctgggccttatcctatagaggcatttgtaatatggagaaaataatttttcatttttgctcatttaattctataaattctctttataaatgaattttgtgttctttagttctccttaaaagaacttttgaattataaaaataaaatctttacctgtcgaattgttgctgcagatgattgttgtggaaaatctggatcattgacctctgtgctttcattcctagagatgttttatagttacatgagcaaaagctgttgccccaaagtgatggccctggaggcggggctgaggaacagggaaatgccgctgtgaagtcttaaagcacttctgcttaaactcccatgtgtgaggagtgtgcctccctgtgccctctcagctctgaggctggccgtctttcggggtgttccttttggcaaatatacactgtaatcttgagtctaaatttatatgttgaaatgctaccttttttaaaataagaaactaaataaaattattttactatcagtgatttgtgtttttttttcccacgtcttcatttttctgtcatcttaacatgctcctaaggctgtcttgcacatttcaactagggagccagtttatttgcgggtttaacttaactgtagaggcttttgttatactcttgccagaatactgcctacctggtataagaatgtttaaaacaaggtgtccactctttgctgactcctggaatttaacaaggggtgttcttctaatcctttgtgggacagggcctgtggcagaggggcaaggagggaggatggagcatc

SEQ ID NO: 833 - DNA, 1330 bp, Homo sapiens
aaataggctgggcgaggtggctcacgcctgtaatcctagcactttgggaggccgaagcggttggattgcctgagctcaggagttcaagaccagcctgggcaacacggtgaaaccctgtctctactaaaagtacaaaaaaattagctgggcgtggtggtgcatgcctgtaatcccagctactcgggaggctgagacaggagaatagcttgaacctgggaggcagaggttgcagtgagccgagattgtgccactgcactccagcctgggcaacagagcgagactccatctttaaaaaaaaaattatataaagtttagctttaatatgtaaaatatttaatatttttatattaatatttaaataacattcatttaaaaagtttttaaagagtatctggtggtaaccccagagacttcacagggaagtgtgtggtcagtacatgtaaacagcatagatagtaagttccttgtttagaaaaggaatgggtagttgaggaagttccaaggaagatgtggggcttgctggataagaatttggaagaaagtgagtattttgtgtggaggcccagcatgagggaaagcttagtggtaggaaatagtctcaaagcctgcatggggctagcagctcagaaaatcagattgtaaatcatttgtagttgtggtggttttctttttggcacatttgttaagttttcaaatgggcctaactctgccacatatataatatcggagatggcaaaggcttgtgacggagatatctctcttaagcctttcctgcatcagagaatggctcccacatgtgtcaggctatctcataagtttaagtccttacagacaggctgacacaggcttgtctggcctgaggatattctgtgctgaggggtgtttctccacccctgtgatggatttgctacttctcagagactgtgcaggcacaacttctctgggacctgcacaaggaatttctcctgtctccccaacccccaggtcattcctgtcccaatcagctgctctactactgatgacattaaagatgccttcattacccaggcacaggagcagcagatagagctgttggaaatcccagagcactctgacatcaagcaggtgaaacaggggatggtgatattcagggaagagtaaatatctgttttttttgttgttgtttgttgtttgtttgtttgtttgagacagagtcttgctctgttgcctaggttggagtgcagtggcatgatcttggctcactgcaacctccgccttccgggttcaagtgattctcctgcctcagcctccccagtagctgggactacaggcatgcgccaccatacctggc

SEQ ID NO: 834 - DNA, 1330 bp, Homo sapiens; identical to SEQ ID NO: 833

SEQ ID NO: 835 - DNA, 1187 bp, Homo sapiens
ggaggctgaggcaggagaatcacttcttgaacccaggatgcagaggttgcagtgagccgagattgtgccactgtactctagcagcctgggtgacaaagcaagactccatctcaaaaaaaaaaaacaaaccaaaactagaagcccagtctgtgggctccagagggagagcttactttccaaaaaaggttttaataatttgtgttttgggtattgatatggaggagttaccttttaatctctggcttccaacagttgttcctatttctacattcatagtagttcagctcccttatttgttaagattttttctctgattgccatacttatgaaattcaatgtgcagttccttctgtccacatctgtattcatgtataaatttcaaagacatttcaaaatgtcttattatttatttgcatttcttgataacttttggtctgtatggatgactaagtttttgtttactagggagaagtggataccaaaaaatgtggttctgctttggtttccagtcttgccacgggcttgaaaccaagataccattttgctgctttggaaaagacctattatgagaggcttccatatcggtgagtagcatttcattcttcttggctttttgaagaatttgccatggatcttctgtataaacttctcttgttcgtttttaaccatataacatcttggttccatttggttactcagacactgaagtaagtgactctcaagtcattcatcttctctgagtttgttccctaatttgaaatcactttggaaatccttcagtttcagaatcaagaacttgtatcagttttttccttttcagggccaggcatgatggtgtgtgtctgtggttccagctacttggaaggctgaggcaggaggctcgctcgagcccaggagttcaagactatagtgtgcaatgactacgcctgtgaatagccactgcactctagcctgggcaacatagggagccccatttctttaaaaaattttttaccacaaataaatatgagataatgtatatgttaattagcttgatttagccatcccacagtatatacacatttcaaaacagcatgttgtatacaataaaaaatacaaattttagttatcaattaaaaataaatgagagggaaaatttaaaaaatttttttttgtcttttttttttttttgagacggagtctcgctc

SEQ ID NO: 836 - DNA, 2740 bp, Homo sapiens
gaatcttctgggtagtcccctgttgattatcttcagcccaggcttttgctagatggaatggaaaagcaacttcatttgacacaaagcttctaaagcaggtaaattgtcgggggagagagttagcatgtatgaatgtaaggatgagggaagcgaagcaagaggaacctctcgccatgatcagacatacagctgcctacctaatgaggacttcaagccccaccacatagcatgcttcctttctctcctggctcggggtaaaaagtggctgcggtgtttggcaatgctaattcaatgccgcaacatatagttgaggccgaggataaagaaaagacattttaagtttgtagtaaaagtggtctctgctggggaagggttttcttttctttttttctttaataacaaggagatttcttagttcatatatcaagaagtcttgaagttgggtgtttccagaattggtaaaaacagcagctcatagaattttgagtattccatgagctgctcattacagttctttcctctttctgctctgccatcttcaggatattggttcttcccctcatagtaataagatggctgtggcatttccaaacatccaaaaaaagggaaggatttaaggaggtgaagtcgggtcaaaaataaaatatatatacatatatacattgcttagaacgttaaactattagagtatttcccttccaaagagggatgtttggaaaaaactctgaaggagaggaggaattagttgggatgccaatttcctctccactgctggacatgagatggagaggctgagggacaggatctataggcagcttctaagagcgaacttcacataggaagggatctgagaacacgttgccaggggcttgagaaggttactgagtgagttattgggagtcttaataaaataaactagatattaggtccattcattaattagttccagtttctccttgaaatgagtaaaaactagaaggcttctctccacagtgttgtgccccttcactcatttttttttgaggagaagggggtctctgttaacatctagcctaaagtatacaactgcctggggggcagggttaggaatctcttcactaccctgattcttgattcctggctctaccctgtctgtcccttttctttgaccagatctttctcttccctgaacgttttcttctttccctggacaggcagcctcctttgtgtgtattcagaggcagtgatgacttgctgtccaggcagctccctcctgcacacagaatgctcagggtcactgaaccactgcttctcttttgaaagtagagctagctgccactttcacgtggcctccgcagtgtctccacctacacccctgtgctcccctgccacactgatggctcaagacaaggctggcaaaccctcccagaaacatctctggcccagaaagcctctctctccctccctctctcatgaggcacagccaagccaagcgctcatgttgagccagtgggccagccacagagcaaaagagggtttattttcagtcccctctctctgggtcagaaccagagggcatgctgaatgccccctgcttacttggtgagggtgccccgcctgagtcagtgctctcagctggcagtgcaatgcttgtagaagtaggaggaaacagttctcactgggaagaagcaagggcaagaacccaagtgcctcacctcgaaaggaggccctgttccctggagtcagggtgaactgcaaagctttggctgagacctgggatttgagataccacaaaccctgctgaacacagtgtctgttcagcaaactaaccagcattccctacagcctagggcagacaatagtatagaagtctggaaaaaaacaaaaacagaatttgagaaccttggaccactcctgtccctgtagctcagtcatcaaagcagaagtctggctttgctctattaagattggaaatgtacactaccaaacactcagtccactgttgagccccagtgctggaagggaggaaggcctttcttctgtgttaattgcgtagaggctacaggggttagcctggactaaaggcatccttgtcttttgagctattcacctcagtagaaaaggatctaagggaagatcactgtagtttagttctgttgacctgtgcacctaccccttggaaatgtctgctggtatttctaattccacaggtcatcagatgcctgcttgataatatataaacaataaaaacaactttcacttcttcctattgtaatcgtgtgccatggatctgatctgtaccatgaccctacataaggctggatggcacctcaggctgagggccccaatgtatgtgtggctgtgggtgtgggtgggagtgtgtctgctgagtaaggaacacgattttcaagattctaaagctcaattcaagtgacacattaatgataaactcagatctgatcaagagtccggatttctaacagtccttgctttggggggtgtgctgacaacttagctcaggtgccttacatcttttctaatcacagtgttgcatatgagcctgccctcactccctctgcagaatccctttgcacctgagaccctactgaagtggctggtagaaaaaggggcctgagtggaggattatcagtatcacgatttgcaggattcccttctgggcttcattctggaaacttttgttagggctgcttttcttaagtgcccacatttgatggagggtggaaataatttgaatgtattt

SEQ ID NO: 837 - DNA, 1038 bp, Homo sapiens
tctccttggtttgctagtatcttgggtgtattctctgtaagtgtagctcaaataggtcatcatgaaaggttaaaaaagcgaggtggccatgttatgctggtggttaaggccagggcctctccaaccactgtgccactgacttgctgtgtgaccctgggcaagtcacttaactataaggtgcctcagttttccttctgttaaaatggggataataatactgacctacctcaaagggcagttttgaggcatgactaatgctttttagaaagcattttgggatccttcagcacaggaattctcaagacctgagtattttttataataggaatgtccaccatgaacttgatacgtccgtgtgtcccagatgctgtcattagtctatatggttctccaagaaactgaatgaatccattggagaagcggtggataactagccagacaaaatttgagaatacataaacaacgcattgccacggaaacatacagaggatgccttttctgtgattgggtgggattttttccctttttatgtgggatatagtagttacttgtgacaagaataattttggaataatttctattaatatcaactctgaagctaattgtactaatctgagattgtgtttgttcataataaaagtgaagtgaatctgattgcactgggtctgggagtttcttttggctgtgattcaaagtcttgggatttgtctctggctcatatctatgtctgtacctttaagagtataaaagaagtagaagttacaatggttgactcataccccattaacctgccctgctgtcctaaaggtaactttaggttaaactctgggacgcaggaagccaggagtctgctgccattaaatcaaacacattaacaccagctggcaacttggccctggggaagtgccagggttctcgggtgtgtcacgtggtcggtcacatagacctaagataaagacactgggagaggaaaagaccagcaggagaagcgctccctgggaaagcagttttttgctcttgcccaggctggagtgcaat

SEQ ID NO: 838 - DNA, 1149 bp, Homo sapiens
agtcctcttgttttgtgtctgctgtgtgttcttgcccttccattgtcagttctgtacatcctggttcagcttgtctcactgtggtagccccttctgcttgtcttcagccatcttggtttaatcctcataggtcatggatgaatggagccttgctgagcactttgagggcatttctgttgggcacaacctcagaaacgggaagtcttgaggcctgggggcgtgtggtcagtgaggcctccagaggtgggttaggggtgggcacctacaagggccagttgaggggagaggtgcagggattgctgaggagactttgtgagaatgatgtcaggcccgggaagctggtgtggaagaactgagctgtcagaaggagataccaatatcccctttgcagggtggtgatgggcatcaaacatgacgtggaacatgtccccttcatggagggtttccatctaaatgcatctgtgtgccttagggatcagtagttcaggggtggtggacttttttgagtgtctcctaatttctctgaggtgtctttggctctgtgtcaccaaatgtgcctgacctctgcatcccagtggttgctgaaagggaaacagtatattgcgtagtcagatgtcaggagtagagatcttaatgagaaaggccctggcagctggagagatgagaggacctagtggtcagcttatacccagactatctctccactcctccaagagtttgagtcccatagctgatgaaagaatttacatatgggctcccccctgctttcccactgaaaatctattctcatattttgggaaggagcatatgtcctttaactttcaatggtaaacaatctaggatagtgtttaaaggcatggattttggagtcacatatagttggtttgaatttctagcttcactacttaccagctgggtttgaccttggttgatttacttaacctctctgagcctcagtttcctcaactataataacatgggtggagggaggcatgttgaaaatatctacctcagggttgttggaataactgaaacaatgtttgtaaagctttagcacagtgcctggcaagcacttaataaatggctgtggtggtggtggttatatttattatgtgatttattcagaaacttggtttcagtgatctctaa

SEQ ID NO: 839 - DNA, 1216 bp, Homo sapiens
atggtaccccttgtcctcctactccgcggcgctcctcctagccaggcaccctcaggaagtcagctcagccacactgggccttttccctccactccgctgcctcggccgggcaggagagtggctcagcagctctggaacctgcagcccccctgccccgccacagtccgcttctggctgaccccgccggctttcccggcgcaggtactacgagaccggcagcatcaagccgggtgtgatcggtggctccaagcccaaagtggcgacgcccaaagtggtggacaagattgctgaatacaaacgacagaacccgactatgttcgcctgggagattcgagaccggctcctggccgagggcatctgtgacaatgacacagtgcccagcgtctcttccatcaacaggtgagcaagccacccgggttttcagggctggactccagctcctggctcctgcctgcaggggtgtcccacgcccagtctctgctctttgtccagcctctgccctttctccctgcttccagccccaaatccttctgtcagagaaagggaacctgtgaggcagagagttagacagacagacagggctgtctgcagttcagggctgggtattccctgccaggcttctcccgccggcgtcctggaaatgaatccaagtgtttgtggtaattaagactccaagattacgagcatccagccttgggatcttgagacaatcacagcctgcagccggagcctttaaaatgaccagtgtctattcatccctccaaacagactggcctttctaaaggctgctccttccccaggggccgccgcttgtcctggctccctcaccctccctgccaactcccacaaagctcacctcccaggagtctggtcttgctagccagctccacacaaatttctggcctgtaggcactgggatccgggcttgcagaacaaatgccaaccaccagccagcaactggcagggagtagaggagctggacaaggagggagtgccaagcagggagggagaactccagactttgagactgaaccttgggtgataccctcaaccacctaaggtgcctgtctccaggctgaagtctttgcactgatgacaggctcacacacgtgaggacagcacagggctgagtcagcttgacgtgtaggatatttaggtctcctggtctccaaacccctccagtgtgctctcggggagaacacatgtgcacactcca

SEQ ID NO: 840 - DNA, 1196 bp, Homo sapiens
gtaagaaccggttctgagctggcgtctgagctgctgcggggtggaagtggggggctgcccactccactcctcccatcccctcccagcctcctcctccggcaggaactgaacagaaccacaaaaagtctacatttatttaatatgatggtctttgcaaaaaggaacaaaacaacacaaaagcccaccaggctgctgctttgtggaaagacggtgtgtgtcgtgtgaaggcgaaacccggtgtacataacccctccccctccgccccgccccgcccggccccgtagagtccctgtcgcccgccggccctgcctgtagatacgccccgctgtctgtgctgtgagagtcgccgctcgctgggggggaagggggggacacagctacacgcccattaaagcacagcacgtcctgggggaggggggcattttttatgttacaaaaaaaaattacgaaagaaaagaaatctctatgcaaaatgacgaacatggtcctgtggactcctctggcctgttttgttggctctttctctgtaattccgtgttttcgctttttcctccctgcccctctctccctctgcccctctctcctctccgcttctctccccctctgtctctgtctctctccgtctctgtcgctcttgtctgtctgtctctgctctttcctcggcctctctccccagacctggcccggccgccctgtctccgcaggctagatccgaggtggcagctccagcccccgggctcgccccctcgcgggcgtgccccgcgcgccccgggcggccgaaggccgggccgccccgtcccgccccgtagttgctctttcggtagtggcgatgcgccctgcatgtctcctcacccgtggatcgtgacgactcgaaataacagaaacaaagtcaataaagtgaaaataaataaaaatccttgaacaaatccgaaaaggcttggagtcctcgcccagatctctctcccctgcgagccctttttatttgagaaggaaaaagagaaaagagaatcgtttaagggaacccggcgcccagccaggctccagtggcccgaacggggcggcgagggcggcgagggcgccgaggtccggcccatcccagtcctgtggggctggccgggcagagaccccggacccaggcccaggcctaacctgctaaatgtccccggacggttctggtctcctcggccactttcagt

SEQ ID NO: 841 - DNA, 1128 bp, Homo sapiens
acttaatacatcttagctgtgatgattaacttttgttctttcttcagatatcagttcagtcatccgatcttccttggggaaatacccattaccgtcctgaacccttgtcatccactacttggctataagctccagaagtgacaagacacttcacatcttaaatatgtttcctagtttataattcatttgggcagtaaatgtttgttgagcacttactctgtgccaggctctgtgtttgagtcatccttaccaaatgtacatagccacagccactcagatacaaacatatacgtacacatggcagtaaatggcaaagaggacagtctgcgtagctagacccacactcatatgagtcacttacctgtatccctgctgctctcacagcctcgatttcctctctctatgtcctgtatcagtgctgtcctgggacagaagatcaggttttatgaacaaggggaactgggtttcagtttcccagtgaaagggtagataggtctgttactaataactagcccctgcactcccccagtagctatcaggccttcctcctccactcagaccacatgtgactgtcaccccccaccacttcccacctgcttccctgggacctgttggctatggtggtggctgctgcgcaggcatgggtgccagggtcccagccacagtaggggtctcgggccaagatgcagtcatagcaggatcggtagcgggagcagctggagagtggtagctggatgactccgctaggagcccccacatagaggctgtgctgggagccagataggacagttggtcggcagcgtccccactcatacagatacacagcctctgcccaacctccccactccctcttcctatttcagcaaggctatattaagggtcacagagaagggctacctgcaatagagagatgactagattttccacagactgggactccctgaacacttgtgtctcttcaataatgtgcatcccagagcccaggactacggccttgtggatccagccatcagctggtatggaaagagcagagagttagaccccaactatgggatctgctctcagcaccctgcaagaggcctaatacgaacagctcaggagtcctgaggtccagaacaaggactcagc

SEQ ID NO: 842 - DNA, 1100 bp, Homo sapiens
tccgttagttagtttctctccgccacctcacctctatgaccctctatacagttcctcactgacacagtttctttgcatcatcttctcacctctactgctcctccacagcatctcctcgtcgtcctcatttctatagtcatctgcatcctttttgtagtccctttgccctaggccccgactagagaccctcttccgcttctccttcccctcactgggacctcaacacggcgagagcacccagcacgactcccgccaatcccccggcccaaaggaatgccagtctctatcctcccccgtgtcttcactccgctctactactccgagctccgccgcgccggcccccagccccaggttaccacttttctctctcccacttcgccggcaacgtgagtctcccgcacatgctactcgccttgacctcggaagcaaaactccgggagcggtcgtcccggaaccggaagcctcgaggtttagtcccgcccccctctcctcgctgcttaggctccgcggcctccaagctgtagctatgacggcgcgcgggactccgagccgcttcttggccagcgttctccacaacggactgggtcgctatgtgcagcagctgcagcgtctgagcttcagcgtcagccgcgacggcgcctcgtctcgcggcgccaggtgagccaagggaagtgcgcaggcgcgggtcggggtgggtgtggaggtggcaacgactccccgggtaggtcgcccccagtcaggggtcatactgctcactgtcccgggtcgcttagggagttcgtggagcgggaggtgatcgacttcgcccgacggaatccaggggtcgtaatatatgtaaactcgcgtccgtgctgcgtgcccagagtagtggccgaataccgtgagtggggccgggctcgggctggagggcgggatcaggggctcgacccgctatcctccttctcgcttggtcgcaccggccagcttccacccactctcacccctcttctgccagttaacggggctgtgcgcgaggagagcatccactgcaagtcggtcgaggagatctcgacgctggtgcagaagctggccgaccagtcgggcttggacgtgatccgcat

SEQ ID NO: 843 - DNA, 1180 bp, Homo sapiens
gggcggccctaggagccgcgcacaacagcgcaagcgggctggataccgggagccgattccagggcgcccacagaagcagaatcagaggggtaggcgggggtggggcgtgctgttcggcgctgtggccaaaatccgcccggcgctgaaagaggggacgtgggtgtgagtcccagcatcagccagggaatccgcccctagcttgttcttcgcccagctgggctccaagacgccctctgcgggcccatagctcctaccgcgtccacctgcagagcagaggctcctcaccaaaagccccaccccaccggagagggtcacgcaggtcccggggaatccgcactccttaatcgcgttagccgactttgtaggtgttcaggagcagcctcctagcagcctcagttttcccctccccgccctgctggttcaagcaccacagcctggaatgggagaactgttgtccaccgccccctccctccccgcaccccgcctctgctgcagcggacccgctttaataatgtcgctggaaagtgacacgcgatttattattaaagtaatgcgggcgcagggacgggaaaggtttaataaacgtgctgagatgccgaggattattcaccgcaaataaatgagagcgcgggcggcgttttaataaataatttcccgctgctcccgggggaaggcaggggagggggagggagggggagggaggaggagggggaggctgagccgctgccagaactcccggtttcgcctgcccacgggcttccaagccatccccgcgttttgtgtcctaggttgctcacacccgagatgtgaggttccaggagcgccgacccagagttgccaggcctgaaggcgggagaggctcagtcgcaccctacatttcccacctccaagattttaagtatagttcgcttgaaatccctggaatgcgctttcttctggctcctacccggagatccggagtccggacaaaccggggcaggaagggtccgtcggaccagctcctcccaagccgaggcttccaggtctcggccgggctcttctccctgcttttagctgagccgggctgggcgtacctctctcctccatctagagcagggtgtgaagaggaagccagagggggctgtctgaaaatgaccctgaccccctcctcgggctgtcgtgaggaggagggccgcttcgc

SEQ ID NO: 844 - DNA, 1179 bp, Homo sapiens
catatcctggtggagttattaacaaacatggattaaatcactgggactagagttcaacttcctgatatcaaggctaagtagggccaagggagtgtgtagactctccgtgccacgtgtctccatgaagaggaccacccttgcctggaggcaggagaatggcagagatgaactttcagtgaccatttctagaaccctgagattttaggagcttttgtagaatttctgaatttgtagctggtgactgagtagaggagctaagttccactccagagctccagagtgaaaggtgtgccttaaagaggggaaaggggaatcaattttcccctgaagccccagtacaggcttgttgtgaggatcaaaagagcaggagggtatgtcctgaggtccccagatgcatgtgtgatgctgctactacaggggtcagctgtgcagagcacccccacccccaccatttccattcacaccctttgggttctatagagttccactcctatcacctctcggtcttttggctaagatcaaatgtagtatgtttttaccagcttaacatctgatacatcctctatctgaggacaatatattaaatgggttttttgagcagggggatggaaaaggagcttgcttcatccactcctatgcatcaacctggtattgcaggacctccaggaatggtgcatcaccagggtgcaagagagagttccactcccagagagaggggtgaggggatgagatggtgtgagtagcagacttgggtgccagtgagcaaacaaggaagaggaggcaagaggtgggaggctggcaggaggtggacaggaaggcaggctgcctggagatgggccactcccttgtgagtgtcctcgtgctttccttacagatgctctactcatttggagtatggtatttgctctgcacatcctcataggtcagtgtatctgcacatgtggtatctctctactctgtgataatgcttggtgaccatgtggctgaggatacctgtgtgaagaacaagaaactaggggttgcccatagagcacttgggtgtttggtttgatgagcacagtgtttaaaacaaacatgaaattgaatacctgtaggaaaacatgtgcttctcaggtgcagccatagaccctgccactctactgcatttcactacttgcgtcacttatataatctgcctag

SEQ ID NO: 845 - DNA, 1277 bp, Homo sapiens
tgcagtgagctgagactgcaccactgcactccagcctgtgcaacaagagcgaaacttcgtctcaaaaaaaataaaaataaaaataaaaaatttttaaaaagaaaaagaattaaagaaaagaaatatcacccagcctgggtgacagagtgagtgagactgtctcaaaaaattaaaaaaaaaaagggccaagcgcggtggctcacgccagtaatcccagcactttggaaggctgaggcgggcagatcacctgagatccggagttcaagaccagcctggccaacatggagaaaccccatctctactaaaactgcaaaattagctgggtgtggtggtgcatgcctgtaatcccagctactcaggaagctaaggcaggagaatcacttgaacccgggaggtggaggttgcggtgagccgagatcgcgccattgtattccagcctgggcaccaagagcgaaactccatcttaaaaaaaaaataaaaataaaaaaattttaaaaagaaaaaaagaaaaagaattaaaatcacttctcggccttttggctaagatcaagtgtagtatctgttctcatcagtttagtatctgatatgtcctctatctgaggacaatatattaaatagatttttggagcagggagatggaataggagcttgctccgtccactccatgcatcgacctggtattgcagtacctccaggaacggtgcactcgctccggggatacaaaaaaaaaaaaaaaagaattaaaagaaatatcacctaaataatgcttttctgtgtatttactagtatattttcagaataccattaaatattttgaaatattacccataattcagcaactcacaaataaccacattaacagtttggtgtagtacttcctgcatacaaggatttatgaatctgtgctacaaaaatatttatccacatgctataattcctggatatctgtctctatgacttttcagtgaaagcatgaaagttttccagacatctaaatatatcagcacctgatctttgcaaccttaagtttaggtgcagcgaagagatggaaagctgttaaaactgttaacaaaggagttgttgggttattatgtatgaccttgatgtaaactctgttacagttcaaattctgttacaaatgccattccagtgacatcaagcttatcagtcccaaagatagaagaatagcaccatgatattgctgaacttttcagggcatcactgtggaatagtcaagattctgattatttctttatgctttttttctacataacatg

SEQ ID NO: 846 - DNA, 1214 bp, Homo sapiens
ctatgcctgtctaattttgtatttttagtagagacggggttttatcatgttggtcaggctggtcttgaactcctggcctcaggtgatccacccaccttggcctcccaaagtgctaggattacaggtgtgagccactgtgcctggctgaagatttctttttgacccttctcaccccttgaccgttgaattttgtaagctctgcgtacccatgagaagtctaggtagccagtaattgaaatattaaatattctccaattaaaagtggtatttagttggtcttttaattttgagtctcttttacaaagtccagggaagtttagatcaccacaaggctcagttactctagttttctgaggatagctgatgggcaggtaattttgaaggagggtatcaagtatagataataagccttgttggttatccttactaagttggggattggtcagcttcttcaaagattggagttgagttttcatactgtatcttgatgacttttaaattttcttttccatcatttcagtcagatgccctggatgcagctagaggatgattctctgtacatatcccaggctaatttcatcctggcctaccagttccgtccagatggtgccagcttgaatcgtcggcctctgggagtctttgctgggcatgatgaggacgtttgccactttgtgctggccaactcgcatattgttagtgcaggagggtaagtgctataggtttctccttccacccttttccatcttatacttcggggacattctgcctgcctctgacttttctgtcttaactccaaagggatgaggagggagaccagaagggttttccatttaaagcagagagattttaccaaaaggagttaatagggttagctggagaaggaaaacaggaagagcttctaatgaaaagtgaagctggttttgatattctccaggggaaaatatattttttctctcagctctgttcagccccaggtgtgctgaagaagtaaaggtatctagaaagtcagcaccttactgggctgaattgtctaatgcttagcaaatttggatgtcactggagacttgggctgtttctggagagttgttctctttctacagaaagaataattggttcttgggggtcggctccttatttctctcctagggatgggaagattggcattcataagattcacagcaccttcactgtcaagtactcggctcatgaacagg

SEQ ID NO: 847 - DNA, 1221 bp, Homo sapiens
tagttaatggattagcaagtttttgcagttactgcctatggtggtaaagggggagtaggagaataacattaagtggcaatagtggcattttgatattttaggagaggagagtatgattgtgtgagaggttgagattgaaagaatgtcaggagagttaaagagagatcaaaagagatggaaatgaccaacagtagaatttcttaggtagcaacacctccttttaatataaaggactattattgctgcctatggatagttgtatgattgttaggctctaaaagcataggattaaagagaaaacacaataatgatgcagatcttcagatgttggtatagttgttggatttataataagtacacatggtttatgtctataacttgaatgaaattacacattgtagtactaaacaaggtggtagtagtagttgtttccgcctgcatcttctgattcccttctggttttactttctctttcattctattttctttcctttttgtcctagctattctatctctggcctctgtgatctctgtggcttttctctcattctcgtgatctgttgtcctcttcctcattatcctgttccattgtcttgtccacattgccttctattcttcgttctggtctgtctcctgagactcagggcttcctgttattctcctcctatccccattttgtatcctctgctctcttgatgaatcgacacttttattggtatgaagtgttctttgtgttattatagtcatgcattttactttttacatgtgtcataaactctagaatacattgccctcatttttgcttaaacaagcgattatcttttttctttttttttttttttttttgagacggagtctcgctctgtcgcccagcctggagcagtggcatgatctcggttcactgcaagctccgcctcccgggttcacaccattctcctgcctcaccctcctgagtagctgggactacaggcacccaccaccaggcctggctaattttttttggatttttagtagagacggagtttcaccgtgttaggcaggatggtctcgaactcctgaccttgtgatccgcccacctcggcctcccaaagtgctaggattacagacgtgagtcaccatgcctggctgcgattatctttgaaagagatttaaaaatgtcttttatatttatcttttctgactcagcatttttttcttctcactaggaaatggtgaagaaga

SEQ ID NO: 848 - DNA, 1241 bp, Homo sapiens
ctaggctggtccctgcagcctcgacctcctgtgctcaatcaatcttcttgccttggactcccaaagtgctagattacagatgtgagccaccgcgcccagctatgactcctttctttctcgtctaggttgttcctcaaagtcattcaagctgtactcgccgaaggagcccccgaacggcaacgcctttccccccttccatcccggcaccatgctggatagggatgtggggtaagtgagtctcttggccacttcctaacccttctccaggtgggatcctgcctggaaaggggagggagtagccccctgcccccaataattcctatcttcaacccccattctcatagcctcttcctttacacagcccaactcccatgtatccgcctacatacctggagccagggattgggtaagtggagtccagtggggaagaaggtgctttccactgggtgaaggccgaggtagggggtggagggggcaggctccgctcctactgacctctctccttcacttcctccaggaggcacacaccatatggcaaccaaactgactacagaatatttgagcttaacaaacggcttcagaactggacagaggtatggccaagggaaaaggggctgggagcaggagggccatctgggcaccctatgggatatcttatgacacatgaacacccgttaccatgctccctaggagtgtgacaatctctggtgggatgcattcacgactgagttctttgaggatgatgccatgttgaccatcactttctgcctggaggatggaccaaagagatatagtaagtggcctctggggtcttgctatgagggtgtatacctcctatgtcgttctaaggtctagaagtgggtctgggagtgccaggggatatctagattggtaggggaggcatctgcctggccccttttgcggtccctttgtcctgaagagtttgtcccatctctacagccattggccggaccctgatcccacgctacttccgcagcatctttgaggggggtgctacggagctgtactatgttcttaagcaccccaaggaggcattccacagcaactttgtgtccctcgactgtgaccagggcagcatggtgacccagcatggcaagcccatgttcacccaggtcagcaacccagctggatgtggaacaccatggcacctgggtttgattcccatcctctctcccagtgtatactcacagctgttccccagggaggcataatgtgaactg

SEQ ID NO: 849 - DNA, 1128 bp, Homo sapiens
tcttagtataaggcgtggatgtaggtgctatggaggacactatcttcttctcaaggagcttatggtctaactggggagaagaatctacagaaatgattcctgagttggtaacaaggcaaaatagaaaatgtgatttgtagaacaagagtaggctgtgaggccaggaagctagttaggcagatcatagatcaccttgaacgctaggcttatacatttggactttatctcagattcagtggaggaatgtgggtgtttctgagcagaaaagagacatgattaaaaatagtacttgggcatccactggaggagactagatctctttggggagatcccaacagggaatatgtaggcaaagtggattttcctcctttgggtctcaaagcaagcccttctgtgccgcctcagtctagaacatctggttgggcttttaactagtatggtttctttgcagccaaaaaggagtgtcctcctccggctcctgctgacagcttggctgtaggaaactcagggtaagtatggagacatgagcgagttaccctacagctgttagtcagcagccggctgacactccaggactgtcaactggatgcctctgttgcagggacgctgtagtcagctctagagtctttccctgtttccccaccccttactctgcctatcactaccgggcagtgtcttgggtggtgaggtgagaacggggcatgttcactgccctccagctgattccagtcgggctccaaatgtcctagaggtgccttttatctcctggcaagtcatacctttggggatttctttctttcatttaataacacttcaagtttgctcagtgctggtaatggtgtaacttaaagtggaggaagatgttaatggctaggagtcatttttcatgttcatgatcctccatcctgttctgccaagcatgttcccctccacattgatttcaggttggtgtgagctgggcaggtgagactcgatgtgaaggaggtggggggtattcaaggtcatggccagcctgcctcttggaattgggcagggctcagttgagatccaatttgtagttcagtcaataagacccttttgtgcaggaagaagatgatggaggcagtttgtgcatcccattcttctctg

SEQ ID NO: 850 - DNA, 1210 bp, Homo sapiens
gcctgaatgaacactattgaggttaggaccaataactgaagccgtatcttggatggaaaaggtgtgtctgtgtgtgtatgtgtgtgttctgccttaccttaaatattgataaaaagtgaagaaagatacctcaactgttgagattccgagatcgtgaatgacagaccatagtgaactctggaacagccatttaaagaatgagatagctctccatatgctgagaagcagtgatctctgctgggtgctgtggctcatacttgtaatccccgcactttgggaggccgaggagggcggatcacgaggtcaggagatcgaggccatcctggctaacaccgtgaaatcccacctctactaaaaatacaaaaaattagccaggtgtggtggcacatgccagtaatcccagctactcaggaggctgaggcaggagaatcgcttgaacccaggaggcggaggttgcagtgagcagagatcgcgccactgcactgcagcctggcaacagagcgagactccatctcaaaaaaaaaaaaaaaaggtgatctcgtgctcacttcagcagcacatatactaaaattggaacgatacagagaagattagtatggcccctgcgcaaggatgacatgcaaattcgtgaagtgttccatattaaaaaaaaaaaggtgctgtctaagatatataattaagtgaaatctgcagaatagtgtgcttccatttgtgtaaggacaaaacatggaagggagcctgtggatgcataggctggacatatagagcaccttggcacccacgatgagagtcagagctggtgagagacttagtaccctgtggggttgttttcccttgtggttatgtggccttaaacaaaactctctctaaagtaacgtacctgcttgaagtgcagtggtgagcctgtgtgtgaggaggctatgccctcatggcaacagctacccttggcagaatctgaacatctcagagacatggcctgaggatcctcatgagttgtctctgccacggtgtgggaggcactatttagacctccatttacttgaagcctagtgttcctcaggaattcctacatctgcctgtgggaaaatggtgatagatttcaaaggctctccaaggttcgatgtttccttctgagtgccatttcagcaacataggaatttcggtctgtttctccaaggtgaagggctttcattgccctgttgcctctctg

SEQ ID NO: 851 - DNA, 1499 bp, Homo sapiens
ctgctgcacacacaggcaccagcagggatgccacaggagtgcccacagggtgcaggactccactgatgagagatccagccaaagagctgcccccaggggtatgagggcaccagctgggttctccagggagcaggagttggacctccatggagccactaggcctggcctcctctacacatccccagggctatctggttaattccatcaagctcagagttaaaaggcatatcagcctggagtatttgggagagactggctgcagatccccgccagccaagatgcaagccactcgggacctgatgtcggcagctgtgcctctactgccctgaggacttaccagagggagccctactggccttcccccaccacagcagccctgcctgtgaagctcttgtttctgacatttcacaggcagagaggtgccatcagttcgcctccattccttgccaccatgaccagcctctccctgaactctctcttgctcgggacctgcctgagggctccctgctgcagttcgccgtacttccatctgctgggtgcctccatcgttggttgggtggggatggggcattttctgagctaagctttgtcattagtttgtgaagcacctggtcagcaacctgccccagacctggagggtctttgtggactgaaggtagacaccagccagcatggtggccctgttctgggggagcagggtaaggcaggaggaagtgggtgagctccgagatgatgagcacatgaagcctgtggccccttcgtacctgcaatatgtcaggagcctcacgctcacccaagatcctgcaggggccaggctccatctcactggctctgagggcaggacagggtatcacacatttctcaccaggcctcctttcctatgggcattggtgcctcccagaggtttcttgggctgctggctggtgagagaggacccttaaagaagatcaagccaagctgaccttggaccctgtccagcacagcttctggcacaggatgcttggtgaatgtaccctttctttccctccctgcagctctgagggagcccctgaccttgtagtgggtggaggaggtaaggggcctccctccctaaatctgcctcttctgcaagctacttggagacttgcctagttgtacccacccctccaggtccctggtgctagagcttctgagaagggcctttccctttcctctttgcctgctatataaggcaggctcctgtggctctgctggctcagtgtgggctgcaggaggactgcagactcagctgcaattctgaggggggtttgggaggcttgtgcgaggtctcaggcctgtgtggggagctggtgcctcttcctgcccgtatctttctcttccaagggcagtgctccaaggcagggactggagaagccaaggggagagtctaaaagggctagagcatttttaaaaatagacacagggtcttgggactggggtttcggattgagttgcaagcagggagaaaacctgaaggtcgg

SEQ ID NO: 852 - DNA, 1203 bp, Homo sapiens
tctcttgaatccaggatgcggaggttgcagtgagccaagatcgcatcactgcactccagcctgggtgacagagtgataccctgtttcaaaaaaatgaaaattaaaaaataaaaaaatagttttgcatatgggggagagaacagggaaagaaagggacagagatggaaaatcctattttattgttttgactttagacatccagaaggggttactaactttaaaactttaaataaagttgccctgtgttggggaagaaatctggcaatcctagttactttgaagtcacgctacccttttcactagagtctccctgacccaagagaacagggaagggccggtaggatacacataacagtagctccttttacttggctgaatttaggtatgccaggagcagggtgcagtattaggccagaaatctctgttggtctctgcttgcctctcagtgctaatgtggtcagctctccttgactgtagaccatccagccaaatccaagctctgcttttctcttttggactcaggacccattaaactcagtaacctcattaaattctgcctgcacatttctcctttcttttcttttcttttttttttttttgagacagagtctcactctgttgccaggctggagtgcaatggtgcgatctcggctcactgcaacctctgcctcccaagttcaagagattctcctgcctcagcctcctgaataactgggattacaggcacgtgccaccacgcctggctaatttttgtaattttggtagaggggttttgccatgttggccaggctggtcttgaactcctgatctcaggtgattgcctgcctcggcctccgaaagtgctgggattacaggtgtgagccaccgcacctggccatctcctttcttttctttttcccagccctgtctggtcatcttttatggggtggttccccattttaagccctgagcttctcctcatggcttccccacaccccccactgtttctcttattccattttttttttctttttttttttttgagacagggtcttgctttgtcgcccaggctggagtacagtggtgagatcttggctcactgcaactttcgcctcctgggttcaagcaattctcccacctcagcctcccaagtagctgggattacaagcgcagccaccatgcccagctaacttgtatttttcggtagagatgcggtttcaccat

SEQ ID NO: 853 - DNA, 1203 bp, Homo sapiens; identical to SEQ ID NO: 852

SEQ ID NO: 854 - DNA, 1145 bp, Homo sapiens
gggcatggtggcatgcacctgtagtcccagctccttgggaggctgaggcgggaggatggcttaagcccaggagttcaaggctgtgtagtacattatgatctcacctctgaatagccactgcactccagcctgggcaacatagcaaaaccccatctctaaaacaaaaaacaaaaaaaaattacatacaaaactggtaggagatacactgaaatgttaataaaaatgaggtgatatctatatgcatctaattttcttctgtactttctaaattgagcaggcattacttttattatttaggaaaaaaacgcacaaaaaaagtcaagagtactcattaccaactactactgtatggaatccagagccttccagagtttgtagagctcttcatactctggctctagcccttgtttttattttctgtctaaaatggctaatctcataactgcatgtcatatatgtgtataatatatgtatattcatatgtatgtctgtatgtctgtgtgttgtatatatatgtgtttatgtctgtacacattgtctgtagttaacacacctctgctcatgttctcatcctaaagagtacttagttctgttcgtctaaaactctgctcagcctttaatacctagttacaattccattgttttcttgaaatctatgctgacttctgaacttctataccccttatacctaagggatccgtaagtttacatatatgtaagattggcagaaaattaacctacaattaaaacctcacatttcttaattctctttaatctttaagttgctactttcataattctttttttttttttttttgagatggagtcttgctttgtcgcccaggcaagactggtgcgatctcggctcactgcagtctccgcctcctgggttcaagcaattctcctgtctcagccccccgagtagctaggattacaggcacccaccaccacgcccagctagtttttgtatttttaataaagatggggtttcaccatattggccaggctggcctcgaactcctgaattcaggtgatcgcctgccttgacctcccaaagtgctgggattacaggcgtgagccatcgtgcctggcctgctttcgtaactcttatagtacctgtctggaaaatgccctggcttttctct

SEQ ID NO: 855 - DNA, 1196 bp, Homo sapiens
agaagagatggcagttcacagcaactgcatagagtagggagcagctttcctcccaccatcctaggctggggaccttctttgcttctcacaccactgtggttggctcagctcaagtaagcacgttctctctgtatgctagagctactgacatcatctctactagaattgttttaaatatcttttgatgggaaataccaggttgaacttcaagcatcatggaaacaaaggttctagctgcaagagagtaaagttctaggtgtttgtatgccaaggtttatatgtacacagatccaacacatactgtaagaaagacttgagtacacaaggttttcaggttttaatgcccattgggaccgtgaacaaatgagaagaatgggagcattgtcttgcctcgcttggaaggacgccttccggcatctgatccacatggattcacttttaggatgcagttctttgggggccagatttggctgcagattcaccctgaagagaactatccaatgggcctggtggggcttgggtgcctgccttttttgttggaggctcagacttctagagcagagcaaagttgggaagaatgaggtcttaggattctcattccccagagagccccagcctcgcttctgatcattactccccaagtctgaatctactgtgaaggtgaagttatcaattttttcttgtttgagtcctttaaacccacaaatgtatatgctttattttatattatttattatgtacatatgcctgttagtacttcgtctgtgactaggacaaggtctgtcttgaagcttcctcatccatggatcctagggttctgctgtcctttaaggcgggtgagagggtagtgttgttttttataaacaggttgctgcttttatgttggccctagcatccccagcccctttagttgggcccacctgtattccttatgaccagtgttttggatgaggatggaggcaggtctcctaccttgtgggcagggcctctcaagtacctccatgaaatatttccaaggtggtttcttggtgacaggctctcttcccctatgtagggtacagtacagctgtgagtccacggcctccctcctcccaaggcaggtcacttgcctggccccacagtgataatggtttcttccacttaccttagattgcataatccatctttctggataatggaagctgcctgcctatctg

SEQ ID NO: 856 - DNA, 1261 bp, Homo sapiens
gtttttgtaagcagacaaaaaatttctaagtgcagtcttctctgtataggaaagctaagtcagaattaggtaatattttgttgtttcaatagatactaatattttgaaaaatatagttacttgttattgagtatatcagaagttaattattatatcaatagttggttttttaagtaggctggtgatatttgcctcatggtaggtcactgtggcatttctgggtgttaggatgctgttactccttaaaccctgaaaaagtgaaaacattaaagattcctgtcaaatgggtactaacgattctcttctgtgtgtgagatatgttgctaggtatggcgtgttaaagtataaaacagaacatttatgtgtgtctatgtaataaaacataacatttggaaaagattatgttatatggagttctatactttttcttcaattatttgcttggtctttacactataaagtattaattaacattagggtgtaacatttttagcagtggaaatgaggactggtaaacattatttaataaacatcctaattatatttaatatatatcataggctgggcatggtggttcacgcctgtagtccacacactttgggaggccgagccaggcggagtccttgagctcaggagtttgagaccagcctgggcaagatggcgaaaccctgtctctacaaaaaaaaaacataaaaattagccaggtgtggtggcttacgcctgtggactcagctacctgggaggctgaggtgggaggatcacctgcgtctgagaggtggacgctgtagtgagctgagatcatgccaccagcctgggtgacagaatgagagcatgtctcaaaaaaaaaaaaaaaaaaaaagtgtgcatgtgtgtgtgcttgtgtgtgtgtatcatagcctgaatgagtatactcctaactcatttggaatggtatttcctggaatattttagatggattctgtaccctacgttctttcatatagtaaggtgtatgtactggaaacaatagaaaaaacattttcaaaggcttgatgttttagatcattgaaaaaaattttttatctatgttatttaaagaggcagggtctcattctgttgcctaggctgcagtgcagtagtgtgatcatagttcacggtaacctcaaacttctgggcttaagcaatccacctgccacagcctccccagtagctaggactacaggtgtgtaccacagtgctcagtaatttttattatttttttaaattaattaattttttttga

SEQ ID NO: 857 - DNA, 1214 bp, Homo sapiens
ttggccctacctccctccctgtccccacccctgcagaaggcaactgttggttttcttcctcgattcttttccaagtaggttttgtttaccctactccccaaatccctgagccagaagtgtggtgcttatactcccaaacattgcatacccagcctcccgccgttgagttttagtctcttgtgctgtgtctgctggcacttgggctgaaaaggccactgcctcatctaggtttttggtttgtttttgaaacagggtcgcagtggcgtgatctctgctcactgcatcccaggctcaagccatcttcccaactcagcttccctagtagctgggaccacaggcagagaccggggcgagggggtctctacaaaaagtgttggccaggctggtctcgaactcctgggttcaagcaatctgctcacctcaatctcccaaagtgctgggattacagttgggagccacccgccggcctccatctaggttttcataaatatcttactcatgtggaaacctccagcttgtacatcaaatgtgtctctttttttgacttggtaagaaagcattaggctttggggttggggtaggtctgtaatgtgaaacaacttgtcttttcttctcccattgttataaaacttttaatggccaaacctcagatttgtactttttttttttaagctgctaaaaccattctcttccacctggttttactgtaacatttgaaaaggaaaaaatgtcatccctttaaaagataaataaatacattttgataacatactaagctcagtcaatggtggcacaaatacaagcaataaatatttgatttctagttatttaatgcttttacatttttctgtaataacttattttcagctggcaataaagactatgaacaaaaagaaggaataaactaaaacattccatctaattaggataagcatctaaaatgaggtgggcagcttaagtgtttttaactacttttacattaggctattcttaggtttcacttctgtttttgaagttttcatcagtaagtagtttcaaataaggatgaaaaatatcctcttagagttaagtagtagattaatattttataaaaatagcattatttgtgaaaacatctgtagcctgttatttcccatcttgaaaatgctaacatcgtttatgacatgaagtcaatatatacctcccttcctctctcccttcttctgagacagggt

SEQ ID NO: 858 - DNA, 1165 bp, Homo sapiens
gggctgcaggcattccttggcccagtggccagatttctggcacttgaagcaacagcctgttggaggaggtcctgtaggaatgcttgactgctgcggcttaggcagtttgaagttcttgtgtgctggaggtgtggctgggttttgtctcacagcaaaggcaagtaattgtaactcagaaatgcgttgctgtctggctgcctcctctctattattgtacaccttgaaggtgaggttgattaattcctgttgtggggtttgagggctggattctaatttttgaagcttttttctaatgtcaggagctgactgggtgataaaatgcctatttagaataagacggccttctgacccttcagggtctagggctgtaaagcatctcagggttgctgccaaacaagccaggaactgggctaggtttttgtctttaccttgggtagtttctttaagcttgtcaaaattaacagctttgtaaactgcctttgtaagcccatcaactaggcaggaaatcatgtaatctcgcctaattatacctggggaatctgcctgatagttccattggggatcatcttggggaactgctctaatgccttcttggaggtctggcttgtgaagccggtggttatcagtgtgagattgggctagagaaaaaactctttcctgttcatctggggaaagggtagatgttaggatgacatttaaatcactccaggttaaattgcaggacagagttagatactggaattcctatatataattagtggggtctgatgagaaagagcctaaacactgactgatctgagagaggtctgatagagaaaaaggcacaagtaccctgactatgccttcagctccagccacctctctaagaggaaatcgttgggcaggtaggggagagccagtcatggaacaaaactgtaagctggactgggtgtgaggaggggaggtgataaaaggattatagggtggaggagcagaggctgaggaagatttggagcctgattcagcctggcagaaagcaacatagggagcagtctggggaggaggggagaggtcagatggcttggtagaaaaggaagattggaaagactcagcaatgcttggggttgggactgaggggacaggcggtagggaaagaaggaggatttgggacgaattgcattgggaa

SEQ ID NO: 859 - DNA, 1173 bp, Homo sapiens
gataggatctacaagtttaatgaagagaaaataggaccacatattctaatgtatttctgaatctatagtggaaagttgtttttgtttttgtttttgtttttgtttttgtttttgagacggagtctcgctctgtcgcccaggctggagtgcagtggcgtgatctcggctcactgcaagctccgcctcccgggttcacgccattctcctgcctcagcctcccgagtagctgggtttacaggcatgcgccaccacgcccaactaattttgtgtttttagtagagacagggtttctctgtgttggtcaggctggtctctaactcccgacctcaggtgatccacccacctgggcctcccaaagtgctgggattacaggtgtgagccaccgcgcccggccatgaaaattgttttaagagctatatgactctgagaagcttatgaagtactaatgaagatttgatgaactctcaaacaaatttttgtttgctagaaatataattcttggggaaaaaagggcttctgctgtgagtggcacacatagggcatcgtttgctcttggtgccagaatcaacatcaagagatttcagaagcataattttttggtacttgggcagctggtgatcattggtcctgtagcccttacttgttgtgtaaattagacagttgtgactttttttttttttttgagacggagtcttgctctgtcaacaggctggagtgcagtggtgcgatctcagctcactacaacctctgcctcccgggttcaagggattctcctgcctcagcctcccaggtagctgggactataggtgcctgccaccacgcctggctaattttttgtatttttaatagagacggggtttcactgtgttagccaggatggtctcgatctcctgacctcctgatctgcctgcatcagcctcccaaagtgctgggattacaggcgtgagccaccatgcccaaccgtgacttttttttttttttttttttttggagacagagtcttgctctgtcaccaggctggagtgcagtggcgtgatttcggctcactgcacctcctcctcctggggtcaagtgattctagtacctcagcctgccaagtagctgggactataggtgtcccaccacaccagctaatttttgtatttttaatacagatgaggtttcaccgtgttg

SEQ ID NO: 860 - DNA, 1177 bp, Homo sapiens
actctggccaacatggcaaaacccccatctctactaaaaaatataaaaaattagctgggcgtggtgttgggcacctgtggtcccagctactcaggaggctgaggaaggagaatcgcttgaacctgggaggcagaggttgcagtgagctgaaatcgtgccactgcactccagcctgtgcgacagagcaagactcaaaaaagacaaaaaaagaaaagaaaatgctaaagccaccactgcctagaacatatttacagctcacactgggtaggccatgcacgcacacacctggcacacaccattggatgttttgtgtacaatccaattcagaaacaacatctgcatccggtgcaccctcagcctctgttccatgttctcagggatcacatctccctgcaattcagctgtgcagggtgggtcacaggcactgggtgtgtccttggccttttcctctggggtccagtgggcacagctccactgggctcctgtcctgtggccaatacccagtcgaggtcactacaggcaggggcagagttgatctggaaaggcgcctgaggccggtcagagggtgggctcctgggatgccttgtgggtaggggtgttagaggtgctgcttttggagggttactgggcagggctgtcttagcttaggctctcctccaaaagcaggctctgaaagaatgtgataatgagtgggcaactggggcttaatccttcaggggaccccctaagggcatgcatagaacacatctcagaattttcccactgaggatttaagaagctgggatatttatccacaaggccccatccctctggggttgaaggttgatttgggggttaacttttcagtgcttccagcctacccctctctggagcaaaaaatcctccaaagccccaggggcagaacaatgcagatgcttgaggtaggaggccctcaggccctccaggtgaatagaaccagccactgcacccacagatgcctctggcatgggcagggcaccagcagtgtctgctgtaaggcctagggcaagaggaataccaagtcctcagtgctccagtcctggggatcccaggggcccctgccctcctttctgcctgtctctgtcactgggacctctacactgggagctgcagtctgatgtaacccagcctgggacttcccagcagtccatccttgcac

SEQ ID NO: 861 - DNA, 1110 bp, Homo sapiens
tttggggaaaaacagccccactgttaacttccctcctgcaaacctgggtccccaggccataaggtgggcacactggtgcttacagactgggtggagagccctaccttccaaggtcttgatcccagcctgcctataaggttgggattagcatgcaatcccccttccccaatcctgtctttttaaaatctcaagtttgcacttaaccttgacaacagcaccctctcctactccagtcctagaactcagtggccttagagaatggggtcccctgcactgaaggtccccgccttgctcccagttccatcctggccaataggctgcgcctcaagaggtgaaagagaaaaaagggagggagggaggaagaattatttagaacaaaaggatggctcgagcacgttagaggcaagtgagaggcacgttggtgagaagagcatgtgcatgtttggggtagctggggcctactgtcccttcattagggaaggaggcttccagaagcggatgtcttctagaaagaaaaattgtgtgaaggctgaaaaggggcttggagttttgtctttgttgattagaaagaaggaagaagtcagctctgagtgtttcaggaagaagagagcaggtagaaagggaatttagtgatttaacacccaagggtccagccatagcaggttggaaaatcctccaaatttggccacagaaactggctaggaaaaaactgccactcattgggccacacgctgggtccccatcagttctcaatgaatggtcattgatttacttagcagagagaagtcaccagccacaaaccaatctttgagtttgcaggccctgattccagaatatatgcatccagctcccgggttctcagctggttttgcccacttccctttgactgtccaatccaaagccagtctctcaagttgtatggctcaaagagcagtgaccacaatgggtcatacagtagggacccacctccacaaattagaaccagagttcagactccattgggcacatctgggaggaaggcaacctcctttgtcgtcttgttggtaccagtcattctcaagtatctctgacacctgtggtggttcagtttgctgagcctgccacctggta

SEQ ID NO: 862 - DNA, 1099 bp, Homo sapiens
caagaagatggaggatccctgtgccaggagccaacctggtcttcccgagggtcagtgccccagtgaagacagaagcgagagaataaagttccctgtaggtcctctgtcacctttgggttgtgtttttcaattgttgacatttcagaggggaccctccagaagcccagccggcttcccccaaggactcccccttcgctgggagtggatttccacacgtgcctttgatttcggacagattgggcctcacagccaccgattcagctgccagggtccctggactgggggttggtgttttctatagaggaggaaaggccctccctcaccctgctccccacccaggcagggcagcatgggacccagtgtctcagtgccttcaaaacccacccccacccctaccctaccccaccacaccccatcccagaggccttgcctgggcaaccctaagcccctgtccctcgccatacactgatgcctggcagctagagcaaatggctcgtgttctttgtcgaaggcctgtggtgagattgttttgtttccttttgttttgtgagtttgtttaaaattgaaattagttattttcttctgctggacagtattaaatagagcaggatgttgagttaatctgctagattgcagtactaatggtagtggtttagtgtcttcatgttaatattatttgtacttatttgaacaataatgataaagaagtggttcattattttttaattaatgcactttaaataaggtagaatggaaaaaacccagagagcaaagtgcattacttaaagatgcagtatatacttttctcatttttaaacagcacatatttattaagagaaaaaaagtaatttatgactatttaaaataaaatttaaaagtagagtgactgtcaggtaaagaaccttcaatgtagctatcttccagggggagggccctgcagcctcgctcctcagatgtctgcactgagccagttcagtcactagtgcgccagccaggccaggagggagtgcagagcatgtctgccaagcacagagcatctcagttggactggaccacagtgctcccgagagcctgcctttcctgcccttccccaccacct

SEQ ID NO: 863 - DNA, 1167 bp, Homo sapiens
gccaggcttggatttgaaccaaggttcggcagattctttttttttttttttttttttttttgggatggagcctcgctctgtcgcccaggctggagtgcagtggtgcaatctcagcccactgcaagctccatgtccgtggttcacaccattctcttacctcagcctccccagtagctgggactacaggtggaggccaccacgccctgctaatttttttttgtattttttagtagagatggggtttcaccctgttagccaggatagtctcgatctcctgacctcgtgatccgcccgcctcggcctcccaaagtgctgggattacaggcgtgagccaccgcgcctggcctggtctgcagattctttaccccaagcttcacctgaagaagatcagtggttccccgagagtgggtcgtgcaaacatgtgctgggcggacacagcattgagtggcattgaatctcgtcatgagaagtttctttcctttcagttctctttcactccacattgggtcaaggggagaatctccatttggggctcctgtgctgttaacatctgtcagacgctggctgatgtcatttgtttgtttgaccaagagcaaatctgacccaggcttagaatcttgctagaacttgccttgctctcttgttgaacttcatggcattgtttcattgtatgtgtttttccggaatctcccgtctatacctaggaatgctggttttccatccactgtagcataggaaaatgtctttttgaaatacatgtttaagttttaaaaaataaagtcaacttaaataaacacactaagatgacactagtgtaggtgttactcaggttcattggttcacctggccggagggcttggggaatgcagagttaaacgaccccaagtgggactctgtctcttaggcacctagggtgccctctgcctcttgtctcctagggtgacaccagtggctcccaaattccaactgggaaaggagcctggaaaagcatcggcattcgtggtggctgctccccacaccaagtagaagaatccacgttgtcagagagctgctaacgtcaggcggtactggatttttgcaagccctctatttaaaattccccagaaattaaataaggaggctttggagggaggaatgccctagacaaattgtggagtgggtttgttt

SEQ ID NO: 864 - DNA, 1214 bp, Homo sapiens
tatagcgctctttacccaagataggaattatttaaaaagtctagagatgaagtccaaatttgtatattttggaaggctattcaaaggacaaaatatattcagaagtcaagttgataccagtgactatagtcatttcactttactttgtcaagacatttaaacagatggtgtactaaattttattctttttaatttttttttaacggagtcttgctctgttgcttaggctggagtgcagtgatgtgatcatagtttactgcagccttgaacccctgggctccagggatccttccaccttatcctccctagtagctggaactgcaggcatgcaccaccacgcctggcgaatttttaaaaatttttttgtagagatgaggtcttgctctgttgaccagactggtcttgaattcctgggtgcaagtgattcttctgccttgggcctcctgaagtgaattttaaccttttgattgtgaaaaattacagatatagaaaaccacaccagaaattgtgtagcttaagtttagtactttgtagacatagctttgtaatcactacctagatcaaaaagtagaactttgacaggcatcccagaagctcttccgtatgcccatctcagccactgcccttctcttctccacattttatcctgacttttatattatttccttccttgtgtttctttatggcttagtcacccagtattcatctctagatgttagggtttaaacttgctcatataaaacttgggtttttaaagtctcttaacttacaggccttcccccattcctttcttttctttatattatggcatgtgtaatgggggatgagggcaatatcacccacatgggtgcaaaaattagttctttagggccaaaaaaaaaccttatgcattacaatggtttgtgaccttccaaaggccccagtacatgaagagatataacactgtatctatggcattaaaattttatgggaggagggatgatgtgaaaaaaatgtttaaaatgactccttagaggggctagtaatgaaacactgatccatggaacctgggctgtttggcctgttgtgtttccctcaaactgcattttgctattgcatactcctgatgattgaagttcctttctgtatttccttcagtttggcagatgaatccaaaggcttgatcagtctcaagcctgatcctttggcaagacttacaggtggttttgcattct

SEQ ID NO: 865 - DNA, 1227 bp, Homo sapiens
gggcgtggggaagggcttactccgtaagtagctcacaacgtggcttgccagctctgagtagtcgaaagtctcgcctgtgatggtggtgacaggtcctgggggaccaggtgggcctgggggaccctgaactccggataggtaagatctaatactgtcacctgccgaccaaggaacaaagcaaagtcaagcctgtcccaagaggacatgttctccccacggaggtgacctgaagcacatgataacatgcctgccccgccccacacatgggcccaaggctgggccaggagggagcctagacttcccctcactgtccttcccctaaattacagatggagaaactgaggcagaggcctgagctgggtcaagtggcccatgagggctgtgggccagcaagactccagccagccacccatttgacaaatgagcacatgcaaggtgtggtgtgaaagcatgtgcgtgtaggggatgagcacgtgcgccagcctcctccccagggtgtgggcgaggtgaggctgtgtcgggggcagctatgagaaggctggtgttggggagctcataggcctgtaggcctggctctgcagggggaagacctgggcctggacacatagacacacatacacacacacacacacacacacacacacacacacacacacacacacacactcccactgccctacatcgtcccatgtctcttagcctcatttctgtgatgataccacagctcccttgcaaagagactgtatctccatgttcttgtccccacggcttgcggcggccagctactcactctgcatgtactcagagatgtactgctgaatctcctggccagagctgctgatagagcccggaggcccagggggcccagggggccctggcgggcctgacacgtacatggtacttgatgatccccctgcagcaaagagaaagcgtcctgtgtcggtttctccaccctagggtcagacaaacgggcccaggaatagcttccatggtctgaggagggagggtcttctcaggaggagaaataggatagtggcaaggagaagggtccccgagaagagaagaaaggacagcctgtaacagccactgtctgaaagtggcacagagctaggaagctgccccaggccaaaccgccctttccttctgcaacctgctgaaggacccccaacatcgcatcccccttctctcaactccccagcaccctgggtctgtctgttctccatcatg

SEQ ID NO: 866 - DNA, 1236 bp, Homo sapiens
ggtacagaaggaaggactggattgggccagttctgagatggaagagttgaaagaagtagatctaggaccaggactagacccaggttttgtggggatgaaagttattcaatgttgagcttctctttaagaaaaataatacaaagtcataaagaaaacgagatctaaaacttcatatttactagcccaagaaattagatcacaagaaattaatagtgccttagagatagacatacgtttgttctgagatatgttcaggtggtttagcggaaatgagtatacagaaatgctttccgattccaccctggcttcctctctccacctggaacaatcgacacctcctcaaactcccagcattcaaaggagccagtgcccatgaaggctctgaatcttaagcttcattagcttcactgtaaattcaccttcagataggactccccattagatgctcattaagccttttcaatgaaactatccattttagcagtcctaggctatgaatcaggagatatggacctgagcccaggctccgctgccaatactctgtgacactaagaaagtcaatatactctatggccataccaccctgaacgcgtccgttctcgtctgatctcggaagctaagcacggtcgggcctggttagtacttggatgggagaaagtcaatttacttctttgggcttcagtttcctctatggctgcactacacgtttgcaagggtctcttccgattacaataccattcaatgcggaataccttggcctactctatcttcagtgttgccagtcttagtaggtactattgtcattgttcaaactaagaattctgagtagtcttccttgactctattatccccttcttccctccaaatgtaaccaacatctctttttttttttttttttttgagatggagtttcactcttgtctcccaggctggagtgcagtggcgtgatccctgcccactgcaaccaccaccttctgggttcaagcgattctcctgcctcagcctccagagtagctgggattacagatacgcaccaccacgcccggctaattttttaaattttagtagagatgacagggtttcgccatgttggccaggctggtcttggactcctgatctcaggtgatttgcccgccttggcctcccaaggtgctgggattacaggcatgagccaccacacccaaccagtctctaaggtttatatacctctcccatctaacctcacctcaacctgat

SEQ ID NO: 867 - DNA, 1162 bp, Homo sapiens
agtcttcttttgaagtctgttgcaggtttaattgtcagtcctttgtaggcagtctgtccctggaccactctgcaaaaagtctctagccatgatttccttgaatatctcctctgatctatttcctcttcaggaactttggtatgttggactttactaaagtctcttagtgtgtgtctgtctctgtctgtctctctctctctctctctctctcattttttcttagcctctctctctccccttttttttttttttttttgagaaagaatctcactctgttgcccaggctggagtacagtggctcgatcttggctcactgcaccctccgcctcccaggttcaagtgatcctcctgcctcagcctcctgagtagctaggattacaggtgtgtgccaccatgcccggctagtttttgtatttttagtagagacgaggtttcaccattttggccaggctggtctcgaactcctgaccttaaatgatccacctgcctcagcctcccaaagtgctgggattacaggtgtgagccacggcgcccgacctcttttagcctctcttctgtatattctgtttctttgtgtctctgtgcttcattctcgctagttttttcaagtatgtattttagtttactctcttgggtctcatgtactgttactccattaagttttttcaattattcgatagtccttaaaatctgctggtctttatagcatcttcctttctcatgcttctaattttatctttaagggttttgaacacttaatttaagggtcttgaaacatgaagaccacttcatgtttctctcttgacttggggttttctggaccatgctggtgtataaacccaaatctcaaatctttgtgagtgtaggcctattgttacagattagcaagggagactttttccattcagcgttctggaaaagacagataaggctttttgatttgagtgtttgtttgtttttgagagtctctctctgtcgcccaggctggagggcagtggcacaatcttggctcactgcaacgtctgcctccgaggttcaagcagttctgcctcagcctcctgagtagctgggactacaggtgtgtgccaccatgcctggctagtttttgtatttttagtagagacagtttcactgtgttagccaggatggtctcgatctcctg

SEQ ID NO: 868 - DNA, 1220 bp, Homo sapiens
tatccataaaaaaaaatagatgtcttttatagtggaaaaacacatggggaaaaaaatcatctattttgatgcagcatttgataatgataaaacacctcacacctcactctttatagtgcacaaaatgaatgaggtctgggctaggtagaaaaagggtcaatgctatttttgtttttagaatcattaccttttaccagcttttaaccatctgatatctatagtagacacactatcatagttaacatagtaagttcagcacttgtctcattttaatgtaaagatttgcttccattttcctacaggcagtctctctcttcctcacagtcccactgtgcaggtgctattgttactcttacgaatattttcagtaatgttattttcttctaagtgaaatttctagcctgcactttgatgtcatgtgttccctttgtctttcaaactccaaggttcccttgtggccctctcccttaccctgggaaggcctcttggagaccttacccctggctgtttggactttgtatactttaaataatttaactacccttaattacttaaaaaaaaaaaaaagctttatgattttcataacttattgctgattttaatggattgttaatttcagtcctgtagttttattttatgtttagatagggctgggcaaggaaaaagaaaataaagacaaccatatttagcagtgcagttgagttgtgtgttaatgttagactatccctttgtgagtgacactttaacagcattcactgcttctatatatagtgtaccatcttggtcatacattacgcctcaacatatacttgtgctcttcctttgcctccagaagaagtttttccttgattgtgctatgtttcagtggaagaaattctttgaagtagatgtgagtgaaaaactgcatgcctttagaagcccagtatcagaacttgctacgtttcaggtgctagggacttaatgaaaaacaggacaaaacaattcctttttgtggcccaggtaaattatttctggtttcacttataattactaatggctgagtcaagatgttgtctctgtgtttgcttactcttgatcaagtgtgagacagtttgaagactgtgctaccatacaaagtgaatgaagccagtgactaagcttctgtttgttttgttattctcatggccttcgcttgcattatttgggccttcattcagatgaacttgaggtgccattttgtt

SEQ ID NO: 869 - DNA, 1123 bp, Homo sapiens
tcttgggcattggcaagactgggcctgctccagctacagcaggattctatgagtatggcaaagccagctctggccagacatatggccctgaaacagatggtcagcctggcttcctgccatcctcggcctcaacctcgggcagtgtgacctatgaagggcactacagccacacagggcaggatggtcaagctgccttttccaaagatttttacggacccaactcccaaggttcacatgtggccagcggatttccagctgagcaggctgggggcctgaaaagtgaggtcgggccactgctgcagggcacaaacagccaatgggagagcccccatggattctcgggccaaagcaagcctgatctcacagcaggtcccatgtggcctccaccccacaaccagccctatgagctgtacgaccccgaggaaccaacctcagacaggacacctccttccttcgggggtcggcttaacaacagcaaacagggttttatcggtgctgggcggagggccaaggaggaccaggcgttgctatctgtgcggcccctgcaggctcatgagctgaacgactttcacggtgtggcccccctccacttgccgcatatctgtagcatctgtgacaagaaggtgtttgatttgaaggtgagttgtccaagacaggctgggagccacagctagaagcctgggcaggcctttccccatgacccaactcacgctgccaatgggcaaggaactgttgcattggggtaacagaattttgccatcagtattcttgactaaaatcacaggtattaggacccataggaatttcagaaatgtatcaggaccagtcccttgcttgaaggtgagtcagaaattcttacacactttttctagatgagaaagctgaggctgagtaggggagcaaaggaccccacctgggttgcagagagaaggggctcaggagtttcctgccttctcgtggagggcttctcccccgtagtatgcctagaatctactgccccttgagtacccatattgtagtgagttagaaaagaaaaaaagcagaattttggatcaggggaaacagattaattcccccttgggacctagacaaattattatagagagcctcagcttccccatca

SEQ ID NO: 870 - DNA, 1198 bp, Homo sapiens
tcacatattggggtgctattatttctataggatacatttctaagagtggaatggcaggatcatgggctctgtatactttgttttatttaatattgctaaagtatattctcaaaagtttacagatactcaacctcccactagcaacatatggatatgtgcatttcctcatatcctccacagccctcgttgttactgcttataaaaaacattattatgaaatggtggtgcatgcctgtggtcccagctacttgggaggctgagatgggagaatcacttgagtctggaagtcaaggctgcagtaagccgtgtttgcaccactgcgctctagcctgggtgatgggagtgagacccggtctcaaaaatatatatatatataatgaatccttttgtaaagagatagaataaaattgatattttatgtgtgtctgtgaatggattttttctgcattaattttgtaaattatagttttacaatcattgtttaggggaaagatagccattaagaacgtctggaagagaggggaaaagggaaccgtcttctgaataccactaatgatctttgttcccattagtttgcacagcggaaaggggctggccgtgtggtgcacatctgcaatctccctgaaggaagctgcactgagaatgacgtcattaacctggggctgccctttggaaaggtcactaattacatcctcatgaagtcgactaatcaggtaggtctgggtactttcactccagtgtatatgccacagaccacacattagtgaaagggaacgatataatttttgaaagaagccattcttaacataaagaggcgatgccgtagctggccttctgttggcatggcgtaggtgtttttgctggtgatgtttttttgtttcccctagtttcactctaaccttctagtgataggtacaggcctttgtgaattgcctagaggtgagaggagatgctttggaatgaggtgctcattcacatagaaagggtaattggcacccaaaataaaaatctatggacttgaatctcttcactgtgttgtcaacccccctgagctaattataatcttatcctctaagcctctcctatctgatggcctggatttggagccagccaagaacttgggactaggtatttttcctggtccttgatgtcagcaggtgaggccctttgtctcacagcaggagagtaggagtgtgag

SEQ ID NO: 871 - DNA, 1224 bp, Homo sapiens
tggacacatggcatcatgtatgtgcaacatctctactccatgttggaaacaggtggcaggcaagtcaacaatctagtttcactcaggaaggagaggtcacaagtgcaatccggctagcattttggggctgtgggaaatccccttttgatcactcccctttgtccccaagtcccctgagagcagaaagcaagctgcttctctttcttctcctccctgaaacaggaggaacttgagcagcccccggggccctccttcctctcttgccctcagactcagctcccctggaatattctcccaagtgagaagaaggaagaaacagtatttctctgggtatagtgctgtgggtggaggcctttctttactttccagggaggagaggtactggagaaatcagtttctggaatttaacaatcaggaattcagccataggtaactgcagtattgctaaattagactttctaatttatccaagcagctctgggcagacccagagtctagaggctttagggagaggcaggaacaggaggtaggcagtggagaatagtggctaagagtgtggtttgacagtcatgtggacctgggtttgaatcccaactctgccacttactggtcgtctgacccttgacaaaccactttgtctctcggagcctcattttccatctatgaaatggggagaataacagtacctgcttctccagttgtgaagaggccaagagacagtgcccctatggagtacactaagtgtgccatgcagggggactcaggaatcagcagggccgagctgacagcagtagtgtcttgtggaagagggagagaaagtgtgtgtgaccccagagttcctcgctgacagcaacgcggccctgggcagtggccctgttccttgtttctcctctgagtaaggattgctgactccacacagctctctgtcttcagcagcagggcttccatcagatctcgaggagctgtttaataaccacaacacttccagccattaacaaagataaagacagcattggaaaattgacttttgcctgagcacagtaagtacgaacccaactaaaaatcataacacatgctcccaaacccagttcgatgactgtgacacgctcccacccccatccttcgccgcctcccccacccaccagctgccaccagccccttctgccatggccatgctggtctccttttctctgcctcctactgtcaagcctttttcacactaaa

SEQ ID NO: 872 - DNA, 1177 bp, Homo sapiens
cttttgtggatgaatttgaaagtggagtgggaaatgagaaggcagggacaaagcatttttcctgctcttgctacttactgaagtaatgtggaaggaatacactggggtgggcaccatattgcttcgtatttcctgcttccctactggtcctcagcctagtcatggcttgtcaatccatagctctgtgttttgactgtgatgtaaatttaggatacttaccatttgttaaagtatcagaacagcatctttggaaaggaaaaactttcagcacttattgatgtcttctttttaaagactatggaatgcaaggaggaagagaggtggaagaactagtataacttttgaaacagcacaaaacagggaaatggcttccaggtattggtctgagagccagttctagaccacaacagttttcaccagtgcactgcaaaatgagaagagaagtagaacatagtgactttctcataaaacatattttattaattcacaaggctacagttatttctaagatgatgtttttcctatttgggggtgtaaaggaaagttgtaatgtgattgaaatagtaggtagaagttatttttttttctttacttagaagaataacaaaattggcatccctattttaggcccttcaaattttttttcaaattttacttgaccacaaaattaggaactatagcctgatatactgaattggagagagagaaaaaccacatcatctgtccatgtcattaatcagctgtgtgactttgagaaatcatttaacctctctgcatgtgttcttatatttgcaaaatggaaactgtcaaccagattctatgtatcccttaaggtttttatgaagtaaaataaggtcatatatatttaagggcttagaaactaaagagagctctgttaaaatcatcatttttataaactaccatcagcaaaagtggttaactttgagaatcattggcaaagatttcaacaaaaatctgtaaacttttctattcattaacttgatgaatgtaattggcaaatactataaaagaaagttaatgtagaaaatagaatggagtagagtagaatagaatgcacattatagggtcttcttaataaataatgaaatccatcttctaaaattcttgaatcatttttgacatcttattttgtcatataggcagtcattgtctcttc

SEQ ID NO: 873 - DNA, 1330 bp, Homo sapiens
ttcactaggcacagctgggatcttggtatcagccaggatattcagatattttcaaccaatgccataacgtggcaggttttctggggaccaaatgcagtggttttagtttctaattactgccgcgtatgatatacaatgtattttggacttgaaaaggcacaaacattttgccaacctctctgcttcattattttggttatctcatggaaaagctctctctagagaagtagaggcagggtttatgtaccaaagccttttattgaatgctctgattttgctttccctgttacaaccctcccattcatatggctttcacttccagcccttgtgagcttgtgtttcagaaagaaaagccacattctcttactcttcttcttaccaaaactgcatagctatatcgtgtgtcaacaagcgtttctgatttaggaaatgttatgttattgaatcttgtactcatctgtcaccttcacaaatctataaaagaaatgaatgtcctctttgtgaagtgtgagcatttacctgcatataacataagcttattttcatatgataaattctgtgtgactgaaaatagttaaatattctgtagtataccaaaccaaggagttgctttatttaaaagaaagattgcaggttatttttaaaattttttaaaccttgattgttcttaaatttgtaaagtgaacagaaatggcttggcacggctcatcatttgagccattttacgtatggtctgttgtgaagacaggtgaaaccagtgttccattgataccaagatctgtgcgtatggccacttgattatctgtaaaactgaccaaaaggaattggagaaatcaaaataagtaagcaacaaaaattaagtttataaaatccagcagccactaaataatcatctaccactcatgctttttaatattttattaacttcaaataagataaacatctatttccttccttctttcctttcttctcttctttcttctgcttattcatttccttagtaaatatttaatgtctgtatgccagggccggggatcctgaaatgaaaccaattttatcctcactttcagagtactttagtgtagtagaggacgtatgcataaaaatgtactatggaaattcacaaaattaacggattctcaaagcagctattgaagattccacaactccagttagtccttgctggtcattaaaagggacaccagaaaaacaaataactaataaaaaatacgagttaaatggctataatgcccacctgtttggaaaaaaaaatagggaaatagaaaatggtatatggaatcattacaaacaaattttgaaaagaactaag

SEQ ID NO: 874 - DNA, 1234 bp, Homo sapiens
ttaattgtgacctcgtcttccctgacctgtgtaagcatctctgtatcctttcggttttaatatctgcactgccaaaagcagtcctcatacttgcaaaaggtctgacaaggttctctccacatacattccagtatgtaaagagaccatgaatatttcagtaagagcaagaacatgactccatcagtgtgaaatttcaaatgtgattataaatatgggagagtcctataggagggtccaccagagataaacttcacggaaaacgttccctaacctcctttaaaagaatagaggatggcagattgttccaaaaggaatggcttgggtttttaactaacaaatgttagcaagcctttcttgaattcactatgtattcaaacttctaatatgctttgtgatttttttctttcatttctttctgtctgaggtaaccaggaattgcgttcaaaatgagctcatttgtgatcaggcttaaaagttgcccaagctgaggtcgtttccccccagtcacaaagcagaatgtttttctcaagacttcataggcacttactggtccgtactatctttggaatataattagaagctttgaatccttgaaaagcaaacctgttctcttcatcaaaaatgctaaccacctgtgcccgtggatcaatatcacctggatgtagtgcttgatatttttcccaactcagaagaaaaccattatggtttagagaggaaatgcagaatggcagaatccaccagagaaattgcacttatcgaaacaggccaaggcctgcatgtgttcggataaatcatttagtattgtgtaaataaagctgcagcctttacttcggagggatggtgtgggattttggccgagggaagcaggacagagaaggagcaggaagctatgctaattttcctgtcagcttaagggatccgtctcagcaagaatcttgtattctgataacggaatgctgtacgtgctgaccacatctaagaaccattaaaaagcaaggaaacaaacaaacaacccttttctcattccgacacacgaatagtcatcgagtattacaccagcccctctggtggcttccttcaaaactgttgatcttagctaaagtgtataaccagttaccagctgcacttcgcacggccatcccgtccacaatgcagcagactcttcccaaggccacctagcaagcaaggttgatcggatcatctaaactggccgcctcctgaatatttcactgaa

SEQ ID NO: 875 - DNA, 1155 bp, Homo sapiens
atttagcctcctttgtatccagcaaaaaaagattcagtacccaaaatggtggtattttggtatagtatgtatcttacaaaacggcaaaagacttcaaaagttcctacaattttatcttgggggtttccttttgaagtcgatgtagaattttaccttggggtggattttttgtacttcttggtctggtgtgttttgttgtgtaatgagcatggaggtgtgggataagaaagcagactgaatcccgaggaacaaagcctgccagactgtggtggtgtacttttcttgttgttattgcttaaatgctgcaagagagtggaaaactcttacgaaataatgcacgatgggtagaacttcagagaaaatctctgccgtctaccctgtgcattttcgaggaagctcagagggcatgctgaacctttgctttttgtttctgaagagttcaggggaacctacccataattaattttttaaaacactacctagagagcaccctcttggttattaaacacatgcgctgtttcgatgggatgtttgacctggattgtggatgcttgctgggacgtggcatgtgttgggaggctctgtgctgcctgctgagcaccagcaaagccacagtggcccctacctctgtgggaggccctgtgccaggtgccctcaaagagtagggggcccatgagggtatgaccagggggacctgatttcggctgagaagttggcggggattacaggcctgggcggctccctgaggaaattgcattaaaaatgagatctgaaggcttgattggggttggcccaatgaagggataggagaagggatggggagtgggcagaaggaaacacatgtgtgaaggtcctcaagggaaaagtgcttggcttggacagaggcaggaaatcaggtaggaggctagaggtcgggcagggctccgggagagtgacttggggtgcagcatatggtgaggatctgacactggggagtcatttgagcaggttggctgtttctgtaggagcgtgtgttaagctgctggcagtggggatggtgaaaatagagatgtggaggaaacagcagcggaacttgctgacaggttagatattggcattgagggagaaaggagagtcaaaggtaggtagatggagatgcttcactgagtggggagt

SEQ ID NO: 876 - DNA, 1302 bp, Homo sapiens
cctatctccaccctcactctttttgttgtggtgaactacacttcccttgttccactcggttctgttgcacatgtgattaggcaaggggcagatatgtgatatttattatgagtcttttccacgcagagaggatctaaatctggctctttgcaattgccttcatacatgtgcatacacaccacacacacacacacacacacacacacacacacacacacagacacatacatatgcacacaccccgactcaatggaggaccctcatttgtagaagggtaaaatgggtgaggcggaaatgcctgtatggcaccatggagttctgtgtagccagttctaatcctgggctatttggtaaggaatgaagttggagatagtcttctgtcccttacaaccaaaggaattctaactaatagtttgccaagttttatgtttataataaaaaatgacatgctttttcttttggatttttaatgcttttgaattaaaaatgctagaacatgaactgattcttctatcgctatttagatagagccttgcaagagcagagcacgcatgctttctttaagaacaggttggtttgtggtcgtctgaggactgttttaaggagacttattatacacaatcatcccccacaaatgatttctaaagagaggctggtatgaaagaaggagtttccatgattctgtcctgtggttctggggaattctgaaaatgaactttagatatttttgtgaaattcttattttcatatttttggtatctcagagttttcttttctggcttctgtttaacatactcttctttgccctaaatctctcttatttttgctccttgggacaactgaagaatccttagataattaatagtatgaaatactgcccttttagttgaaaaatgtcacaataatgtaataagataaataaggaggtgtcgctttaacctgtatcgtgtagtctcctctacttactaacacttacttgtattactagaagcattattttttaaatcatggaaaattggtggcaagctgagcatacagttgtttatttctgtttgactgattattacaacttcattatttgatgaaggttctgtacgttttcctttaagacacatagaaattgtgagaagatcctgcagccccgaaaggctacagtgttgatccaaggactctgagccgagtgcagggtttgtacttggacctgcaggctgggtggcgtctgtgggagcagtgtgttgagagagattctgaggctgtatgtgtcagggcctccaggggaaggatgcattgatggattaattt

SEQ ID NO: 877 - DNA, 1213 bp, Homo sapiens
tgtgtggtccacctcacttctcaagcaggtgtctttccagtctacaactcgttgaccacaggtggaattcataagctctgttccctgtcctgcttgggtcctccagagaaagaaatgttgaattatcatcttggtgatggtcaactctgaaagcctaaattttcatgatcaccaaagtgtttggatttaaaagggtggctcactccgtaattccggcactttgggaggctgaggcagaaggatcacttgagcccagaagtttcagactaggctgggcaacaaagcaagacccggtctctaccaaaaaaaaaaaaaaaaaaaaaaaaaaaaaatcaaaaaaattagctgggggtggtggtgtgctcctatagctccagctactcaggaggctgaggcgggaggatcgcttgagcccaggggtttgcggctgcagtgagctgtgattgcaccactgcactccagcctgggcgactgtgagaccccgtctttaagaaaaaaaaaaaaacaaaggtcacaagacattcttggctccgccctgcagagctgcttcccgatctccttttttatttgcttcccaacctgcgggcctcagtgtgactcaccacaccggactgcctggccctgctgcctgccgcccatccttgcggcctggacgactccatgtgcgagttgctggcgcagcgtccagaaaacagaccacaccccaggaatgatgatacgttatagcatttctctgctctgtaagagaggcaccagggtcgtgtgctgggtctggggtttgtccattccacatccggtgctgctgttgactctggtgtcggccgctggtgagctggctgtagctggtcacctctgggtggtttctggggcggtcgcaggctgactaacacaccaaaggtcagccagggtgttgaagctggcacctttcttcctggagcacagacgtcatcttggatcttttagatacttggacttactttatgcagaacattctggatttgtgaattagatggactctttattattttgtatttggattatttctttaaagagatcagagataaaaatatcattgttttgccagtttgctaccaccagcccacacccctcttcccgttgtccaaaaagggggtggttagagttttcttgagtgactgggctattatgattagcagattactaaagctgtgtgattttaacaagacgtaaacac

SEQ ID NO: 878 - DNA, 1219 bp, Homo sapiens
tgggtctttctcatgctgttcttgtgacagtgaataagtctcatgagatctgatggtttttttttttttgagatggagtatcgctcttttgcccaggctggagcgcagtggcatggaaatctgatggttttataaagatctgatggttttacatgctctctgttgcctacaccatgtaagatgtgccttttgcctcttctgccatgactgtgaggcctccccagccatgtggaactgtgagtcaattaactcctctctttgtctcttttttttttttttaaataagttacccagtcttaggtatgtgttattagcagcaagagaacagactaatatacctggtacctggaactatgctaggcactgggaaataatcgtgaaaccaagccaatttcatccttgttgcctagggaaacagactctgttcaccccttcacactaataagcatatgattctacaccagatgaaagttctccaggaaagaagctttgctccgaaagcattaagcacaggagcttcacccggtgctggggccagagaagacttccttgaagaacacaaaccaaaatctataagcgaatcgagtgagcagcaggatgagaactttccagagagggaacagcaatcttgaaaaagtctgggggtggaagggaacatgttgtatttgaaggttggacaggtggtcagtgtggcttgaacaaggagaatgggggtggggagtggaccaagatgactttggaggctcacacaggagccaggccaggcagcacctgctggacatcaggatttgggctttattgctagggtccttgaagagttttaaatggggaacacagtgaagtggtgaagcagaggccgtgacagcctgctctagcgggtggcccaggaaatgcagaggacataggaggggcagattggggatagattggatggggtgctggtggtgatggtgcctctcaagggtgtgtccttggtttccagttcctttaacaagagggatggtgggtggtgcccttcccgagcactgggacactgaagcaggattagctctgtgtctgtgccacttcctctctggggctgagtttcctcatttatatacagagagatggaccttatggcctccaaaaggccattgtccatattcctacacaagaacaattaaagctgcagtaaaggctatcaaggctgggtgcgatggttcacgtctgtaatcccagc

SEQ ID NO: 879 - DNA, 1281 bp, Homo sapiens
gagttgttgtttttttttaaatgggggtagttttctatctgtcatgggctctagcatctactccgctacccaattctgtcatctccaagctgagtttcctcttctgaggcagaggctggagcagttctttttcagttctcatcctctccatcccaatccagtatatcaatcaactctaactcggagacgtctagctggcaatgtttctaaaactttcactggatttctttagacattgaagcaaacatttttttctaagaattgcttctcagatgatgatatcaaatgtatatgcttttgcaagtttgaaaagttcaaattaaccacttttgactaggtaagtctttctaaaaaccatttaaagctaactgggtcttagcatcctcctgtgtatggaagagacaggtgaccgctccaggttgggtgctcacagaacccttttcctgactctcatggaagatggtggaaggaaaatagactgtctcatcaaccctcctgtgtcctctgaagcaatctcagtttttattaaccacctcttctgtgtttctggtagctatttaacctgtatttaatctgtacttcctatgccagcctcaattttatttgatttttacaattattctcttctaaccaatgaagtgtttgtcagtatgccccaaagcttgctcttttgtgctcccttttgaataactttctatccagaaaaagagattatttgggacttgagatttgcagtgataccaacttatagcaatgatgtactttaagggaactacccaactatgttgtgatagaagaaagagaaaccttcactttggcatttttttttaatcactgtttatttttctgtttgcggcccaggaagcagtgggaggtggtggcagatatgctttgcatatggattgttatgtttttatttgggcaagtttaatcatggaaaactcaaaaagaaggggggaaatggtcagtttaagccaaaagaaactttctaaacaatgtataggtacacagcaaaattaaacaaatccaacaatttctgaagcttagtgtaattgagtggtggttgttattcaataaaattattcccaaaagtgtttctcctaagagtgcagttcccatgagtcacttcctgaacccattgaccaaaggtggacagagacaatcctgtagaccttgacattcagaaagatgtgagctgcttactgatcatatatgcatacgtttctttacagcagaggaaaccattgtccacaaaactgatgttcttttggggttttatgt

SEQ ID NO: 880 - DNA, 1239 bp, Homo sapiens
tcctagccttccattgctatgcactgaatgaggactactctcgtgtgtgtgtgtgtgtgtgtgtgtgtgtgtgtgtgtgtgtgtgtgtgtgttggatctactaacatgtttagcaaatggctctgacagggtggccatgagcagatgagaccagctcttgcttggttggaagccacactgcagtttgcagtttagcctttggtgtctcagtggcttcttgcttattccatgctttttctatcccatcctctctctgtgccctcctgcaatggcagccttggcacaatgcctgggtgtcctcatccttgctttactctggaaagtgtggggatggagaggatggtgcatttccagtgcttccttacctgtcaataacaatggtggccacctgggtcccagcacttggctggtggagagatttttttcattatggagctaataaagggtccctacgttttacattgattaatgaattatcacccagacatgtgcagatgaaatgtcaatataagaaaaatcaaggtatttgggaaacatgggcataatcaggtagttttgctaaaattcctcttccttggtctacataaagaagacatgggtctgtcatagaatggggacattagactgaaaactgggacaacccccttccttattttatagagactaggagttaaggggcctgcctaagattgcagtgataaagaactgaaccctaaatcagctcccactaatgaaaccctgctttccttgtatcttttaaactcagttctgcatccaacttgagaagaaaaaaagcttctttccatatcaagtaccatatgagttcatttaaactgcaccttgcagaaatgcattgccagaaagcaccagtagcctcctatctgcaagcagagtagtgctctgctctggggaggggtcattggaaaccataatgcagagtgggccccctactccatttcccagcaaaaggctccagctggagggatgggttgtggggcaacctggttcctgctaactgccagattgaatgtgtgggctagaatgcctgcacatttagttaaactgggctcagcatgcttgtcctcaaaatgtccatcctggtcacagcacacaagatggctattggtctgcttttaccctaccctgtactatacatgaaaattccagttattaacacactcaaactggtggagcttgttcaccctaggaaggggattgtatatatggcaggcttccctg

SEQ ID NO: 881 - DNA, 1363 bp, Homo sapiens
gcctttcttgaatggcttcgtgttactcagccgtgccctggcaggaatggaactccatcagggaacagggcagctctgtttgaatggggtgaaaaacagcaaaattaattcttagcaagctccttgttctctactgttcaccgggacctggctggcaaatgacttagctattagtatatttaaaaactgttcaaaagcaaaagagaaggaacaggaatgaaaggaaaccttcccttaactctttctgcttcccatagcaggtctggttcctgctccccgcctaggacaggagctgtctggagctccacctttgcaaagaaaggaaaaacacaaattgcccccagattggcccagtggcatgccattaggtgattttgcataggggccatatcattcatggccaaaaaaaaccaaaaagcaaaaaacaaaaacaagtcccatgtcctactgactctagttcttccagtcgttatcctctgctgtctctctggcatcctatgaatcagatcaagcccatgctgttgttggtttttaaggtttctttcaataataggctaaggaaagacatgtttttctcttttaaatctctgcaactccaaagtagactccttcgaacgtatttaatttggccttttcagctttcttcttgcccagctctgtcgaattcatgggtgtgtgtgcacatgttggtttcactcacccagagtaattttgtgagcatgcatgtgctttttaatttctgcttgaatgtttgtcctgctgtgttgcagcttctaaagacattgtcaccgagtgtgtgtgactcaaagatcaagagtgaggctaaactgcgaccccaacatcacttccttcatggaaaggtgttggcgctgatgtagctcatggaaggatcagactgggaaccacagaggaaggatgaggtgggatgtggaggtcagagcatctcacgagagtccctcaggctctgcaacactagattcgaatatgagcctagggtttccccaacacgtgcgtgcatatgaaaccacatcatgattcccgacgtgagttagatgagggagagtttgtgtaactccacacccaggagggtaagccactttattatcatgctttggggctgtgcttaagaatttaagctctgttttaaagccgaagaagaaaacatttgaatttaccttcatatgccactaagaacaaaagctctgaagttcttcctgctggcaccaaatattaggattacaagctgtctctctgacaccagtggtaaaaaagcaagtagaatagtttctgagtctgtgttgcagcctctgacacgtggctcaccgctgtcatttgggggatggaatgaacagtcactgttcta

SEQ ID NO: 882 - DNA, 1220 bp, Homo sapiens
atgattatttacatgtctgtttcaccagtaaaccaggaattccttcctgagctattgtacctccagcacctagctcagtgcgcagccacagagcagcacaacacatatccactgaataaatgaatgcataccagaatgtggatttgcttattcaatcctttctaagtgcctgaccagattttggtgagggagagaaactgacagaaccaaagcacaggagtacccaggagaggccgacttaggtgaggaccagaatctcaatgtgcagtggtcagaggacagctatgggtgctggaggggcataccgtgttagagggacatgcccctgtaaatttcctcaggttatctgagagaggaatctgtaacctggccaaagtctgggttctttggaaatggaataaaggggcagggagattttaatggctgaaaagggaataaataaaagcatgggctactaccttggaggacaaatttaggtgggattatactggaggcactgagccaggccagcataaaagggctgaggggaaagggcagaatgcaccttgaacttgacaaaaccttgcaaaatgtcaccaacctattattggctgactcttgcccatcctcctcctctccaccacctaacatgcaggcagctttcactgcttttgcagcccgcctgacatgcctacataaattgagtagaaataatttgtgtttcagtggaaaagtatgctttgtctacacagcacacacttgagggttatctgattctagccctgttcattgtctgtgagctcttttgtacctctttatattgtaggtaactaactgataaatatgcaatctttgtcttgcctggtagagattcaattatctttcctcctaccctgtggaaaaatcagtttgcctccatttacatattcatttcaatattgtgatctagaaatgtatgtttttcaattctcttctgaactggttataacatctgcgtggttccttcattggtggagtaaaataaaatctttgacctatattcattttgatatctgcaggagagtcatgattttatttatttatgaaaacccttttaacaattgtgattgcctctactccaaaattttggttgctttattaaaaagaagcttcctcattttgtatctggaaagtgattgatgatatttacattgcacattcattattattgtgcaacagaaaaagcctgtaacaagagactc

SEQ ID NO: 883 - DNA, 1196 bp, Homo sapiens
tgttttgaagctatagatcaattttggaagaattgacatctaaacaatatcaagccttctgacccatgaaataagatatctctcttcatttatttaggtcttttatagccatatttttgtagttttcagtatcagatctttacatcctttgtttatgaaatctctgagtacctcaaattctgaagtttcaatttctaatagttcattggtggtatatagaaatggagttgatttttgtatattgatcttgtgtttttcaaccttgctaaactcacttatttgttctagttgtgttttgcatagattttatattaggatggctctaaaatagactttttttccaggtctagattagctctgcttctaaagcatgacttttctggggtgtctatcaaatgacttgtgcattcaacaaagtttcttcattctggatggttgaaattaaaacatcccccagccttgtaagagctttggtagtatttctttagttaattttgtagagaccctgtatgtatgtatgtacagcttagaatttagtcagagtatcaagggtgccttcatagacatttctttgtctgtgtattttcctcaaattccagctgccactacttcctcagattctgatctctgttcagtgagatcactgtgctttgacgttcccctctctgtcccacagttaagaaagcacctccagacaaaaacaagtgatcatgagacttgctttgtttgtttctttttcctcagggtttacagtgcttgctgcctgttgtctgtctaaaaactgttgcttaataattttgtccagtttaacagctgtttatggtggcaagatttgtctagtcacagttactctttcgtagtcaaatatgatttttaactcaatcatattgtttttagctctgtagtccagttaaatctcaactatgatgttgtgagttcactggaagagtaaaattttaagcaaataatgatgtataacatgatcttgtatatattcattttatgaaaatgattttaaaaaattaatttcaaatgaatgctgtcacattgatggcttattaatttactaaacaaaaaataattacccaagtcctatgacacttgtacctcttttaccaaatatgtttattctgcctagttattggatatatttactgtggacattttattctgtttctttttaaatactttggaag

SEQ ID NO: 884 - DNA, 1273 bp, Homo sapiens
cacactggagtcagaaaaacagaaattaagattaaggtttaggcatagaaaattaaaggatcctggaggagcagctagttttcataggtacaaaagtggtgaaatggccacggagaagggaatcagtacatttctgcagcagtggttgcgctgctttgaacagatctccgttatgtagaatttaggatgccctattgctgtctttctagatttaaaatgagatctttgaaccaggaggagatcttcatctgagacttgtctttctaaattttttggatggccatcaatataaaatgccacccatctgcagttaatttcttttcctcatcatgtgattaaaagtggtgattcagtgggaactgggaatgtttttagctggtggtagaaggctgcctacactgggcactgttttagattctcatatcatttaaacagcaaggaggttcagggaagaataaccgtagccttgggtaatccactagggcttttgtgagtaggagagctgatacctcacattcttagcaggtgaaaacttgccatgatggaaacagatagtgaagagttactgacgtatcccaaattatatgctgtgacataaattcccagcatgcccagccctgatttctgagttcataagtaattctagtgaaccttagtaggaattctgggtaagaaaatgaggttgccattggtcttgtttgcatcaccaagaccagacatccagaagagcccctcaccttgaaaagcagacagattttaaattaaccccctccttcccactcaccttcatctccctaagagttttggccatttaattccacattttgaaaggaatacattggtgaaatttgggaagagaatctgtgctatgcaatgtttcattaaaatcttcagtttttcaagtctctctaaaaataatttgtagatctatacttgatgtattaagtcagttttttttcacagcgggcctgtggctcgcctgcatcagaattgcctgggtgcgtgttcagaacaggttcctggatctgagccctttttaactgaggccgactcttggagaggggcaccagaatctgcatttgtagtgtataccacatcgtggttcaactgaaattggagaaatactaacctgagattttgttgaagttcacacacagatcacagcccgccctctgcaggtgtcccctttgggctcctttaggaagagggcttccatgagaaggtgaccccataccttgccctcttggtcaatgggattggggctccacctggc

SEQ ID NO: 885 - DNA, 1143 bp, Homo sapiens
ttgctgatttacagttttatctaatttcactgtgtttaaaagcacattttctcctgtagtcatgtgtttcctttcttttgactagagtcatttgaacagttctaacagaaagatgatctatattcattctccatctttcctattaaatttgtttaacacctaatttgacatcaacaatctggctacatttgaaccaatatccagacacaaaagcaatttggctgagacaagttagtttctgataaatgcttcagtgtgtgtgtatagatttttctcctttaccattttacacagataatctgaatcagaaaatactgcaactccttcctccttttgtctgccttttgttctccaaaagtaagtggaaattacatttccaagaaaggaaatgaaataattgcaggcccaaggtctgcaaaatatgtgttgaattgacagtgaaaaggatccatgtgttgacagacacagttgttagatgccataaaggcagatgtgaagctcaatttatttctcatcttgcttgttcaatgactgcttaagagacacattccagtttaatttatctacttaaagctctaatacaaatactgtggactgctgtattaacttctaaactttgaaacctaatgctcgattattcggttcttgacattctttagctaaataaaataactgatgccgtgtattttcatattgacagtaatttaccaaataagagcacctttctggaaaaatctgtttcttaagtataattagactatccagattgaatctgagaattctgtgtatgtataggtaattatttacccagactggcacacttcattcatttaatgtttaaaccttttaatgactaaaagaattttaacttaatgtagttacatgtaagctttaacagtttgtatcatttgtcagaatcccctgaaactggcctagcttccaggaatgagaagggttattttcagtgctgtgtctggctggctttgacttattagtaagtactctgttacactaaccacattctcttactttatagacttggcctgtcaaagcactttgaagtcgggtcagcaattaataagtaaagtatttcctttgcttttaaaaactgtctttgcattctagtagttaacacttctattt

SEQ ID NO: 886 - DNA, 1207 bp, Homo sapiens
cagccaaccacgtaaaatagttcagtcttgtgccaattatctgaaagcagttttctaagtaaaggatgaaatgtaaaactggaggagaagctgagtgtgtagaatgatctggcacagctggcccagtgctggtgtctggcaagagagtgaagagcagagctcttggagttgggccctggcactgtcacccagcttccccacacttcttctcttcaagatggggatagcacctgccttatctgacacatggggttgttgtcaagatcaaatggaataaagtgtgaaaatactttaaaatgcaaggtctgagtgccacctttgaaaaagaatccatttttatgactttcacatcaccactaattatggaaagaataagcaaaaccaaactattactagagaaaaatacaatgccataaagaaacaaaattagttttagaaagaaaaaagttgaaaacttcttaaatcataagcaatcaatgttccatacgtactttcgttttcagaatatcactttgtgctttttctttcttcccatgacttcctgcagttacacattatttaatgtcaattcaaaatctgggaagcaactgaacaaggatcagtggacaactgggttttttgctggtaaatcttgaactgtgtagatacagtgctgaatgacctggtcaataacctttaaaacaaattgtcactgcatgcttgaggacagacgtcttcccctagtaccatcagggctttcctgaaatgtcacaaatggcgacattttgtggtccagggttcaaaaggcttgtgcagtcagagggcagcctgagtggcatggcagcacttttgggtatgcctaaaggcagggcatttgtttgaacgtcacagcttatcacctgaagggttgacctgcagaagtcaagcctgccttgagaatattaatttaaccgcttattttcaaaattccttggtggtagtggtggtggtggtggtggtggtgctagtgtggttcaaattagtgtcttagtgcgtatggactggcactaagggcatgtgtatttcacagaaaatctgcgctatgagagctgaatgccttagtcagctttgtacatgagcagcaaacctctctcttctctgtttttaaaatttgaagtaggatcttatttttaaattgtttttgagaggaaaggattataggttgctgttaattaactctcattttttt

SEQ ID NO: 887 - DNA, 1421 bp, Homo sapiens
gtctctacttgcttgagatttttgttattttgggggtttgggggtgctttttgttttgtttttgccaaatgtaacatgaaagcagatgctgcagctttagtctgttatgctgatttagtaaaaaaaaattttttacatatattgcttgctttcgatgcttctgtgaaatttttttctaaagcttttgtgcagctgtatggtaaaaatatggtgattaatttgaagagcttacattgaaagacaatgtaataggaaataaatgtagattgcagttggtcaagaattttgtagagaggataacaagacttaattactgaaaaacagtaacatagcattttgaaatataatcttttaaaatattgatgctttccttttaaatggaaatttaaattttataattaaaagtttaaacatttatgataattttcctcatcagttctcccataggaaataaagcatgtgaaagggtatttaaagttttggaggactctttttaaaatgactgtgttgataactagtttgggctggttttgttttagaaaaaacattttcatgtaggagtattctgtgaaggaaaggaatcatgcaaaatatactttttgctttggcgtcttacagttgtaaaggaatggtgatcattctgaatacttctgtagtgagtattcattaagaaaagaatgacaaaaatagtattcatacataggaattgggaccagttctctgaaaatgaagatatactcacactgggtccattttacgggtcccagtaacatttgactgagggaaaacaagtaagctcgactgttgttggggtaccttaatggtttcggtctgttatatacctataaaatagacaagtatatgtttgtccctttgtaggtaactgctatgatgattgctatatagtgaaactgacatgagtttaaaactagatggagcagcttttattgctggcaggaaaaagcatggtgtaatattaaggactggggcccaggtctagactccaggactccataaaagagtttaagttcaagcccttccattaatgaactgtgtaagcataggcagttacaaaaggacccatctctaaaatgggaataataatactttacctccctcacagtattgttgtgagggaaacaatagcataactgcaaaagtgctttgaacagtaaaaagatatacaagtaaaaggcattatttatatgagtaagaaagacatttttgaggggagaaaagttattccactttaaaaatcaatagccaagtctcatgccttttgttactttagtaagcgaaaatttcaggtactaaatacctttcttagccaagtttataacaaaaacatctcagtatacttcattacttatttaagcgtgatgtcttttttttttttttttttttttttttttttttttttt

SEQ ID NO: 888 - DNA, 1187 bp, Homo sapiens
cctgagggaggcgccggtcccggccccgctgccgccgccgccacaccggcccttcgggagcgtctgaggaggcgcgggccgctgcgggctcgggcgccgcagcgcgccggcccgagcccctggacgaggcccacggagccgctcgccccgacccagccgcccgatgtcctcaaaatggaggcagcgggggcggcggcgtgaagaaagcggcgctgtgggcgcgggagtaggggcccgggcggaggcggtggcgggatggggctgctgctcatgatcctggcgtcggccgtgctgggttccttcctcacgctcctcgcccagttcttcctgctgtaccgcagacagcccgagccgccggcggacgaggccgcccgcgcgggcgagggcttccgctacatcaagccagtgccgggcctgctcctaagggagtacctttatggcggcggccgggatgaggagccctccggagcggcccctgagggcggcgcgacccccaccgcggcccccgagacccccgccccgccgacgcgggagacttgctacttcctcaacgccaccatcctattcctgttccgggagttgcgggacaccgcgctgacccgccgctgggtcaccaagaagatcaaggtggagttcgaggagctgctgcagaccaagacggccgggcgcctgctggaggggctgagcctgcgggacgtgttcctgggcgagacggtgcccttcatcaagaccatccggctcgtgcggccagtcgtgccctcggccaccggggagcccgatggccctgaaggggaggcgctgcccgccgcctgccccgaggagctggccttcgaggcggaggtggagtacaacgggggcttccacctggccatcgacgtggacctggtcttcggcaagtccgcctacttgtttgtcaagctgtcccgcgtggtgggaaggctgcgcttggtctttacgcgcgtgcccttcacccactggttcttctccttcgtggaagacccgctgatcgacttcgaggtgcgctcccagtttgaagggcggcccatgccccagctcacctccatcatcgtcaaccagctcaagaagatcatcaagcgcaagcacaccctaccgaattacaagatcaggtgagctggaggtcggggagggggcctggctgccgggaacccgggcctgggcgggacgct

SEQ ID NO: 889 - DNA, 1222 bp, Homo sapiens
cattaacaggagtttggaaaaaaaattgattccaaccttcatggatgacttggaggtgttgaagacttcagcggaggaagtcactgcagatgtggtggaaacagcaaaacaactagaactagaaatggaacctgaagacgtgactgaattgctgcaatctcatgagaaaatttgatcggatgaggagttgcttctcatggatgagtaaaggaagtggtttcttcagatggaatctattcctggtgaaaatgctgtgaacattgttgaaatgacaacaaaggatttagaatatttacaaacttagttgacaaagcagcaaaaggggttcagaggattgactccaatgttgaaagaagttctacttgtgagtaaaacgctatcagacagcactgcatgctaaaaaactatttcatgaaagggtcaataaatggggcaaacttcattgttatcttaagaaattgccacagccaccccaaccttcaccagccaccatccttatcagtcagcagccatcatcattgagaaaattgaggtaagacccttcaccagcaaaagattacagcttgctaagggctcagatgatccttagcattttatagcaaagtatttttagattaaggtatgtagactgtttttcagacataattctattgcacacttaatagactacagtatagtgtaaacatcactattatatacacgagaaaccaaaagaaaatttgcaagttgctttactatggtggtctggaactgaacccacaatatcactgaggtatgcctgcatcgagttggtgaaagtcaaaaattcccctatcaggcttaattcggcccgtgtttaaggcagctctgctgttgatgatttttacccagtgaccgagcctcgtagagtgggctcccttgacagagactgccttttggagccaatcacaatggaggtttactctgcagctgaggataattttaattctgttatgaaaattgtatgagtaccatgcaatagaattccaaatgttttactttgtagtaggaaaaaaactagtaccagaaaataaacatgtaggctttttagggaaaacttcagaggcaaaagaatgcagagcatttaaactttgggcaaacaatagtttccccctgtgtgcaccatactttctttcccagacccagcaacatgacccggggatgtgcacctgtcctttctgtctggtgagaaacttgctccata

SEQ ID NO: 890 - DNA, 1315 bp, Homo sapiens
tcaggatgctttgcatgctgtggcagctccagctggtagcgatggttctcagggcattggaaagaggccaccaggttctttagtttctactgggatgacatcgtagcccagtcccagttccttaggttctcagtccccttttacttccctccaccccacatggttttgaggattttttttaagccttttttggggagttgggagaggagtgagaaatgtgtgttgaataaacagattcctgctgttatcaaatgctgtctgctcttcatactttttcctattctgatgttttttcagatagctcgtcagcatgtgcaagttccagggggtacagatagtgaatgtattgaatatgctttccttcctgaaaagaggacacactggagctgcagagactgtattcagagcacagtgggggctgcacacactcaggagctctgtcacaaagctgttcatggaagaggatgttggacttcttacttggtttgtaattttaaaacaaaaactaaaaaaaaaaaaaacgttgctgctagacttgggggtgattttgaaatgggacaatcttttaatgagtttatctacagattctgtgaggaaaaagcatctcagaaagtgaccatttctaagtgaaatctgacagccaaaatcagcagcttcctccaaaaatataagagcagaagaattttttttttaagcacttgttttgttcatttgtggacttggcattttggtgtattggtttcacatgtcaggatctcttttgctttaaaaccaagcagatcattacagtacagtatttttcacccacaaccaaaacaaccccttttaaaagagttggtctttgtttagcattagaaagtcttgttaaaggaaaatgctaactctgcttttgctagaactttcccccatcagttcacaactttcttctactctgtgccttgagctttgtgcactttgcaactgtgtgaccatgttgtcaaactcctcctggagaagtgtatggtatctaaactcacccaccaagatggcaggtgtggccctgtagcaggatgctaattaagtgggaaaatagaaaccttttgcacatgggtcggattttcccctggttcaccagagcatattcatattaatgttggggaccaactctcctagagcatttccattccctgtgccacttaacacgatgtctgtcaccagctgctatagtattggcagtactctagtttagggatgggcggtactttagcacggaagcttcccttagtattattgagagctacttcctgcgatgctctaggaagcagatacagttatt

SEQ ID NO: 891 - DNA, 1471 bp, Homo sapiens
tggctaatttttgcatttttagtagacccgaggtttcactatgttggccaggctggtcttgaactcctgacctcaagaaatctgcctgcctcggcctcccaaagtgctgggattacaggtgtgggccactacgcctggtgaatttttatattctttatagtgatggggttttgacatgttgcccaggctagtctcaaactcctgggctcaagcaatcctcccgccttggccttccaaagtgctgggattacaggtgtgagcgactgtgcccagccgcatgtcttacaattaagtagagatgggttttgccaggccaggctggtcttgaactcctgacctcaggtgatctgcctgcctctgcttcccagagtgctgggattaaaggtgcgagccactgctccggcccatactgaagtttttaaaaagcatgtgaaaaaaaaaatccccaaaggatcatatgcttttttattttatatatttttaattgttcttgttgctgtgtagggagtggagacgtggagaagggcgagatgaggacaggtctcatagaagagatgaagagcggccccggcgtctgggggatgatgaagatagagagccctctcttagaccagacgatgatcgggttccccggcgtggcatggatgatgacagaggccctagacgtggtcctgaggaagataggttctctcgtcgtggggcagacgatgaccggccttcctggcgtaacacagatgatgacaggcctcccagacgaattgccgatgaagacaggggaaactggcgtcatgcggatgatgacagaccacctagacgaggactggatgaggacagaggaagctggcgaacagctgatgaggacagaggaccaagacgtgggatggatgatgaccgggggccgaggcgaggaggcgctgatgatgagcgatcatcctggcgtaatgctgatgatgaccggggtcccaggcgagggttggatgatgatcggggtcccaggcgaggcatggatgatgaccggggtcccaggcgaggcatggatgatgaccggggtcccaggcgaggcatggatgatgaccggggtcccaggcgagggttggatgatgatcgaggaccttggaggaacgccgatgatgacagaattcccaggcgtggtgcagaggatgacaggggcccttggagaaacatggatgatgatcgcctttcaagacgtgctgatgatgatcggtttcccagacggggtgatgactcaagacctggtccttggagaccattagtcaagccaggtaaaattctatttcctagaatatgcttaagtgttcacctgtaaaagtgaaattctgatggataaatatcagggctgtattgttattttccagataaactggtctttcatctttccttcagtatcatttgcagtgacttcgctgtcaaaagtttgccttcagaataccaccatccaaaacataaataa

SEQ ID NO: 892 - DNA, 1220 bp, Homo sapiens
aaagacatagagaacaaagaagagaaagaaagaaaatatactagtgggactcatttaattggtcccatgaattgctctaaaatagttttacataagaaagacaatttgctttacataattctactggataacaaaataattggtggaccaatacaagaaaacaggtggtatgtgtgttgcctaagtccaatagcattttttttttttgagatggagtcttgctctatcgtccaggctggagtgcagtggcacaatctcagctcaccacaagctacgcctcccaggttcaagccattctccggcctcagcctcccgagtagctgggattacaggcgtgcaccaccacacccagctgatttttgtatttttagtagagacggggttttgccatgttggccaggctggtcttgaactcctaaccctaagtgatccacccaccttggcctcccgaaactgctgggattacagacatgagtcactgcgccaggccagaaatgtattttttttttaagtgacagaaaacaggttatacgtaacgttaaaaataataaaatggaagactatgccttcggggctcatttctatagtttgttgctagagaagtttctctgaacgtgtggagcacagggaaaaaattggtctataggttgttgggttatagacccttccttttatattcatatgtatttatatgagaataaacatgacccaaatattctacacttaatattttgcaatcaggaaaaaatgacttgatagaagtatttaccctgccaggcgtggtggctcacacctgtaatcccagcactttgggaggccgaaccaggaggatcatctgaggacaggagttcgaggacagcctggccaacatcatgaaaccccatctctaccaaaaatacaaaaaattagccaggcatggtggtgcacacctgtaatcccagctactcaggaagctgaggcaggagaattgtttgaacccaggaggcggagtgagatcgcatcattgcactccagcctgggcgataagagcgaaggctctgtctcaagaaaaaataaaataaaataaaatacaagtcaggcgcggtggctcactcctgtaatcccagcactttgggaggcagaggcaggtggatcatgaggtgaggagtggagaccagcctggccaatatggtaaaactctgtctctactaaaaatgcaaaaattagccgggcatggtggt

SEQ ID NO: 893 - DNA, 1376 bp, Homo sapiens
gtctcaatctcctgaccttgtgatccacccacctcggcctcccaaagtgctgggattacaggcgtgagccatcgcgcccagctgaattttcactttcatacaagtaaatttggactttttgatagctgttgatacaaatattaacttgaagttaaactgcatctctgttttaggcctgttaaaatagacataactatttttaaggggaaaggaaatctaaaaaataatctaatagtgcatatgtgacggtaaaaaaattaacgtgtccagttaaatgacagaacaagtagttcatctgtaatcagttgaaattaggttactataagccctcaatttgtattatgtagttttaattagtacagaaccttgtttcttactatgtaagttagatatcaaagttcattatatttcatactagatttttttactcctaggatttaaagtggtgggtctttgaaaggtgacccctagatctaaattctagtttcccatttgtaaactctgccagcaccacattttagttgtaagcaaggaccagtgattatgtctttggttttgttagggctcactcaaaaaggtagtctggatgaaataagttgattctcattgcatcacaaagactaatgatgagtttggtgaatcctgttaaaacaactgatcttaatgtgtgaaataaaacctattcaaatatttaagtagatagtggaaggtacctaatatattttacaattatgcttatagctttcaaattctgcctccaatacacgcgtaaggctgaattccgtaaactgtgtgacaatttgagaatgcacttatcgcagattcagcgccaccataaccaaagtacggcaatcaatcttaataatccagagagccagtccatgcatttggaaaccagacttgttcagctggacagtgctatcagcatggaattgtggcaggtatgttggagctattagcttttcttcctagaaataatagtctgtgttacttttctccccccttaatgaatagcttcatcttggtatgcattggttaatttcaataaggtaaggaattaaagttgcctaatggactgggaaaagttctgaacaagaaatctcagaatattttgtttctagttgccttctatgaattctggaccaaaccatataatctctttcagacccagtttcttgacatataaaacaatacattgccagtgctgctcgaagtgtggtttcatgactggtgtcatctgtaaactatctggtctgtgatgaaataagtatagagtagaaaagcatatgcaaagtttcttagtagcaattttattgtacattttgtgtgtttttactctgataaaaagtgagctttttctgtttcatttttgtggt

SEQ ID NO: 894 - DNA, 1149 bp, Homo sapiens
atgaagatttttcccgtgggatttccccccatttacccaataattcattcataataaacagttgttgaacctagataaaatacacctctgtctcttcccatttgcctataagtttcttgccaagatgtgatacagcagctcaaagaatgcttgccaagtcactaatagtctttgctctctctagttcagtgactttccgatactgtgtaacattcagggcactatgtgaacttgtaagtgtgaccatactgcatgttttatggtgacctggtccagtactgcctttgttaaagcatctgtcatcagtaagagatgataagttttttgcacaacagtgaaaaccccacctttaagcatatgattacgcttaataaatattttattaaaaggagaattaaagacctaaaagggaagaagttagactgttctagttctggtactgttgaggcactgatgaggataaatgatcatgcagaggtctcttcataattgaccccaatggagtcatcaagcatttgagcgtcaacgatctcccagtgggccgaagcgtggaagaaaccctccgcttggtgaaggcgttccagtatgtagaaacacatggagaagtctgcccagcgaactggacaccggattctcctacggtaggtttttttccccaaaagcagtgaggtccatgttctctcagcctcgagagctattgacctgaaatatccacaaaagggagcccactcttgaagcaagcgtgcagatgatatgcaaatgggtgaagctgctgtggggtagagggggtggggtggggagccaggaaccaattatcagagacaggcaggcctttttttttttttttgagacggagtcttgctctcgcccaggctggagtgcagtggcgctctctcagctcactgcaagctccgcctcctgggttcacgccattgtcctgcctcagcctcctgagtagctgggactacagggcgcccaccaccacggctaattttttgaattttagtagagacggggtttcaccgtgttagccaggatggtctggatctcctgacctcgtgatccacccgccttggcctcccaaagtgctgggattaccggcgtgagccaccgtgcccggcctagagacaggcaggccttaatgaaact

SEQ ID NO: 895 - DNA, 1183 bp, Homo sapiens
ttatgtaatagatgatgtgttgaatcattcacaatttttaaaaaattagtttgcagatactcctcagacatcagtgtgttaagttgtggttatcttaaaaatatcaaagactaatactggaatatgtattctacacatatatcatttatttctttgatctttctatttgttgtaggtgtgttgatttctggttttctattctgtgattaggctctgcttgatttttgtgtaaatacatatgtgattttttttttcttgtgtttgctgaagattttttctttttcttccaagtcaatcaccttctgctgcttggatgggtggatttggtgctcagcctccccaaggacaagctcctccccctgtaatacctcctcctaaccaagccggatatggtatggcaagttaccaaacacagtgagccgggactctaaaaaaaaattgtaattcatgataggcttcgatttcctgtgacactctgaagacatgaaagtagacatcggaaaatgaaaatatttattttaaaaattgaaatgtttggaacctttagcacagatttgctttggtgaaggacacgtgtcttctagttctgcctttttaagtttttgttcatgatggatatgaacatgatttttctttatgtacaaaaactaaaataaagtcaataaagacaattctgactacaaattttgatataataggaaaaatggctaatacattttgattcttagatactattccatttttatcttgctgttcagtattttaactcactgtgtttttaaaagagcaaaaaagggaggatcgtgaaaacctgggaatcacatataagttcatcctgaatcctgatactcccctccccttccctgaggtggaccacatttgaagtcagcagagaaaaagtgtgatattcagaagaaatgcgtgattttggagtcgctttggaggaaatattttctttctctatgcctaaagaaactgaagccagactgaagttttgcaccctaaaaaaggaacagcattgtttgagttacttgagcaaatgttggtggtccacgttaagacatatttttaaaacttccaaaagtgtcgattattaaaattgtagtattttacatttcattttggggggaaatccaagtatggtgtttgtattgaagtcagacagtcatacttgtgcttttac

SEQ ID NO: 896 - DNA, 1180 bp, Homo sapiens
tctaatcacctctgaggagcttcatcactgttcatatgaatttcatgatacacatcagccatgttttatttgtatgttttgttttatagatcagcttatgagacagacattctcaccatttggacaaattatggaaataagagttttcccagaaaagggctattcatttgtcaggtaacactctacttgaaatatcattattactcttatatttgattcattcctttcacttatgttctccagggtatcagtgtttgttattttagtgcttctttgcagtatagaagtttaagctacctacctaatgtactttagaaaaaaaataccaacttgcaggtgtaaactgatgagtttccatgttatttattgtgttaggttcttaaaaaataaaagacaaaaccatatcatttttctttcttagattttcaacccatgaaagtgcagcccatgccattgtttcggtgaacggtactacgattgaaggacatgtggttaaatgctattggggtaaagaatctcctgatatgactaaaaacttccaacaggtaattcgatttttcatagcattctttaaggtttccatcttacatgtcacataaaagctttggaaactctgtaaaatgaacaataaaataaagcatatagctactttcagttgattgtatttcaaaattgattatttgcggtattaactgaatcttaatactttcttttcacaggtgtcaccaccccaataaacttagacaatgataaataacagagtcctattcacataagggtgcttacttagtttttctcttccttgtctcccactctttcttcatatacggtgtttcttatgtgttccctaaaacaatactttgctttttcctaggttgactatagtcaatggggccaatggagccaagtgtatggaaacccacaacagtatggacagtatatggcaaatgggtggcaagtaccgccttatggagtatacgggcaaccatggaatcaacaaggatttggagtagagtaagttgtttgggtttttccagtatagaaacgtatggttctgacaaaataaataaaagtgtgttttcctagggagaatctattttaattatatacattgagctatttggcattatgagcattatagaaactaatctaacaaaatatgatttatgaggctaagaaa

SEQ ID NO: 897 - DNA, 1185 bp, Homo sapiens
gggttattcttttaatgacctgtatatccccaacaactggtttgattcctggtacatactggatattaataagtatttggtaaattaatttattgctgtatggttttattctgcttaattaatagaaaaagtatgttctaccaaggagttttgctgtcggtagaccatgtattccttaaatcaaagatgtcaaagtaaccatattgcaaatcaacttttgaaactggttatacatgagatttgatgggaggaatttgttgatatcttacagtaagggaaaaaaaagtaaaatttttagatcttcatgtttatctttgtcctcttacagatcaaacaaaagactttgttagtatgtgctgtttccttaaaaactgtaacaacttgaactttgcaagctcagaagcatcacgtatatcaaacttgaaaggcacttatggaatgttctttttctccaggaggccttagaaatgactaagtgcaatgctatcctttgaatttagggagtgttggtggtcttcaatggtgtggagagccaaaacgtttagaaactgaagcttctactgggcaacagctgaactctctgaacttgtcttctccttttgatttgaattttccattgccaggagagaagggccctgcatgccttgtgaaggtaataaaacctttcgtagatccaacactgaaatgttatgtgtctcagaaagtagcttagtgtctgagcatttgcatttgttcccttgtgctgggctagctatagcaaatcactgcaaatttaatagcctaaagcagcaaaagtttatcatcttacaggctttaggtcagaaatccaacatggtctcactggggtaaactcgaggtgccagcagggctacattcctttctcggagcccctaagggagaatttccttggccttgtggctccttcttccatattcatagccagcaacattgcatttgtctgaccatttttttcatgttgacatctcatctgaccacaaccaagaaagtttccccaattttaagaatccgtgtgattacatggggcccagccagttaatcgaggataatcccccccatttcaaggttattaatttaatcacacctgcacattccttttgcatgtaagctaacaagttaaaagaatcgaagaacatctcaaatgcagaagcagaacaacttttaaat

SEQ ID NO: 898 - DNA, 1213 bp, Homo sapiens
gccaagattatgatagtgcctttcttgttgaagcattgtgaagattaatgtgttgacatgtaaaaactctttgagcagtgcttggcaaagtagaagctttcagtcggtagtagtcattcgccattattagcagacatgaagaatttacagtggtattctggcttgatgttgtggcttttatttagaaaaaatatactttactttgtgatttaaaacttttttcttgactttaaaaaatcacttgtatttatgactttcggggacatctggagggcataactttaacatatcatttaattggtagcctcctcttaagttatcattaggtggggtggtagggttatggcattcataaccaccattggaaagaaattttttttttaattaaaaaagttagtatgtatttagtgatacagtttttttttttgtttgtttgtttgtatataagttctgagaaatgtacgaatgactctctgggttattttattatattagaatgacaatttatactattgattgcccttaaagtaaggctccaatggataagttgatagggcttttgagaacaacttgcttttactagtgtgtatatgtgatcatttaataggtgtggcaatccaaaatgatctatttttggaggactgagctgtcgcagttgtatatgttgttcatatgtttataaaatagcattttaaaacatgatttggcatgaaattattttctggcatcaagaacaagagagagaaggggcctcaaacacttttttttttttcttcctgttggtagacatgaaccatccctctctgggaccttctgctcagccagctggattagacttctgaaaatattttccaaatgtaaatattacccaaagatttaaaaaatagcctagcatttacatgcaaagcgaaatgatcttacctgtttggagtttactcatggaggggaagctgtccatcagtatacattctaatactgttttccaaaacaggagcaccatactggaccaacacagaaaagatggaaaagcggctccatgctgtgcctgcggccaacactgtcaagtttcgctgcccagccggggggaacccaatgccaaccatgcggtggctgaaaaacgggaaggagtttaagcaggagcatcgcattggaggctacaaggtagaattaagctttcagaacatcacatttcttacatttttgtttatttatt

SEQ ID NO: 899 - DNA, 1253 bp, Homo sapiens
gaagcttggccttggggcaacagaccaagtctagcacaaataataaagagtgtatgtgtgtgtggcgcacagtcacgtttcacgtacaaatgtgtaaaactcggcattcttacaaataaaacataccacaataacagatttttgcaggtattacagtgcaagcacgctttggcaatcaatttaaacattttcttgtggaatattcttccatgctatggtttggtttgtttctaaagccccataggatgtggaaactaagtcaggacagattttctgggggtatcctctggttgctcttccagatacttcctgacttcctggggcttggggagaggtggatgcctgctggggccatttgcagagcaagaacagcttctcctgggaataagcaggcctccactgacctttgttggacgttctctcctctccctccttcccatctgtctccgtcttctctctcccacctttctgcagagccaccaaccaaataccaaatctctcaaccagaagtgtacgtggctgcgccaggggagtcgctagaggtgcgctgcctgttgaaagatgccgccgtgatcagttggactaaggatggggtgcacttggggcccaacaataggacagtgcttattggggagtacttgcagataaagggcgccacgcctagagactccggcctctatgcttgtactgccagtaggactgtagacagtgaaacttggtacttcatggtgaatgtcacaggtgagttggcccgccagcactatgctctctcttctctgtagccattacatttttttggccaagtgaaaaggtagtgagatctctaattgtaattggatgccaggcatacagcttcatagtttttgaaattcttctttgggacctggtgcaccagaaaggccgatcattaagaatgatagaattcttgtgcacaaagtaacatttttcttaagatagtacgcttttatttaagtaaatacatgcttttttttttttttttttgtaccactgacatctctggcatttagaatatagggttgaaatttggatactcaagatttctgattcatttattagagtttgagtttctctccatgatttccttctatgcagtgagcgggacagaacaggccccctttgtggccgagtttaaagttctgctttcagaatgttagttgacgatgagaagggccacacagggactgagttttgttagggatcaatttctctcttcaaggagaccccgcatactg

SEQ ID NO: 900 - DNA, 1209 bp, Homo sapiens
ggattacaggcgtgagccactgagccccgcctgaaatcctactttccactgtagtaacgtagtatttataaatgtagagcaaaacaatcatgagaagacttacccagcccagtgacttaattagtgtaaagacgatacaggtagtcagtccttcataaaaatgctgaaaatgtgtgtttcttagttcatgttagttttaaatttgcttataaatttataacttctgtaaggaatgtaattttcagtatagaaaatggaaggttttgaaaattactatttatggaatgtttatataggtaaaacattattttagatgttggtaatacaaataatagctaataataatagttaaccctaattgaatggcagttaattttttatgagctgcacaggtattaactcatttaatcctcacaggaactctataggtaggactggtttttgtttttcttgtacagacagggaaacgtgcccaaggtcagctagccaagtgacagagcctcgtccatgacctcaggcagcttgtgtcagacagagtgtgtgtgctcagagcaaatttgagaaaagacacagtctgtagtccaagaaaagtaattctgttggtcagtagagtaatagttatagaaatggtcttttgttacctggttcagacttaacttaggcttatttaaagtcattttttaataagtaaactttatttttagttagaaaacatgttaatgaagttgtgatacagtctgaactgtttgtgaactcactattttctcatcagattggttttcatttgatcagcttatggtctcaggcaagccctttaaccactctaggttttgattttcttctctttaaaaactgaatttgctagttttataaaccttttttttttttgctgactttgatatggtttgtgagtaccctgttttgggatttttttttttttttttttttttgagacggagtctcgctctgtcacccaggctggagtgcagtggcgcagtctcagctcactgcaacctccacctactgggttcaagcaattctcctgcctcagcctcccaagtagctgggactacaggcgtgcgccaccatgcctgcttcatttttttaatatttagtagagacagggtttcaccgtgttagccaggttggtctcaatctcctgacctcgtgatctgcctgcctcggcctcccaaagtgctgggattacag

SEQ ID NO: 901 - DNA, 1204 bp, Homo sapiens
aagagattctcaggatggaggctgtgtctgggtgaaagagctgattagaaacccaaagataccctgtgtaaataaaagatactagggaagtcttatctatatcatcaccttattattgctatggtgtaatttgattttctgagatactgaattttctgagtaattttttccatctagtgcgtataggtttgagtcttaaatgtttgtcttctcctaaaatcatgttttcgttttaggatggttttgcaagaataagacttgaccaagaccgactgccagtaataggtaaatgatactatgtttggaaaaattagttttagagaaaatatatttgttagtagaatttaagtattttactaaatgtaaatgaattttcaatgtagattaacttttacaatattgtatcttgctcaactacctgaagatactgaaaacatggccagcgtctaaaattttgatggattcatctatatcattgattcaacatctgctgtaaatattaacaaagaaatgatataatttccctcagatcttaatttagaaagttggtgattgcagtcatttttgtagtatccctctttctaatcacgttttgtcagatgccggcaccttcttttctctttgaggttctatgaatctttcattcttacctgaataatttcacactctccattactcatgtcctcctaaggtctcctgtggagagtgaatatttccatcgcacttacttgctactttcaatgttctcaatgtcctattggactcactagggcttagctctgtggttgacacatagatatgcagattttcaaatgtctggaatgtgttactctactacatgttttttgaaatggaaacagatggaatgactggctactgtaataatactacagcagctccataatgcatgaaatcctaaaaagtatgtaatattataagtatcttttcaatacaggtttcattgctattattcatcagtttccgtttagattacctgttccgatttaataacctttgataaatttgaaaaatttgtctttcaaacagagcctgttagtattaatgaagaaaatgagggatttgaacataacacacaagttagaaatcaaggaattatagctttgagttaccgtgactgggaggtaaagctctgcctgttgcccctgcatagttctgactctgccttcacttgcagtaagcccag

SEQ ID NO: 902 - DNA, 1223 bp, Homo sapiens
gccccctagactgagacgttggcgtttgaaatcagccaatggcaggtctacactggagcttcctctccgcctccttcgcctagcctgcgagtgttctgagggaagcaaggaggcggcggcggccgcagcgagtggcgagtagtggaaacgttgcttctgaggggagcccaaggtagggaggcgaggcgacggtgtgcgggagcgggctctccagggacttcccgggtccgcaactggcagggccgttcgattcgcaggggatcccgtttcgtttctgttgttttccctttatttttaggagtgcccggggcgacgggaccccgggagaggggaaagggaacagtctggggtccgggcatcgctgtgggccgggctgggtttagggggacggcggtgcgggctgggccggtttgggcgcggcgggggccggatgatggggcgagtccggaccttggcgggcgagtgctcggcgcaggcgcaagcgcagagtctcctcgcggtcgtcctctcggcccctccctctggggggacccccagtgccaggctgtcagtgcgcagccccagcccgcgggacccctggggactctgggcgcctgttctgcagatgaccggttctaacgagttcaagctgaaccagccacccgaggatggcatctcctccgtgaagttcagccccaacacctcccagttcctgcttgtctcctcctgggacacgtccgtgcgtctctacgatgtgccggccaactccatgcggctcaagtaccagcacaccggcgccgtcctggactgcgccttctacgtaggtgccctcccgccctgctcctgccctcttactgtgttaacgattctccacgtgaggagcgtttcttttccagtgttgggtagaggcgtctgtcggtggggttatttggacagttctttagcttttcaggagcatctgccttgaacctgtaccgttttgggttggagacatgcagacattggaaactccgtctccccttttctgttacacgcttgtggagtaactctaaactttctgaaaatacgatcattatatttgcaacaatactgttttggctgccgtattgaaaggaaccgtttaggggaaatgtatgtttaccctcagctagcgtgttggctaggataaagcagccctcctttaatttccagacacaggagtttagtgaccacttgcttttttatgctgttttttggtttgttta

SEQ ID NO: 903 - DNA, 1358 bp, Homo sapiens
atatctgtgtatttggaaaaataattgtaacgtaattgcagtgcatttagacaggcatctatttggacctgtttctatctctaaatgaatttttggaaacattaatgaggtttacatatttctctgacatttatatagttcttatgtccatttcagttgaccagccgctggtgattaaagttaaaaagaaaaaaattatagtgagaatgagattcatttcaatgtaatgcactaaagcagaacacgaacttagcttggcctattctaggtagttccaaatagtatttttgttgtcaaactttaaaatttatattaatttgcaaatgtatgtctctgagtaggacttggacctttcctgagatttattttatccgtgatgtattttttttaattcttttgatacagagaagggtctttttttttttaagtatttcagtgaaaacttggtgtaagtctgaacccatcttttgaaatgtattttcttcattgcaggtccacctaatcatcctgtgaaagtggtttctctatggaaagctttgtttgcttcctacaaatacatgcttattccttaagggatgtgttagagttactgtggatttctctgttttctgtcttacaagaaacttgtctatgtaccttaatactttgtttaggatgaggagtctttgtgtccctgtacagtagtctgacgtatttccccttctgtcccctagtaagcccagttgctgtatctgaacagtttgagctctttttgtaatatactctaaacctgttatttctgtgctaataaacgagatgcagaacccttgaatgttggatgtttttgaatgttggtaattaatataatttacttaaaaaggcttgtgtaaggcaaaactcgtcatcacaggcatgttgggggatgacattttacctttaagtccactctccctcgtttaattgtctcctctgatgtgtgttggggattcagtcctgcataaagtgatttgttggagttcagccatttccctcatgcccccttgtgccctctcggtggatcagcagggcctttgagccaagtgtgcagcttcactcaggatgggcagagactatgtggcagcctctggggaccttttggctcagtgctttactagtgccagcgcagtagtgcttaggtagcttgtgcatccccgtgttgatgtagtcatagtccacacagagccaaataacagacccttctgtacttagccatcaaatactaaatcacagtgaagcccttgggaaggtaaataatgtaatagccagggactgatggtattagttctttagtgtgattatgtgcttctaaaagtccctaaccacttggttgaggacagacc

SEQ ID NO: 904 - DNA, 1651 bp, Homo sapiens
agtgataataggtttgggccagttgtcaggagacatgtggcttgggagatcatgtttgaagaccttgagttaccttttgaccatatctcagtcatgattttaatcacatcctcagccatttgaattatttagcatctttttgaaattacatattttactcctaattatatgacaaagatatataccatgaaatatttatcatgtaattatgattaaaatgtgcagtctccccaaagatgtgaataatcactttaagtattctatatttaattaaaggagtctggtggactgtgctgggtcaacttggttaagctgagaactacatttcccagcatccccttccctatatgcttctgagttagagctggccaaaaggggaacacacacggacagggaaggctgaagaaacatggtggccattatcttttgggtttctttgctgtcaggtgcagtgatggatggttgcagaggtgcctgatagagtttagcttctctttactcattggctttgcccaagggcccgccaccagatgcttggctacagacccacaggacattaactacacagcctttcctcagatccttttgcagttctgtggtggctaaacgtgcctggcctctctgactgcttgtgtttgccgatcctccagcaccccgtccagaccttcatgcctccccaacagctcctcccacaactacaaggtcagattcctataatcaagccctattccatgagcccctgggactctgcttccctgtctgaaccctgactggatacaaggagtaagagagttacaggcaagtgtgaatgaagtctgttcaaaagggctttcgttctttcaaagccttttgcttttaaagttgttgtgaagggcaaatgtttagaggtggatgaaggtgctaaaacctttcagctcctgtggtctctagaacataatgggagtctttttcatatgaagatgatccttctgaccctccaccatttctgaaggtggatttgtgctgatcagacaaattcagatttgtgaaacctaaaacagaatcaatactcaccgcgtgtctatttctgtccttcatcccttcgtctctctttccctctcatgacccttatgcttctaggacttgtggtggggattttttattagaggtgcaggttttttattttttattagaggttcctagacaaggaatacagcaaatccatgcccttgacctcactcaggaacatgccttaatgtgcttagctcaccagtcaccacagtactgtctttgtggatcacgttttgttttcctaaaagattcattcatttgtccatccatccatccatccatccatcatccattcacccattcacgcattcattcatctcttgaacctaacatttctgacctagccttggacatagcattgagtttaggaagctgggctctatagtggacctatcaggcttgaatgcaggtgctgtaactccctagctatgggatttgggatcattatttaacttttgagccttgcgttcttacctttaagtggtgataataacaatgcctattgcatagggttgttatatgtattaggtgagatagcagatataaagtgattaacaccatgcacagtgttaattgctgttattgttattattcaaagatg

SEQ ID NO: 905 - DNA, 1228 bp, Homo sapiens
tagctggggacaaccccagatgttcaccggggacagggacattaagtaactggtccatgattcacacaggtaattagtgacagagcctgaatttgaacccagatagtcttactcaagagccctttctctgacctgtggtccttctagattctccgactcttaaagtcttgtaataaatatcttacacgtatatcttatggtttcttcactaagaatgtcactctgtacctaagtgatactaacttttggcaaacaataattccagaaaaccatagaatgtatcatcttatggtgtgaagtggtagtaagggcactggattaagaactaagacttggtcccctgttaaccttggacatgtttcttacctcccagagcctctgttttcctcattggcaaatgaagggtgatgactccccttacatacctggctgtgtggttctaggggtcaagcaagacagtttgaagagcctgaaaagcactaaacgtttatgagcacataaattattatcactatacataggattgtgatctattttgttccaaatatgagaacataacactttttttgaatttgttaaatttgttaaattttcttcatttttttctctctctctctagactctctctctctatgtatatatgtatatatactgtctctctctgtctatatatatatacttgtactgctgaacttaaacatatacatatacatacatacatatatatgtgtgtgtgtgtgtgtttaaatttaagttcaggggtacaagtgcaggttagttacataggtaaacttgtgtcatgggggtttgttgtacagattatttcattacccaggtattaagtctagtacccattagttattttttcgaatcatctccttcctcccaccctccacccttggataggcccagtgtctgttgttcccctctatgtgtccatgtgttctcattatttagctcccacttataagtgagaacatacggtatttggttttctgttcctgtgttagtttgttaagattgatggcctccagctctatccatgtccctgcaaaggatatgatattggagaacctgacacttaaagggcctcttttaagcctcatgcacatactttaattcaataaaggttttcattgataatagcctgtcactatcacccaaacagaaaattagtggatcttcagctcccttcccttcccttcccttcccttcccttcccttccct

SEQ ID NO: 906 - DNA, 1173 bp, Homo sapiens
ttcattgatcaacactcaggtggtatcagctgaatctctcatttaggaagtcaaaactttcgtttaatacttgtttactgtaaaatacacagaaaacatacattacacaaaacttaccattttaacgatttttaagtggttttaagcatactcacaatgttgcaagcatcactaccatccagctccagaactttttcatcattcctgctgtggtttcgatgtgtccccttcaagactcaggctctaccttaatactgccaatgtgacagtattaagagggggagcctttaagaggtgattaggtcattagggctcccccttcctgaggggcacttaggcccgcataaaacacgtctcactgtgagcttccttgcccttctgccttccgccgtatgagggcacagcgtccctgccctctggaggatgtggcaacagggggccatcttggaagcagagagcagccctcaccagacaaccaaacctgctggtgccttgatcttggtttcccagtctctagaactgtgagagaataaatttctgttcttcataaattacccactctcaagtattttgctatagcataatggactaaggcaatccccaactgaaactctgtacccattaaacaactcattattccctcctccccccagcccctgacaaccactgttctctctctacaaatttgatgactccagatacctcatatgagtggaatcatacagcatttgtcctttttcttttggtttatttcacttagcataatgtctgtaaggcttatccatgttgtcgcatatgaagaatttcctcattttttaaagctgaatcacattccattatatgtatgtaccacattttatccattgatgggcacttggcttgcttctaccatttggctattgtgattactgctgctatcaacatgggtgtactcacttactgcttttgtcattcacttatgatatttgtttagatccattagttcattatgggttacaaaatggtgattttctaatattttctctttaccagttttcaggataatgaagtgatagatcagtattccacaaaggtgacccattttttttttaaaccaacttttttttttctttaaatagctcttcgggttggcttctgtatcctttgacacaattccaggagccttttatcact

SEQ ID NO: 907 - DNA, 1248 bp, Homo sapiens
tagaaagggaaacagacccaagggattgcacagttattaaaagtataattgctctccaggcaggacaaacaagaatgagcactgtcggtgtgatgtgggttcaatcctgcttttgtcaccactcgtgggtcatctggacttggctccacccattctccttgcaggttcaccatcttctcttctccctgagtgaggtataagctccctgaacctgaatctgactcccaggtaaggagagggcagggcttgtccactgggctgtactggcatttgaggctagatagttctttgtggtggttgcgtgggggtcttacactttatagggtggttaagagcatctctggcctctaccaactagatgccagtagcacacccctagctgcagtcttgacaaccaaaaatgtccccagacattaccaaatgtcctctggggagcaaaatacctcctgtttgaaaattattggtctagacatctgtattttgtttgcttggggctaaaaacatagtacctttttaaaacatgaacaccaaacaatttgttttactctaatagccctgataattctgtagcagcattctcgttgtaaataaaaaataaaaatgaaaattcaaaattcagacttgaagactagaaaaaagaccatatgtgtgtgtgcatgtgtatgttttgacaaaacctagaacttttccaatggaaatctcaggaaagggcatggactgggagtcggaagacctggatccagtcctaggctgctgcttcttgctggccagtgtcttggtgagtcaagtcccttgagcagtgagattttttgtcattaatgtgaggaagatgttatagtgattcatctctgagggtcctggaaggactgacattcttaataattgaacagaagcgtaatgagtggtacaaatgtggaatcagggaatttccagtgatgggcaaattcacaacatgtgagaaaggtagggagggaaagagagagagtgggggcggggagggcaacagtgcaaaaaaggtgcaagaatggatgccccaaattcactgcgggttgtgaagtcactccaggacctggtctcaagtcagctaacggtttccacacagtcccctggaggcccatctccatataaggaaaaccagagggaagattagatttgttttacagagacttgtttcacctccacgtcaggaaggcatgacttatttgtcttagttgtggtgtgatctaggcctgcttgtatctctgcttg

SEQ ID NO: 908 - DNA, 1234 bp, Homo sapiens
ttctttagctcaggtttgtttttctttggggtgaggacgaggtccttggacattaaacttatttcttacaaatctaccaataaaataagtgcagcaggacagccctttggataatattagcttccatattgctggaaacagaagtctagatgcatacattttccagggatgaagtgtccatatctagaaaataggcaagacaatattgactccttcatgagactgtttaggagataaagtaactgatctaaaggagtggtggctttccagagcagtggctactgatgttccctattctcctgccccactcctatttcctgaaagtggactgacctactcttgactcacatttctgatgagccataggccaggaagccttgaattctggggttttcagaccattgcttcagctactcactccctccttctcaatacccttcatctctctacaactgattctaacctgcttccacttcatcttgtcccaccgtcctaaacccttggctttgtgactctggaatctctctgcttgcttttgcttccttttcccctctgctctcaatgtgttaggcaccctttctgttgctggcatttggacctcaactctcctagctctgactttactaatctctccagtcttagcccctcttgtcatcttggcaagaaactctttgcactagcctcaccctatgcagtccagccagttccaggggctgatagagggaagggggatgttggatatgttaggggcatttttatggttaacttctgtggtggaaagatcatttggaaatcacactgaagattattgttgggtgagtaagttggaggggcattttactttgtatttcaatacctgtttttatttataagtcacacatacatctcttccccactccactccacaacctcattttccctccaagcatttaggaacaaagaggtttctaaatccagtgtaagtgaaagagcctgaaaacctgtcagcagattaaacaaagagtaaatcttcatgatttgggttaggcaatgacttagatacgacattcaaagcacaagcaacaaaaggaagaaatggacaaattggactcataaaaattaaaaatttttgtaccacaggtggtgtcattaaggaagtggaaagacaatccatagaatgggaaaaatatttgcaaataatatatctgataagggactcgtatacagaaaatataaaaactgtacaactcaataa

SEQ ID NO: 909 - DNA, 1247 bp, Homo sapiens
ctacacaggaaaaatagatggttaacagttccccatggtttccaggctctgaggatggtctaagcatctcccagagtaagaaggtctccatggtgtttaccatttaacacatcagattccagtggtctctgtacatggcacttattttcttcatgaagtggaacttgagtgttggaaatggccccagatcatcctatacaacctcctcattctgtagacaaagagaactgaaggtctgtgaatggcagacacttgggcaaggtcccacggtgacttagtggcagagccaggggcatcctctagcttctcatacaataatctactgtcttggatagttgctcgttctccattctgtacacacctacaaggtgtctgctgtggggcagctactgtagcaggcatgaggactacagagagaaaaataagtactctatgcgctgaaaatgcttagagtcccagccagggacacacccaaagaggagcagctttagttcaaagcatgtggatgccgggtctcttggaaggttttcctcttaggaaccagtgttaatggcatcgctttcaagactttgcgggctcctgattcttgaacaggggtcaagatgtagacagttggcacggttccactgaggttagccatgcgcagcaggaatagggtaggtgggggcacattctgccacggtgaccatggcctctgtaaagtgaattaggggcaattgccaagtggaccaacatctgcttcagcgtcttgagaaagctgaaaataaaaatcgatgcgtataaaattaggctgtcgagtgaacctcagaccacaggtaattgcaatctgagttcacgttgctgcgactatcctgaacagctcagaaaacaggtacttttcaccacatacagtgtctgtgttctcagctcctgctccagggatagtttctggcttgttaaatgacactgctggacatcccccagaatttaattttaatatcacctcctcctcctttgcttaacatatacccatttatgttctgcaatttcagagaaaggaacatataataattatgttttagaaattggaacaagaaactagcagatgcaagtttagtgaatattgagttttaaaattgtctggctgtgatttgtggccatgtcatggcaaatatttttcaatgtcactgccttagccagtgctgtcactaaggcagtcagctggggaatagagggctgaacactatgatctcaatattaatgggagc

SEQ ID NO: 910 - DNA, 1202 bp, Homo sapiens
gggaggggacccccaggatggtctgaccctggcatcacagagacggcttcgtgaatagggagaagctgcgtgggaaggagcagtgggaatgtacggtcacattaggtgggaggcagcctagacccaggggccagaggaggtctggaatctcttgtgctgggttgggccatccctcggtcattggcatcctctgccctggactgaaagcttcagagctgtggtcaagctttatcagaaaagtcaggggctcaaacggcagggtcatctgtccaatgcccggattggcagatgggacagctgaggccttgaaagcctcaggcaaagagagtggcatcccgagagccaaagtggctccttgtccagtgctctgtccctgtgctgcactatctgagaccatggctttatcagaaggtcacaccatcccagcacagaatccaagcagggcagtcaagctgctcgcggaaggcctttcattctggaagcactgcctgcaaatggcccggctcccaggctgtgtggcggggttcattcttttctcttcatttcctctttttccttgctgaaaggcccacattagaaatagcctcacttgggggtatagctcagcggtagagcatttgactgcagaaatagcctcactcagggaagctccacttggaatgcaagcgcctggtaacaggtggaaagtcctgctctgtccttgtcttcacgcattttccagcacacctgctacctgccacctgcctgacccagctcctgtcacagggtgaacctcacggacttgtgcttcacagagcacaggaggctgatccctcactaggatgcaggtgtgatgcagagctcgggccctccaggtgggtgggtgggatggggaggtcacagaggttggggaaatgagggaggggctgacataactagaaggaagtggtagatgggtgctggcagaggggaatgcctgatgagaaggtaggagtgctggatgtgtgaatgcacaagagtgtgatactgaacttggccagaaaaggagattcatgaatagcagaagtgacagggagtttggagacacacgttcagaccagggtttgggagagctctatggcaacctttactgaaccctcgccccatgccaagcattgtgctagacacggtcatagctcagtaataaaacacttaggaagctgacagtgatgatgggaataata

SEQ ID NO: 911 - DNA, 1182 bp, Homo sapiens
tgctcagaggagatccccaggggcaggctcagtggacaggaggggtgcagcagtaacagattgtcccttaatcttcagtccctggagaactcacacaccagagaaagagccaggcaatcagaaaccctccttatagaggtgaattttcatttctgggaggagaagccggtttccctccagatgtgaatcccagccctgccacagccctgggagggcagctttgtaaggcaccctgggccccggcacaccctgctggagtcattcaccgccttcctgtggcacccggatgcaggggcagcacagacccctctgcctctggccagcccccgccactgttccgcagcacaccctaccctgaggggtgctcagaggggccagtgagcctgcctcagagcagggtcccgagaagcctggtgcctggatgagcagcagccacagcccctgggaacttgtcagaaatgcaaacgctctgccagtcccagacctcctgaatcagaaactctgggtacggggccatggtgtgtttctcaggccctccaggtgggtgtttgtggggtccggttggagagccaccagggctcgtcaccactccctccttcgtgccctctggggtcggggagacttgctccagggcttgctttactctgactgtcttctctctccacccactccttttctccattgcatgcatcacaaggtgatcgcggaagtctgtttctttaccagttgagctctgtctccatgagattgcagcctccctgaggccagggccacttctgttagcagcaaatcaccattgcctagcagggtgcctggcacatggtggcacgagctcagcttatttgccaaatgaatgaatggggactagtggggaggctggctggggactcccaactgaaatccctagtaggggacggagaggctcggcctggtacctgtctggggagaagtggggactgggactgtgctcagctcagccttggctctcggtggggattgcttttccctggggccctgcatgggggacaagctccacaagcacaggtgacctggcttcaggtcctggctccaagggtattggccactgaccctgagtagccccccccgccctgccctgcacctccatgtttctattggtgaatcagctggcacggttaacttcaaaggcttcttgcagctctg

SEQ ID NO: 912 - DNA, 1276 bp, Homo sapiens
tccctaccccaagtagattcagtaaatcgggggcagggcttggaagctgttggtaacaaatgccttaggtgagttttactcaatttggggaagcagtgacttcccagacccttttgatgagaggctgggtaaggagaggaatggaggaaataagaaacagatctcacgctccaggagcgcctggcctgagcagcctcgtgcaggaagctctctgaggagctggacaagctctgtgtctgctgctccacagggtcatgcttgaaatgtgactaggacggccgaagaatggaaattttacatctcatttacttttaactaatttaaatttaaaagcagatacttaattcagttattagaaaacttttaagaatgtttggaacagcttgggtccataactccttttccgactctaagtcttatgaaatctagatacagctcaggtacttcagatgaaaatgtagcatccaaattgagatggacctaagtgtaaaatacacactggaatttgaagacttagtatgaaaaaaatgcaaatttttaattaataacttttatactgactacatgttgaagtggttattttgcgtctattcgagttgaactacatgaaaattaacctcacctggaacatttaacctaggtatgggctcacactctgtttttgttgggcagtgctgctctgaggcactttcttgctggaatttgactcagagtgctagggagttggaggagaggagagaagccccagctgtggccccttgtttggctcacgtgggagcagggtttcaggctgatggcacacctggccctatagatggccacaaggccacctgtgatgggtctgttgggctctggctggcctgtccatctccttgggtactttgcccaaagagggaaactgcccgttccctccaggtagtgcctttagaaaacgagaatcttctctaacgctctgggctaggaagagagagctgagcacgtctcaccctgggctgcactgcatctcacacaagtgggacatggcctgctgctggtcagggtgagaactctgcctttaagttagaatcagatcaaatcaaatcaaattgaattctttaccccagtggggtagagagcaccgccaaatactaagctacaggaatgtggcccagaaagcaaattaggttttatttctgcctcctgcctttgccccgctgtttctggaagagaccccatagacagtgccgtgaagggcagcctacggagtctgtggcaggcagggactcgcaggtgagcc

SEQ ID NO: 913 - DNA, 3067 bp, Homo sapiens
ctctcagcctccggcccagggggcaggacccccgctgggaccccggtccctgagcctcttcccccttccttcgacgaccacctcgcctgccaggaggacctgtcctgtgaggagtcagacagctgcgccctggacgaggattgtggcaggagagcggagccggctgcagcctggcgggaccgcggggcccctgggaacagcctctgctccctggacggcgagttggacattgagcagatagagaagaactgagggggtgtgggcccaggcagggctggggtgtgctggcatcgacagcccccactctgggcactaggtgggcccttgaaggggagcccaactcgtgggcctgatgaaagcttcctgagtggtgtcgggtcccagagagggagcccacctgctgcctgggggagagcctggcctggccgcgtcatacagcgggtgtgtcagcctctcaccggctccccgagcgtggcagccaccaggtccacagaactactgcagcccagaggacagctttgaagtttgcgtcttttctgcctctttccctgtgggatgttgggcagtctctgttgtccccggcagagctgggcaccgctctgtatccccctggtggtgggggctgtcagggagggcctggggtgggggccaggggccatctgctatgtcagggcccttcttggcctcactcaggttcacttctggggagtcggccccgcagcttctttcactcagttttactccgtgccttctctcccaggtctccctgcttcaggcttgggaaggttcgggagatgcttccttctgtaacaccagaaccatttggccttaattccaatgtgagagacagaatccctggggtgctggactggccctccagagggtaagccatgtccggagtctcgggcccaaggaacgatttggagggtgcttgttagggcctcccgtgttgggtagaaatttggtggatctgttggctgaaaagacggacttgcttgcctctcctacagcatggagaggctgaccccatggctctgccaccgttggggcagggttagcagatggcagcccttctctgtggctgacaggtcactgagtgataagcatggttggttccggtgagtgtagggatggcacgataccagggcagcctcttgaaaacggcctcgggagacgggagctgcgagcaggtgggcagatgagggccctatgcgcactcaggggtgaagggcgtccgctggccactctgcaggggcccctgcaggattccaggcacctcccgtttgtccttgaggactgctggctgtaaccagggcacatcacccacctcaagacaagcccacgcccttgtcagcttagggggagcccagtcctgagggctgcatctctgttgtaggcccagccaccggcacaaagctggattcatgctccctgcccctaccccaccctggctcctcaccctggggcatccgaggagcctagccccctgagggtttgctctcctctcaaggtttgtagctcctctccggctgccttgcagacaccaccacatgggctctgctctatgggaatctggcttttagcgaatgtggcgtcttctgcaaacaatagcaattgggctggcttaggagcaagtggctcattttcccataaggctaaaaataactggtgcgctcccttgtgttggctgacacgcgcgttcaaagcacttttgtagtcactttgcttttgctcgtcttcatggacgagtgaacgcctcgcttctgcaggttgagtccagatgcttctcaccttctttctcctcaagaaagatgctttttgggaaacgttgtttaaatcttatttttttactacatcaaaaggatggtggttcaagttcccaatatgtgggtggcacttcttaaaaatcagctttaaggagctggcagaaagcccccagccccacagccctgagagatggtgttgctagctcaggtggctgacacatggggtatgccgggcactgggcaggtcccagagccggggaaccagctcacctctggttgctgtagctcctgccggaggcatgtctacttgtgatcccggacagccgaacccaagagctggtggctctgagcagacagagacatcttggcctgtccctgcctgggggtcatggagaccatgtcttcttagagcaaatgtggaggcggccagggcagttgttgggtgaatgtggagagcacatggccatgtcttgcccccggagtaccactgggcgtggggggtcctggcaccacatgcccggtgtggccgagggcacacagcctctatagcaggccttcctgtggaaggcagaggcagtgagggaggtggacggtgccagctgaggctgaggcatgcagcagcccccagctacctttgcttagggctggggtgggaggcacatggtgacaggtatatgtcgtgggactggggtgtgggtgacctgccctcaaaccttgcctgccacctccccattcaggcctggtggcaggaagggacaagctgtggagctggctgagtcacagccacctccccacctccccgcaagctggtcccatcgaccagcaagcccagccccagggcgcttagggagaaatgacccagcctcctcagaccccgcctgcctgtcctgtgcccaccacgcagcagtcaggggagaaaatggtggctatcccttctgcttagagaaagaaatggcctttagctggtttcatgtttgtgttttgactggagggagtagaccctatctataaggtgccaccccatcatccaagctgccacactgcccggagcagcctgttcctgcactccaccctgctggccccaggacttctgatctcagtcctctgggagggaggttcgcctaggaggtgccccccacattggtgtccccatgggcagcaggcagacagctcacccccaccagcatgatggccccagctgggggcagtggcaggagccttacttttgtcacagccttgcccacaaaccctgcctctgaggggagactgaggaagggcagagccagaagcaagccgtgcca

SEQ ID NO: 914 - DNA, 1631 bp, Homo sapiens
gggtgaactaacctggcagtgccccagccatcttttggccttggccatccgagctgttgagacatctttggttgtggtcttctgccagggcatcgagtcccagtcctgagagctgcagagaacctggtggcacttaacagatgtcttgtcccgactctctcatcagccaggggcagggttcagggcaagtcgatttcccacccataagatgagaaacattttggatgaaaaatattgctttggattctcctgggaggcagtgtggtacactggaaagaaaaccatatcaggagtcccaggggtatatctggattctaggccctgctctgcttccaacttccaactcaaagccttgggattcacttctcctctctcagcctcaatttctcatctgtaaaatgaggttggactggatggtttctaagggccttttggctctaagatactgtgtttgaaacgggctgttggtgtggagataataaagggctggagtgaaggtcttctcaaatcctgttttctccttgtcatttatgaaccagaaaatgacagatggcgagacctggacaggaaatgccctcttcagattgaccaaccgagcaccagcatctgggaatgcctgcctgaaaaggacagctcactatggcaccgggaggcagtgaccgcctgcgctgtgaccagtctgatcaaagacctcagcatcagcgaccacaacgggaacccctcagcaccccctagcaagcgccagtgccgctcactgtccttctccgatgagatgtccagttgccggacatcatggaggcccttgggctccaaagtctggactcccgtggaaaagagacgctgctacagcgggggcagcgtccagcgctattccaacggcttcagcaccatgcagaggagttccagcttcagcctcccttcccgggccaacgtgctctcctcaccctgcgaccaggcaggactccaccaccgatttggagggcagccctgccaaggggtgccaggctcagccccgtgtggacaggcaggtgacacctggagccctgacctgcaccccgtgggaggaggccggctggacctgcagcggtccctctcttgctcacatgagcagttttcctttgtggaatactgtcctccctcagccaacagcacacctgcctcaacaccagagctggcgagacgctccagcggcctttcccgcagccgctcccagccgtgtgtccttaacgacaagaaggtcggtgttaaaaggcggcgccctgaagaagtgcaagagcagaggccttctctagaccttgccaagatggcacaggtaagagccccagcagcctggagtcaccttggtgctcactggagcctctgctggttctgggccgtcctagacaagcatagattgccagtttcagaaatacccaggagtgggttaatttccttgtttttttaaatcctattcaaagaaagattatttccagttggtttttaaaaagcgtttatttctatttacaagcaaatattccctttcactgtgagctcagtgctaggggtacaagggcaggtggatggtgagaggcggggtgttggtgggcagactcactggaccaaacactggtaatcccctccggcccttcact

SEQ ID NO: 915 - DNA, 1144 bp, Homo sapiens
ccttggcctcccaaaatgataggattacaagcttgagccaccatgcccggcccatattatgtctttgatattctttcctgtttttaattttccattcttttgtcattctgtgtataacagggatattttcttctgactgttctttgctgattttttttttattttttgctgtgtgtagtctgctatcaagcccacccttgaacttcctaattactgtatttttcaattatgttattttttattttattttttttgagacaagagtcttgttctgttgcccaggctggagtgcagtggcatgatctcggctcactgcaaactccacctcccgggttcaagcaattctcctgcctcagcctcccgagtagctgggattacaggcactcaccaccacaaaattagcctggctaatttttgtgtttttagtagagatggggtttcaccgtgttggccaggctggtcttgaactcctgacctcaggtggtctgcctgcctccgcctcccagagtgctaggattataggcgtgagccaccgtgtctggccctgtttgtttctctgttgtggttttcagttctctgctagaattctcccacttgtcattgtcatttctgtcagttgttttgaaatctttttctgaaaattcatttatttgggtctcctgtcgggtctgtttctaaagtcaatttctccccttgggtttggttgtttccttgaatgtctgctcatttttgggtgccagaaattgaatgtgaaagacattggagatagtttgaggccctgagtgatatctctagaaacctaaaacatctatttgtgatttttataagttgtactagaagaataaacaggcatgggaaaagaaggaaccggtaggccgaggtgggcggatcacgaggtcaggagatcaagaccatcctggctaacacggtgaaaccccatctctactaaaaatacaaaaacaaaattagctgggcgtggtggcgggcgcctgtagtcccagctacttgggaggctgaggtgggagaatggtgtgaacccgggaggcagagctttcagtgagccgagatcgtgccactgcattgcagcctgggcgacagagcgagactctgtctcaaaaaaaaaaaaagaaggaaccggtaagaa

SEQ ID NO: 916 - DNA, 1130 bp, Homo sapiens
tcacttgatgcatgcagtaatacactgaatatagaaaagagggtgattaattttggagtggaggggtagggaagcatcttggaggagtaaatatccaagttgggtggaaatttcagggacagtttggtgacctagtggcgtgtaaagagggagaagatttcaactaatggaaatattatctaaaggcctgaaggctgaagcagtattttatgttctgggcctgtaaataatttgataaattgaaatacaaagtatacgtggggatggacagacatgaggattaagttaaagataggaaccatattatgctttgccatgcttaagaccttcgattttgcatttaggctatggggaattgttaaaatgtttttagtagtggaatatgattagaagaacttgaaataacccttcttgaaacattgagatatagtgtgtgtacattaaagtgcacaaatcagaagtatacagctaagtgaattatcagaaagtgaatacatccacataacaatcacctggtcaagatgtaaaatattatagaactctagaaattccccttgaactctctaccaattattactcctttcttcctttttttttttttcaggctttgtcacccaggtaggagtgcactggtgagatcatggcacattgtagcctcaacctctcaggctcaagcgatcctgtcgcctcatattttgattttttttgtagagacaaggtttcactatgttgcccaggctggccctccttcctttttaaaagtaaccactatctaccaatcatgaacaaaagatgagttttaacatcagattaatttgcctgtttttgaaggtataaatgaaactctttagggtgtgctattcctggtgtctttcaggcttttttttttttttttttttttttgagacagagtcttggctctgacacccaggctggagtgcagtctcacgatcttggctcactgcaaccttcaccacctgggttcaagtggttctcgtgcctcagcctcatgagtagctgggattacaggcgcacgccattatgcctcgctatgtagttcatttttattgccatataagattcctttgtggctgggcgctgtggctcatgcctgtaatcccagcgctttg

SEQ ID NO: 917 - DNA, 1227 bp, Homo sapiens
attagccgggcgtggtggcgggtgcctgtaatcccagctactcaggatgctgaggcaggagaatcgcctgaacccgggaggcggaggttgcagtgagccaagatcttgtctcaaaaagaaagaaaaaaactaaaattatttgcactaataaatgatatgaaatgtttttatgtcagtataaagtcagagaaaacagaatgtctagctataagtatgggtcttctataaagtattccttacccaccaatgggggtgactttcactgaattgctgtgtgaccacttgattgatagtctctttaaaaccaccatgaacctcaagtttgcaaatcaggctctccccattgccaatatcacctcatactataacgaattcatatattgtgctggtccttcctaaagggatccagcaaggatatttacatttgtttacatgggatatttactaaacctatacagccttctgagggataagccaaatacccacttcggaggagatatctggggaagatgaaggagtctttatagctatagacacgcccactctctttggatcagcctccttttgataaatagaggtcatagtcctttcaggtacacttcaggcagatcaccaaactgcatatcctaatactctgaacaaagcaaggaacttttcatttatttatgcggcaaactttttttttttttttgagacggagtcttgctctgtcgcccaggctagagtgcagtggcacgatctcggctcactgcaagctccgcctcccgggttcaggccattctcctgcctcagcctcccgagtagctgggactacaggtgcctgcaaccacgcccggctaatttttttgtatttttagtagagacgggttttcaccgtgttagccaggacggtcttgatctcctgacctcgtgatccgcccacctcagcctcccaaactgctgggattacaggcgtgagccaccgtgcctggctatgcggcaaacatttattgaagaactttcatatgtgaggcgtgtgctgggcagtgaaggaaatacccagaatcatccctgcctcctagagctgcggggaggattagacaggcaggaagaaataccagacagtgcgagaagaattctataagaaagtaacagagaaaatccccgaactgcccaaagttgagaggaaaactgctagtggagaaatcagtaaagatgtgtgtcaggaggtaaacttaatgggcagta

SEQ ID NO: 918 - DNA, 1178 bp, Homo sapiens
cctttgaactgagaatctcatagtttaggagctgtgggctggaaccacatgctggcagctgccaccctcgagacagaaggcccatcgccatagtcatagcattctttgctgctggctggcagcttggagaggcgaggtgggcacctcccaaggaggaatgagttaggtggaccagccagtcctggttttgacgactgagttcaccagggtgaacagatagtcatatgggagcccctttttgtccttggcaggtttgtgcttcttttggccgggcgcggtggctcatgcctgtaatcccagcactttgggaggccgaggcgggcggatcacctgagttcagaagtttgagacctgcttggccaacttggtgaaaccccatctggaaggctgaggcaggagaatcacgtgagcccaggaggcggaggttgcagtgagccgagatcgcgccactgcactccagcctggacaacagcgtgagactccatctcaaaacaacaacaacaacaatttttagtctttggcgatgccctgaggctcatctcttccacagaggcttggaggatcggccacacgagtggggtatgcagaggcacaggcaggtgggggagtgagaaccccagggcgcatctgaccttggcgtgccggcaggaagagaacaagcagtcctcctggaagattccaccagaactgtttattggacaggggactcagacgatgtgtgtccccagccacagtggtggctgagagtgtccctatcctgtgcatgagatcctgaccacccgtccctgcagggaccgtccccgtgttgggaagcaggagggtatgtcgcagagcctcacccagtgggagccacaatccttattccttgctcctcaggcttggatgttgctccggcttctatcccccacatcctgtcctccctcccggagcccagggaccacccatgtgaggctgggccactggggaaatctcgcacacgtagcgcgtctcaccagaaatagaagcagagcctcacgtccttggctgcttcgctgtgggaatgccttctaaggcgccgtttttggtgatgtcccttcacggatctttcaggcccagtgagtcagcagtgtctgcattcacacaggctgggtggggttgttggatctgccccgggtggatggcacctgctccctcagggc

SEQ ID NO: 919 - DNA, 1148 bp, Homo sapiens
ttatatttttggaaattctgtgtaaaccattggaaatggaaggagaaagcctgtgacatacgaagacaagcaacactaatcaggagtataaattctgttttgcagttaattaaatatttgattccctactatgtttcaaagataaataaaatgtgattaagtaaaaggcatttaacctttagagacttggagatgggcagggtatatagtagcctgccagctagagtagggaagatgttaaagaagataacctgtgagatgggttttgaagggtggataggagtttgccaggcaagctctgccacctcaaaaaaatagttccttggctgttagatgcttgtgtcactataggcttgggattactgaaaagctatgcttgtccctcccttcctaacacttctgaggctggaatgtctgtctcccatctacttccttaagaggtgtgggttacagtgtggtgtacagttgggagtgaattactacttgaccttgggtacatgataaccttgactgtagagtccatgcttttcctgagtagttcttcagagtccttcctgccagtgacttggttctaggtgtggagcaggagctggctgtcggaggactcattgaattcagtggaaacagcagggagcatggttttcttttgaatggaaaccatgagtgtagcagttcttctttatgacttgctacataatcatgcaggaaaatgcctgtcacgggattggatcctaggagattagccccattgctaattaaaagccccattaaaagaggggaagttcttttaggtatctacagcttcctaagatttgaatggtttacaaagcagaatgttggctgggcatggtggctcatgcctgtatcccagcactttgggaggccaaggcagacagatcagaaggtcaggagtttgataccagcctgaccaacatggtgaaacctcgtctatactaaaaatacaaaaattatccgggcatggtggcatgcgcctgtaatcccagctactagggaggctggggcaggagaatcccttggacctgggaggcggaggttgcagtgagccgagacggcgccattgcactccagcctgggtgacagagtgagactacgtctcaaaaaaaaaaaaaaaacgaaaaaggtagaat

SEQ ID NO: 920 - DNA, 1186 bp, Homo sapiens
cacatgatgtatttgagatttttaagacattttgggccagattattctcttgttcctttttacttctgagtagtattccactgaatgactcgaccgcagtttctttacccgctcacccattaatggacacttgggctgtttccagcttttcgctattctgagcaagtagctatgaaccattctcatgcatgtctttttgtggacatatgatttcatttctcttgggtaagttcctagaaatggaattgctgggtcatggagtaggtgtatgtttagtcttacaaagtggttataacattttatgcttccactgatcatgtatggaagtcagctattttttaaaccaccctacagaacgttggctttctgcttgggtggtggagtgggatgggagggtgagtgggtagggccccctcctctcccttgacccccacctccctactagcaggatgggggcaggggtctgcaccgttggctctgctgggcgtgggctgtggagttcacatgctctggaagatgtagctgtgtcctctatattagggtggggcctgtttctcttgcttttcctggctattctgaacaattcttgttccttcattccttccccccgcctcccaatgtctctcccttcccctgcttcctcttgtccccaaaataccatgctctctgatgaagctccaggctagtaagtcaagaatgaaggtcgtggcctttggtacctggtgtgttcctggttctttctgacatctgtgcccactgttttgcattcatgactgacagaagtggacttttggagcctactgatggtcacatggtagcacatgctgtcctagtttgcttccgtgtgaggatggacacttggctaagtaggtattctagacagctgctcccagagcagcctcaccatgagctgggccaccccagaacccggcatctgggtgtgctagcctcatgggcctcaggaagctgcagccagctcttccaagtctctggggtcattacttttagaagcatgttttatagggttactagaatgttctcttaagtggattccattttatgtatttatatcctacctctttcaggaaagttctttgaggactcaaaaaataggatgccgtaataggggttgagattgggggagggccaaaattgattttaaaatgcaaatacagcaaccaaaaat

SEQ ID NO: 921 - DNA, 1199 bp, Homo sapiens
tttcaggcttatagactatagatgtgcttcaggtggtacgtggcatcagttggctgctcaattaacatttttttttaatttccttttgtggctgaattggtgtcaggtacatttttttcatgtatttttttaagaggtattgtatatcactagaaacacaatctcagaaagtaaaatcctgataaatgtttctgtttctgtttttcttatctctccacctaaaaagaataaagttttgaactattttcccttggagactttgagttttgtgattacaaaaataaagaataattgtttttattctaaatatttcctactggatgcttctaatgattattaccatgttttatcaaatctaagatgccattgactttaagacacaccattattttagtaccactaagaaaaaaaaacttgccaactgtgatggtgatacacatcctggtttcagagttgttaaaatgtggaaaatgtgtatcctagaagcaatgagctacagtattgttattaagctctacttgcatgattatgagcatgacctcataacctgtgtccttttttctctttggtagctttggcatggcatatgactttattgattcagtgggaaatgatgtggatgttgtctctgactctgaagtaagtgttatttgtcgcttaatgtaattttggaggtgttttgtgataggtgttttatatcatgctgtgttttgcataatataaatgtgcaagtcttgagaaattagtgatgaaataagataaaacttacctgattattgagtatcttttttgttgttaaagtatcattgtttaccacatttgtatttaaagaggaaggaataatcaatccccaaacactggcagtggtaataatatattgatggttatattttaatgatagtaattgaaactgataatagtgtttgggattattctgtatatgttaccagttgagttacaaatgatatttctagtaaaatctattggatccttagtggctttgatctgatatgctaaaagcctgggtcagcataacagtgtgacgtatacacccttaactttaagaaatcctatcatgtaaaaataaatgtttgactgtcactaacataatgtgactcataaagtgtacgtgattctggtttgaaagctccgtcctctgtgtgtttgcatgtagctttttgtttaaagttctatttgta

SEQ ID NO: 922 - DNA, 1207 bp, Homo sapiens
gtcagagataaaggcggtcaaagggtcaggacaattgtttaattcccaacttcataaatagagaaaaattgcatagcatcctaattatttcattgtggtttgcatgttgatcttgaagttatttttcttgttctatttgaggaagaaacactactttacatgaaaacaatgaggggaagccctttttcttaaatgccctcaagctgtggccaatcttacctctggtcagttgctgattttggtcctgtcctgcacatttcattttttagggatactgggtgcccacctttgctccctgttctctggagctgtgctgtgggatgcagggactgctaggcatgttgcgcctggtaaaagtcttactgtattttgaagacttagtaccctaaaatgtcaactatccatttttttctattgatgatgacctgttgaaataatcctctaggtatactgagttaaatgtattactaaaattaattgcacctttctctttacttttttcatgtggctactagaaaatttaaaatttcttgtgtagctcacattttttctgtgggacagtgctggtctagagttgacttgtgggtgggaagtgcggctttggagacaggtttcccacccccgttatgaggggcagtggtatctgacacagaaaacccttcagactatcagaatacatctccaaccccagacctctctatcctcagaatcacttctcaaggtctctgatcatttttttttctcctctcttcattcagacctgctccacaatatccacaccaagtgcccagatccacccacaccgcctatattaagtgagaagccgacaccttttttcaacagtgaagacagaagtttgcactatctttcagctccagttggagttttttgtaccaacttttaggattttttttaatgtttaaaacatcattactataagaactttgagctactgccgtcagtgctgtgctgtgctatggtgctctgtctacttgctcaggtacttgtaaattattaatttatgcagaatgttgattacagtgcagtgcgctgtagtaggcatttttaccatcactgagttttccatggcaggaaggcttgttgtgcttttagtattttagtgaacttgaaatatcctgcttgatgggattctggacaggatgtgtttgctttctgatcaaggccttattggaaagcagtcccccaa

SEQ ID NO: 923 - DNA, 1242 bp, Homo sapiens
tacaacttagtgaggctccctaagcctctgaggccattgtctgggcattcctgactttagctaaccgagtactgcagtgattctggagatcctgatgctgctgctgctgctcctgatcatgatgatgatgatgatgatttgagacaggacctccctctgtcactcaggatggagtactgtgatgcagtcataggtcactgcagcctcaaacccctgggctcaagccatcctcctgccttagtctcccaagtaactaggactacaggcaggtgccagcatgcctggctaattttttgtaggacatggtctcgctatgttgcccaggctggtctcaaactcctggcctgaagccatcctcctgctgtggcctcccaaagtgccaggattccaggcatgagcccctgtaccccactgattctggggatgttgatactcatgttccttctctccctccctcttttcctcccttcttccctagcttcttccttctctcctcgcttcgttctttcctctctccttccctccttttttctctcttttgtcccttccttccttccttccatgaatacttaatgagtgtatgagccccaagtgtatcccagactttcacagtttgactttattattttttctctgaacgtttcctgaatgtggatcctggctgcctaccctcattcctgaggggagagaaggacataacgttctttgagatgtggagcacctagccgcattgtgcagagacaacaaatacttcaatttaaatctgtgttctaaaatggctgagaagatatttcatagattttatgagaggaaaaaacccatgcccttagaatattggacggtagggcagaagtcttctagtaatccctccccttctgtcctccccatcccacccctgctccccatcatcccaccacagcatgtcagttgttacttcatctgtgctatcacaggtctgaaatgtagctgaaatcgttttcctagcttgtataggctacttaaaggaaaaagagccccacgtcccacacagatatctaggatgtttgatccgtgacaagctccaaatgagtctcctgtgtggtgctgtcagaggtggggaagaaaacaaactaggactctcatcttcttacctgcagcatgtttattaccttgagagaaaaacaattgtgctcacagctggaattcatgagtgtgttttcctttttgcagctgggataaacttttgagatcttatttttcttt

SEQ ID NO: 924 - DNA, 2156 bp, Homo sapiens
caaattaaggctattggacatctgcacaggacagtcctatttttgatgtcctttcctttctgaaaataaagttttgtgctttggagaatgactcgtgagcacatctttagggaccaagagtgactttctgtaaggagtgactcgtggcttgccttggtctcttgggaatacttttctaactagggttgctctcacctgagacattctccacccgcggaatctcagggtcccaggctgtgggccatcacgacctcaaactggctcctaatctccagctttcctgtcattgaaagcttcggaagtttactggctctgctcccgcctgttttctttctgactctatctggcagcccgatgccacccagtacaggaagtgacaccagtactctgtaaagcatcatcatccttggagagactgagcactcagcaccttcagccacgatttcaggatcgcttccttgtgagccgctgcctccgaaatctcctttgaagcccagacatctttctccagcttcagacttgtagatataactcgttcatcttcatttactttccactttgccccctgtcctctctgtgttccccaaatcagagaatagcccgccatcccccaggtcacctgtctggattcctccccattcacccaccttgccaggtgcaggtgaggatggtgcaccagacagggtagctgtcccccaaaatgtgccctgtgcgggcagtgccctgtctccacgtttgtttccccagtgtctggcggggagccaggtgacatcataaatacttgctgaatgaatgcagaaatcagcggtactgacttgtactatattggctgccatgatagggttctcacagcgtcatccatgatcgtaagggagaatgacattctgcttgagggagggaatagaaaggggcagggaggggacatctgagggcttcacagggctgcaaagggtacagggattgcaccagggcagaacaggggagggtgttcaaggaagagtggctcttagcagaggcactttggaaggtgtgaggcataaatgcttccttctacgtaggccaacctcaaaactttcagtaggaatgttgctatgatcaagttgttctaacactttagacttagtagtaattatgaacctcacatagaaaaatttcatccagccatatgcctgtggagtggaatattctgtttagtagaaaaatcctttagagttcagctctaaccagaaatcttgctgaagtatgtcagcaccttttctcaccctggtaagtacagtatttcaagagcacgctaagggtggttttcattttacagggctgttgatgatgggttaaaaatgttcatttaagggctacccccgtgtttaatagatgaacaccacttctacacaaccctccttggtactgggggagggagagatctgacaaatactgcccattcccctaggctgactggatttgagaacaaatacccacccatttccaccatggtatggtaacttctctgagcttcagtttccaagtgaatttccatgtaataggacattcccattaaatacaagctgtttttactttttcgcctcccagggcctgtgggatctggtcccccagcctctcttgggctttcttacactaactctgtacctaccatctcctgcctcccttaggcaggcacctccaaccaccacacactccctgctgttttccctgcctggaactttccctcctgccccaccaagatcatttcatccagtcctgagctcagcttaagggaggcttcttgcctgtgggttccctcacccccatgcctgtcctccaggctggggcaggttcttagtttgcctggaattgttctgtacctctttgtagcacgtagtgttgtggaaactaagccactaattgagtttctggctcccctcctggggttgtaagttttgttcattcatgagggccgactgcatttcctggttactctatcccagtgaccagccacaggagatgtccaataaagtatgtgatgaaatggtcttaaaacccatggtatttttattatagggagagtggggaaagaaactaagtgtgggtggggcagacaggccagtgtaagagagactggttcattacgttccattttcatttctacaaggacttggctg

SEQ ID NO: 925 - DNA, 1289 bp, Homo sapiens
gtgcagaaactggacctggcaggaactttacctggcagcaaaagacagctacagactcctaaggaaaaggcccaggctctagaagacctggctggctttaaagagctcttccagactcctggtcacaccgaggaattagtggctgctggtaaaaccactaaaataccctgcgactctccacagtcagacccagtggacaccccaacaagcacaaagcaacgacccaagagaagtatcaggaaagcagatgtagagggagaactcttagcgtgcaggaatctaatgccatcagcaggcaaagccatgcacacgcctaaaccatcagtaggtgaagagaaagacatcatcatatttgtgggaactccagtgcagaaactggacctgacagagaacttaaccggcagcaagagacggccacaaactcctaaggaagaggcccaggctctggaagacctgactggctttaaagagctcttccagacccctggtcatactgaagaagcagtggctgctggcaaaactactaaaatgccctgcgaatcttctccaccagaatcagcagacaccccaacaagcacaagaaggcagcccaagacacctttggagaaaagggacgtacagaaggagctctcagccctgaagaagctcacacagacatcaggggaaaccacacacacagataaagtaccaggaggtgaggataaaagcatcaacgcgtttagggaaactgcaaaacagaaactggacccagcagcaagtgtaactggtagcaagaggcacccaaaaactaaggaaaaggcccaacccctagaagacctggctggcttgaaagagctcttccagacaccagtatgcactgacaagcccacgactcacgagaaaactaccaaaatagcctgcagatcacaaccagacccagtggacacaccaacaagctccaagccacagtccaagagaagtctcaggaaagtggacgtagaagaagaattcttcgcactcaggaaacgaacaccatcagcaggcaaagccatgcacacacccaaaccagcagtaagtggtgagaaaaacatctacgcatttatgggaactccagtgcagaaactggacctgacagagaacttaactggcagcaagagacggctacaaactcctaaggaaaaggcccaggctctagaagacctggctggctttaaagagctcttccagacacgaggtcacactgaggaatcaatgactaacgataaaactgccaaagtagcctgcaaatcttcacaaccagacccagacaa

SEQ ID NO: 926 - DNA, 1393 bp, Homo sapiens
gttagatagcatgtgctatttcatactggttattggagctgatatgatttatatatttgtatcataatactagtatcataagacttgcaagttttaggcattaaataatttgtaggccaagtaaaagctagcttataagacaacctgaaacaattaaaatattgaattccacaaatgttaatcattgagaaaatgctgaacttctgtttcttatttcataattcattgccaagatgagaaagctcaagattccaaggcctattcaaaaatcactgaaggaaaagtttcaggaaatcctcaggtacatatcaagaatgtcaaagaagacagtaccgcagatgactcaaaagacagtgttgctcagggaacaactaatgttcattcctcagaacatgctggacgtaatggcagaaatgcagctgatcccatttctggggattttaaagaaatttccagcgttaaattagtgagccgttatggagaattgaagtctgttcccactacacaatgtcttgacaatagcaaaaaaaatgaatctcccttttggaagctttatgagtcagtgaagaaagagttggatgtaaaatcacaaaaagaaaatgtcctacagtattgtagaaaatctggattacaaactgattacgcaacagagaaagaaagtgctgatggtttacagggggagacccaactgttggtctcgcgtaagtcaagaccaaaatctggtgggagcggccacgctgtggcagagcctgcttcacctgaacaagagcttgaccagaacaaggggaagggaagagacgtggagtctgttcagactcccagcaaggctgtgggcgccagctttcctctctatgagccggctaaaatgaagacccctgtacaatattcacagcaacaaaattctccacaaaaacataagaacaaagacctgtatactactggtagaagagaatctgtgaatctgggtaaaagtgaaggcttcaaggctggtgataaaactcttactcccaggaagctttcaactagaaatcgaacaccagctaaagttgaagatgcagctgactctgccactaagccagaaaatctctcttccaaaaccagaggaagtattcctacagatgtggaagttctgcctacggaaactgaaattcacaatgagccatttttaactctgtggctcactcaagttgagaggaagatccaaaaggattccctcagcaagcctgagaaattgggcactacagctggacagatgtgctctgggttacctggtcttagttcagttgatatcaacaactttggtgattccattagtaagtttatttaattgtaaatttatttttctaaaagatgaacaccttctatgtagctgtgagaccttcattctttcagt

SEQ ID NO: 927 - DNA, 1469 bp, Homo sapiens
actccgtcttggccatgtctagtaattgctatgtgttgggagaaactttgtgaatgcaccattttgatgatcatgaaacgctgatgaaaaatgcctccaaacatttttctgtactcatacttagattcacaatggttgtgtatctctataatgtgaaatatttttttgtggtgataaaaagagggccaaggaggtatgagccatcagactggaaaaaaggatgactatatgatgaggagaaactggggtggcagggagggagggagggtttatcactgcttaacttcatcttcatgaaatgaaactttgtaacttattgtagttagaaattgtaactttgatattgaattctcttgccttcaacaagcacactgacagagaaaaaatgctactgtctgttggttccaatattctcccactgctagagcttcctgttaagcaagtgtgatctgcaacattttttcaacttttgctagcactgtatactattgcattcttaggctactgtgaggtctatgtttcttgtaccagaaattgtccttttgacttctagatccttcttccctaatgtgttttgtatgtggttataaaattgtagacttttgtgattttgccaaagttgtagctaaatatttatacacttgtcttgaatttttttcagatccacttaaaatatttagaaaaacaagttttattccttatgtgtcttataaggaataaaatggtcttcatttgacacttactttcccatgaacacttgcagttgctaagggactttattttgtaacatatcaattataaatattgtatttatctttgaaattttgtacattgcttttcccaccttttcctttttcttctttcttgtctgtattggtttttgatcacggcctggtgttgtgatactgggaagagcattagccaagaacttgtctctttgatctgtttcgttaagctgaaccagtgtctttacatttcatttgtacttcaaaaaatatgctattgtttagactttccatcctttttttttttattttgaggaaaagtcaaattcattgtttatttttatattatttttaagttatctgaacaaatacttttgaaaaaaaagtttgttgtatagtcaaaacaaatcggtgccacccggccgtgacaaatcctagtagattctgtgcatgtggagcggccgcgaagaggtgacaccgtttggggctgtgtccttattttattttatttttttgtagaatgtaaaaagtcattttagatgccacccattgactttgccacatagctgaactgtgtttactggaaaaattcagaggcctaaagtttaaaataaaatttacttctgatgttttaattaaaatgtttgccacattaacttttctgatgccttaaaagtgaacttctttaaagaacctttgtgctattttatcacaggcttacactacaattgttaataaatactt

SEQ ID NO: 928 - DNA, 1219 bp, Homo sapiens
cagcacttaatccagaaagttcccggatgggtggctctgacaatgggcatttacctctgaaattggtgccgacgcttgatgttgcatgcatctagtttgcatacaaataaagaattagacttgtcatgaagcaggtataatcaatgaaaggcccagctgtcttaatcaggtttcgttagcctgagcagctctctgtgagcaagataaagtgtttttcagaggtattaataattactcataatctctcctatcatatcgcaagactttttacatgcctttcaattttaagcaacgattaaagcaattaagattgctgcatttacaagctatttttcattcccagaaaatatcctacacctacttgtccatatggtactttgcaattggaacataaggatagtttaggaaaattacgtatgctcttatcctaatctgcctattactggatagtgtcttaactaatgaacccgactttctgagctgctcttaagtggtggtcttgtcatatcagagagacacaaaacgggtaacccaatcagtcaaggatgctttgaacaagtttgttttgttacaatatgccgagcttatgcatactgcctcatgctgtgaatacattagcaccgaatggtgtttgaaaagcatttcgatggaaatttcttagccacaaccataagtgtaattggctgcctttcaataggacataacagacttcaagttaaatggaaactattaaagctcaaatgatttctgccgttgtttcatgacaaatgtacagttttattattatgagtattcattcttgtacagtggtcgacagcgatttgaatatacatgattattcacatgcccgatgatctagaatggtatatatcatcacagttaaaagaggtaaccaaggtgacgttgcttcaggtgctaatgtcattataaaactgtaaagcaattattctgttagttcttgcctggggttatgaatacattgaagagtgcagagccattagatgtagctacttcaaaaagcggggaaaagaagatgaattttaatgcatgggtaattgctcaacatgaccgcattcctaataaatttttgtatattagaaaaaaagaacagaatatatttgtgtatgatgcatgaaacagaaaaaaaactcagatgaaatgcatgcaattaattttatggtaaaatcattttatgactatgcaccttataataaatata

SEQ ID NO: 929 - DNA, 1245 bp, Homo sapiens
ctggagtgcagtggtgtggtctcggctcactgcagtctccctctcctgggttcaagtgattctcctgcctcagccttccaagtagctgggattacaggcatgcactaccacacccggctaatttttgtatttttagtagagatggggtttcaccatgttggtcaggctggtctcgaactcctgacctcaggtgatccaaccgccttggcctcccaagtgctgggattataggcatgagccaccgcactcggcctgcattgtgattttagattgccatgtagtacgagggataaaggaaaagaattacaatgatatttttaagaagagatttaaaaatatattcaaattcacagaaatgcatccccctattaaggccaatactaggagtcaaagtctgcatcttctgcatcaaaacacattaaattaatgaacaagagattccttctctggacagtgttcctcacaggtaggccagtgacatggtgggctggagagagaggtccacccaggctcctgaattggagagcactgtttttacagaggaagggaagaacttggcaaggaggggaaatttttcagtcagtctaggaccttcggcaacaaactggaaactcaacctctcagttttctaaccatgagatgagattaatcatatctgtcttacaaatgaactggcaataccctatcaaaacaactattaatacatcaagtggagattagaaagtatatagaactaaatggcaatgaagacatcacgtttaaaaaatgcagtcccgctggacgtggtggctcatgcctgtaatcccagcactttgggaggccgaggcgggcagatcacttgaggtcaggagttagagaccagtctggccaacatggcaaaaccccatctctactaaaaatacaaaaattagccaggcatggtggcatgtgtctataatcccagctacttgggaggctgaggcaggagaatcacttgaactcaggaggcggaggttgcagtgagctgagatggtgccgctgcactccagcctgtgcaacagagtgagactctgtctcaaaaataaataaacaaataaatttaaaaaatcccagcaattcagtcaagcccatgattagaaggaactttctagccttgttttgttcaccacaataaaaacaacaagtgattcatccaatttatgaataaaagggctttcacaaaattcagcccttatccatcatttgaagagctcatttaaaaaaact

SEQ ID NO: 930 - DNA, 1198 bp, Homo sapiens
cttgtgtgggccaggcagtggcctctgatgctgtggcagggtggctgtggcatcccgtcctccagtgcaacccgtgcctcaggacgccctgcacactgacagtcaaggtgtgcacagcacagcacccagcgggtttcactgacaggggatgggagccgcagcccccaaccctcagagttcacagcaacagaagcaagatgacagccagataatccacaatgccaggggcttttgagagtaatgagtcctttctgtctttggatgggtgacactggtggctcacttcacaggacagagaagtaagtgcctacgtctttcatttgggaaggtttagcgcccatcggtgtaggaggcaaagcaggcttgtgagacgtgttccatggccactaagaaaggtggatgttggcttggggtcggttgcacagaacgatgacaagctgggcctctctcccacaggccacctgagagcatgggaaaggccccacagcagagagggcttcagaacgagaaaccccagcatccaaggagaatgtgatacaggactctgtggccacgggattccagatgatggcaggggctgagggaggagggtgcatccccggggctggaaggttaagggccctctgaagcagaagcccctgggtctatggagtgatccagagccatgctgctctcttctgctcctgttccccagaaacctgggtacctcaagacctcatgtatttcccacagagaaatacatgtctcctgcacccccacccctgagagcaaggctgatgcaattccagggcccagagctggactgggaaactgagggtgctaaaggtacaaggtttgggcccctgagcacgtggaccccaaaaatacattagcttcaggacgagctacatactttgcagatcccagtacaaaaaggaaatgaaacctccttgttcaaaattattacaaatttcaagatggtaacacatagcattaaatcaagtgccaggacccttctgcatttgggacctgtgcagcacatgcccataaacctggcactgcctggatctgccacagccccgccggtgatgctggagcagaatcagtatcagaatacttagaagagactagaataatcaataagcacctagcccaaatcagttcatgacacctcctctatcaccatgtccaaggtgaggcagcatccgggccggtgggg

SEQ ID NO: 931 - DNA, 1177 bp, Homo sapiens
gaaagatacaaaggaaaaggggaggaaaaaaaatctgttctgaagaaagcattggaccctgggaccccagccccagagtgcgtggcccagctagtaccggggctggcgtggcccctggtggggctgggaattgtaggtggcaattggaaaacccagggtgggctaaccaggcacagccacagcaggcccttcggtggatcttcggggtctgctggcagcgggggcggaggcaccggtggggtggcagcgaggactggctgccctggacacgctggggatggccacggaggaggggctggggcatgtcctgcagagggtgtggggtgggagccaagcaggaggggagtcctctgtcattgggtcctggtgccccttccccagagccacagcagccagaggcgcaggaaggaaggggcctaagccgtgactgtcacccgcccagaagctgcacctgctcgggcaccacaaggaaacaaaaggtgaaaggggtggtgagtcagtggcaggagaggacactgggcagagctgtgcccaggccttggcctctgtctgtggcgatgtccgcctccctgtctctgggctgcctctccttccctgcaccccctgccgtggtctccccactggccctgacactcctttccagagccgcagaggctttcggcgtcccagagggcgcgggcctgcgagtcctgcctctgtggccaccatgccccggggtcgcctgggacatctgcttcctgcctgctgatcggtgccattcctcacagcggcccctttctgtctccaagtggcctggtttggatgatcaattgtgtggttgcccggtctaaccaccagatgctgtgccaggacgatctctttcttcctttatagctttttattatataatgaaagtgacgagaaaaaaattaagaaatccagcatcttgtgtcatgtcagcactgataaacaaccatttgtagtttttcacatgacctcccagttcgtactggaaaacatgcaaaatctatgtggccttttaaatttcaggatagtttagatttatagaaaagttgtgaagctgatacagagagttcccttgttccccagaagcagtttccccttacgtcaccgtctggcattaaccgggtacatttgtcgtaactagaggacccgtatccatacctcgttgtgaact

SEQ ID NO: 932 - DNA, 1175 bp, Homo sapiens
cggcaggacgcaccgcggaccccggagagagcggacgagcagggcgccggcgccatggacctggtcatcacgcaggagctggcccgcgccgagagccagcaaggtgaccccaggcccgccacgacccccgccccggggaggccccgggacccgccacgacccccgccccggggaggccccggaccctctcatcccagcccgcccaatgggtgatccctcgagggccacagccggagcccccacctcccgatcgtctgaccagagcaaacgtacaggaaggcgcccacaccgctgctccctggcggcgacaggttctgacggtggctgtggcccgggggcccaaggcggctgcctggggccttcgggatggcgttgcccggctcacttctcccagcccagtgaccaaaccttcctcaaccacccgtttgggacagatgctgcgtccttgaagaaggcctacgagttgatcaaatcggccaacctagggaaatcggagtttgacccctcagagagcttcagcccagacctgtttgttctgtgtgcagagcaggccctgaaggtaactagttcccgggatcctcggtcagggcagctttgacagggagagggagggcctctgggtgtgcagcggatgcagagtggggctggggagaggcagctcctggccgggcagtcaaggggccaggatggaggatggggctggaaacaggctccacctgtgctgggggcctgttctgaaagcgggcccgtggtgcttctgggcagggaggccacccctccgggtctgtgatcttctgtggtggtgttctcttgcagatgaggcagccagaggtgagcgaggactgcatccaaatgtacttcaaggtgaaggcgcccatcacccagtttctgggccgagcgcacctgtgcagggcccagatgtgtgccccgaagtcggcagaaaacctggtgagaggcgtcctgtgccccttatccccaacagttcaattttcaccccatctccagagcaatgccaggctagaccaggcttaaaatcgttcttagggtagtagagtgaaggaattcctttccagagtgacacgaaacttgcaccatttcctgtccatgctttttgctcaagtggtgatatctgacacacaggacccctggacctttgcctcgtagcagcgtggtct

SEQ ID NO: 933 - DNA, 1166 bp, Homo sapiens
ctgtcttctgccttaagaaatgaaaccccttcggggtgtgcccatcatttttttagtggtgtttggaagttttcccctaaaagcccaaggcccatttaagaggtagaagtgcgtaaacaggaatgcacaaagccagaactgagcacgtgcgcatgcagggcccgtctgtcagccacgtctttctgagaaggggcttggcctgttccccgcaggcctccaacattgacgacgtccttggccaccacacaggcttcctggacacctgcctgaaggactgcatgctcaccaaccccgagctgctgaaggtcttctccaagctcatgtctgtgtgcgtcatgttcaccaactgcatgcaggtgcgtgggtgtgggtagcaccatcgggtgggcaggcgcgggtgggcagaccatgtcccgaccgtggccgcacgcagcctgctcacgttttcctgcccttgtgttcgtggaggagccgctgggatctgagtgtttccagaactcctggtcttcctggccgggtgattccctcctggagcccctgccctggcagcgtgggcagggctgtgttcctcccgaaccatccctcagcctctgtggtgctggtctctgtccggggcctttgcttatggcccttgcatgctcttttcctcagcacttgagctatttgattccgttaaggacctgcaggcactagtcacaagcagctgccgactggcgatggtgcagaacctgcgtgtctagtggcagaagcaggggtctgagaatgaggctctccaggcagtgccatggggagggtccggaggagggcgagtggggaggtggaggagggcatggccacttcagggtcccaaatagggaaacaccaaaataactgttctcaggaaaatcagctggtcaccgtggaaggtagacctgggaattctgtcggcacagataagtcatttcccctgcagcctcagagatgcttgtgtacccccagccgcaggctacaacagaggtgcggagggtgacgtgcctgcaggacttgttttttctgcaaagcattgtggttgtaactaacagaagcatttccttgcgactctccccccctagaaatttacacagagcatgaaattagatggcgagctgggcgggcagacgctggagcacagcaccgtcctggggctg

SEQ ID NO: 934 - DNA, 1293 bp, Homo sapiens
gagcagcagagcattccctgctggcccagacccatgtgtggagggaggtgcaggggaaagggaacctgggtctcaggccccattcatgctgcccacggggctggctcccggagctgcggaggccgcctggaagctggaggcaggtgaatcccaggcccacccagaggaccctctgagaggctgctggggtgtcggggaggggccctaatcccaggcccatgcagaggaccctctgagaggctgctggagttcagggaggggccctaatcccagtcccgtccagaggaccctctgagaggctgctggggtgttgggcaggggccctaatcccaggcccatgcagaggaccctctgagaggctgctgggctgttgggggaggggccctaggccaggcaggccaggtgataacttggtttgtcaaagcctgacattggccagtcttgagtgtttaaaaaaatgttttttatttctacagtttgaattttatgaatagctgtcttcttacctataggagaacatattgtgatgttcgtgcctcagagctaaaactatgagtgaatttcggattcaccatgacgtcaatgaactgcttagcctgctgcgtgtccacggaggagatggggctgaggtctacattgacctgcttcaaaagaacaggaccccgtacgtcactaccactgtctctgctcacagtgccaaggtgagcactgcccttggtgtagcgctgtgcagggtgagcactgttcctgggtcagggtggtgcagggtgagcccacccctgggtcagggtgcagggtgagcgccgttcctgggtcagggtggtacagggtgagcaccattcctgggtgagggtgcagggtgagcccacccctgggtcagggtgcaggatgaacactgttcctggatcaggatggtgcagggtgaacccacccctcagtccatgtgcaggatgagcgtcgtccctgggtcagggtgcatgatgagcaccgcccctgggtcagggtgcagggtgagcgccacctctggtgcagggggcagggtgagcgccacctctggtgcagggtgcagggtgagcgccacctctggtgcagggtgcagggtgagcgccacctctggtgcagggctgtgcggggtgcagggtgagcgccaccccggggtcaggatggtgcagggtgagcactgcccctggtgcagggctgtgtaccgtgcaagatgcagggtgagtgcccgttcctgggtggcctcaatggtaccggcaacgatggcagacagcacttggtctgtgtgtgtgt

SEQ ID NO: 935 - DNA, 1198 bp, Homo sapiens
ggcacgtcggccacctgcatgatcacgtcctggaggtagaggtggcgctgcacgtccccatcctgcaggaaaagtgcgccgtgggcggggccaggtgactcgcggcacgcccaccgcgtcaggcctcgcccacacccgtggccccagtcatcccgcgctccggtcccgccccacagcctcaggccccgcccactccacgttccggccccgccccaccacctcaggtcccgcctgtcccaggctccggccccgccccgcagtcgtaggcccctcccactccaggctccggccccgcctcgccgccgtaggccccactggatcctacaactactttttccctcttttgctcacgcacctcgaagaactggtgctcccgcgggaagcgcacggggcgcgcaacgaagcgaaagggcgcggccccagccgcgggatcccgctctacaggcagcggctccgccgccccgggccccgcagcgaggcgggcgcacagcgcggggggcaactgcatcaccccgggcgcgggcgggcgcagcctgtcggccaccgtccgcgagccgagccggacgtgacgtcacgctcacttccgccgccgtcgggggctgcgcgggggctgtggctccgggactgcggtgagtcctggccgaacgcgggcgcgggcgtgatgagggggttgggggactgccaggcccgggggggcccacgaggcgacggggctggcgggacgcggctcttcccgcgcgctccctctggctgtgcagcggtccccgaactctggggccgaagcccttcgggcctgcaccggccaggccagcgtcttgccccgcggcccgacactcagccggggcggggcggagcgggcctccgggtcgtcccgggtgtcccctcccagccctgggaagccgggtcgcaggtccccctctcgcacgccctctcccgtccgccttgccccgcctgtcgtctcccgctgcagtccctggatcttgttccctctaaaccagtcgcgaactggagccaaagtgactccagttttattgtaaccgtttttaatttaaagcccttgggtgacttcccgttactttagttcaaaggccctttcctggtttgtcggggtcctgtcgacctctccagtccccgcagctcccgtgaaacacaggacctgtgctaggtgctcagggcgtgtgggggaaggcatcacagg

SEQ ID NO: 936 - DNA, 1243 bp, Homo sapiens
tttcttattaatttctttattaacccattgatcattcaggagcgtgttgtttaatttccatgtgtttgtgtagtttttgaggttcctcttgttactgctttcttgttttatttcatcgagtcagaaaagatactcaataagattttgatttgttgaaacttgttctgtggcctaacatatggtatattctgtagaatgttccatgtgccgatgagaagaatgtgtgttttgcagcagttgggtgaaatgttctgtaaatgtcagttagacctgtttgatctagcatgtagtttcactccagtgtttctgttgatttctggctggaaacaccctacggagagggggtgttgaagccccctactattactgtattgcactctgcctctcactttcaatctatcaatgtttgctttatatatctgggtgctctggtgttgggtgcatagatatttataattgttatatctgcttgctgaattgacccctttatcaatcgtatagtgactttctctgtgtctttttacagtctgacctgtagtctattttgtgtaagtattgctgctcctgctctttatacagtctttgacttttagtctgttctgtcatctgtaagtatagctattcctgctctttttttttttttttggtttctgtttacatggaatatgtttttccaccctttgactttcagtctgcgtatgtctttataggtaaagtcggtttcttataggtagcatatagtttgatcttgttttttatccatttagccactctgtgttttttgcttgtttttgagacagggtctcactctgttgcccaggctggtgtgcagtggtgtgatcatagctcactgtagccttgaactcctgggctcaagcagtcttcccaccgcagcctcctgatagttaggactacaggcgtgtgccaccacacctggctgttttatttatttatttatttattttttgtagaggcgaggtcttgctatgttgctgaggctggtcttgaactcttggcctcagatgatctttccacattggcctcccaaagcgctgggattacaaatgtgagccactgtgcctggcctactctatgtcttttagttggagaatatagtacatttgctttcaatattattatggataaagacttaatattgccattttgttgcttgttttctgattgtaactcctctcttccttttttactgtcttccttcgcatgtggttaagagattttctct

SEQ ID NO: 937 - DNA, 1192 bp, Homo sapiens
ttccctccacctggaggcctcctgtgcagctgtagcgggaacgagcagccgagggcccagagggatccgcctcattgtggggagaggcagcggtcgggtggtccactcctgccccagagaggccatagcttggcaacccacctgccttcgcttctgcctccccaggctcctttcttcacaccctggagggcccccgcttccgggcctcccagtgcatctatgcgcatcgcacgctgccccacgtgctggctttccgagtgtccatcgcccgcctggccccggggagcgggcccatcacgctgctcctgcggtcagccttctccccagaaagcccagacctggacctgcatcagggtcctgacttccagggagcccggtaaggagggggctggatttgcagccagggagtccagggagggagctcatccctgaggcatggccacgctctcacaggtacctgtatggccacaccctcacccctgagcagcccggggggccacagcaagaggtacacatgctgtggacaccagcacccccagacctgacccttggggaaggtgaggaggctaggacgtgggacttcctgacagcagtgggcggcagccaggctgaggctcaggcctgcctcactgaggccctgcagctgcaggccaggggagctctgtatacggctcacgcacaggcctgggcccagctctgggtagaatgtggcttggacgtggtggggcccctgcagctgcgccaggccctgcgtggctccctctactacctgctcagtgccctgccccagcccaaggccccaggatacatctgccatggcctcagtcctgggggcctctccaatgggagccgtgaggaatgctactggggccacgtcttctgggaccaggtgagcactgtacacccagcaccagccacacagcaggcgacacatggaggtccacggtctctgccctccctgggaccagggctatggttggggaagcacagggactgtggcaaaagggaagaggcctggaaggtgtgcaggagtttggtagaggagtgatctaggtgaggggaatggaaggtgcagagaccagagctgagagggcctgaggcactttccagagcgtggggaggggcctccaccaaggcgagaagggctgcaggtccagatcaccagcgtttgtagacagtagtgtggcgcttg

SEQ ID NO: 938 - DNA, 1218 bp, Homo sapiens
catctccgcccagggctctcctcggccctccacatccaggtctgacaccctggctgctcagcccagcacctgatgccccttagcctgagctcagggtcccctctgccagccccttcctcccatgctgggggttagaggagagacttggggctggccaggggttgggttgggagaagcagcacctggtttgttggaagtgagagcatcagtccttcaaaaaagacagttgcagccgggcctggtggcgcatgcctgtggtcccggctactccggaagctgaggcaagaggattgcttgaacccgggcgtcgtggcatgcacctgcagtctcagctactcaggaggctgaggcaggaggactgctcgaacccgggcgtggtggcgcgtgcctgcgctcccagctactcgggaggctgaggcaggaggactgctggaacccgggcgtggtggcatgagcctgcggtcccagctactccggaggctgaggcaggagggttgctcgagcctgggagttctgggctgtagtgtgttaggctgactggctgtccgcacatcagtatggtgacctcccaggagcaggggaccaccaagttgcctaaggaggggtgaaccggtccaggtcggaaacggagcaggtcaaaactcctgtggtgatcaaaaaggacagttgcagacatggggaggacttgctagtcccagctccaggctggatctgggcgtgcctttcctctgctctaaccccttccatggctccccactgccccctgctgaagtccaagctctccatttggccaagaagcctagcagcctcccctgattggcctctgccaacctccagcctccccttctggcagctcccttcttgccctttatgcttctgcaaagctgaagtaccaaggactgagtccctggactcagtttccgtaggtgccgagtgctgagtcaccaggagtagtagctaccaagtcctccttggaggtgctgagtgctgagtccctgggaggtgctgactgctgagtcccagacaccaactgcaccctgattctcagggcgtgcccacacatgttctttctcccgggaatgctgcccccattttctcaccttttgccaacctcttgccctacaatgccaagctccatgcctcctcacctgccaagtaggcccccgcccctgcgtccacgaacgccacgcactgcctgggagggctgcacgcaggtcg

SEQ ID NO: 939 - DNA, 1184 bp, Homo sapiens
acctggtttattccggttttcttttttttttttctttgagacagagtctcactctgtcacccaggctggagtgcggtggcacaatcttggctcactgcaacttcgcctcccaggttcaagcgattcttctgcctcagcctcccgagtagctgggattataggtggccaccagcacacccagctagtttagggatttttagtagagacggggtttctccgtgttggccaggctggtctcgaactcctgtcctcaggtgatccacccacctcgacctcccaaagtgctgggattacaggtgtgagccaccgccctggcctatttacttagtaaagtctctgcccagccaggccaagccctcactgatgtttcatcatcctgctcaggcgtgcccggtgctgcaccgttggtgctgccagtgagcagtggaggctggaaaaggtgtctgggctgctgcaggacgcgctccagatgctgcacctcaccccacctgcccctcaccccgcctgtccctcaccccgcctggcccttcctgtgaccctcagcccgcctggcccttcctgtgaccctcaccccgcctggcccttcctgtgaccctcagcccgcctggcccttcctctgaccctcagcccgcctggcccttcctctgagactctacaatggcttttcatccaacccagcagggtctgccattgccgcaaggtggaggcatctcagaggccctgcttggccttgccctgtccaggcaggcgggccgtgggttgacctccatgagacagcagggctgggcctgctcctttgggttttaaccaacataaaggtggcaggcaattgaggacctgcacctcttaagaataatcccccaaagctgagaacaccagcatctctgcagagagcacagctgcaggaagtagctgaacccctgcctggtgggggaggcaccgtgggagccctctggcacagtgacccccgccagcagtgatgccacctggcttcctgcgccaggccctgcaggaatggagtgggggtattccctggaattgtgggggccacttactcttccccaactttccgtaaaacagaagccaagcaccacgcgtctgttgggatcccaggtttccacagctcctcctttccaagcctgggaggctgatggtcagaggtcgccctgccccagggctgtcag

SEQ ID NO: 940 - DNA, 1269 bp, Homo sapiens
atgaacggtgattctcaacccaggtcgtattcgatgttaggggtttgttacggattctactagacaagcacataatgaacagtgattctcaacccaggtcgtattcgatgttaggggtttgttacggattctaccagacaagcacataacaaacagtgattctcatcccaggccgtattctatgttaggggtttgtgtagtttccccaggacctgtagtggtgattgtccagaagccttccataggaggaatgcatggtcattaggtatgccacagctccaaacaccagcaacaccactcaatgactattgaggtaatgacagtgacactgcagctccacatggctggggaggtctcaccatcatggcagatggcaaagcgggaggaaaggcatgtcttaatggtgacaggcgagcagaagagctttttagattcttaattttttaaatgactgatcaatatgtgattagtgttttttgtgtttctttttttttttttttttttttttaagaggtaaggtctcactctgttgcctaggctcatggctcattgtaggctcaaactcctggaaatacgggtgcatgccaccacgcttgcctaatttatttttttattttttattttttgtagagactgggtcttgccgtgttgcccaaggtggtctcaaactcctgggctcaagagatcctcctgcctcagcctcccaaagtgctgagattacaggcgtgagccactggacccagcattaattttctttcaaggaagaaaagtgtttctactcctgaagacaaagataattttaaaatactttttcactgggcacagtggatcacacttgtaatctcagtgctttgagaggctgaggtgggaggatcttttgagcccaggagtttgagaccagcttggacaacatggtgaaaccccgtctctacaaaaaaatataaaaattagctgggtgtggtggtgggcacctgtagtctcagctacttaggaggctgaggcaggagactcacttgaacccaggaggcagaggttgcagtgagctgagatcgggccactgcactccagtctggcgacagagcaagactctgtctcaaaaaacaaaaagtccaggcgcggtggctcacgcctgtaatcccagcactttgggaggccgaggcgggcggatcacgaggtcaggagatcgagaccatcctggctaacatggtgaaaccccatctctactaaaaatacaaaaaattagccgggcgtggtggcgggcgcctgtag

SEQ ID NO: 941 - DNA, 1418 bp, Homo sapiens
tgcttcagtggtgagcctcgagggtgccccctgcacttacagaagatggggtggggggcttccctgctgcagcctgggggagaagcctcctgggccctgggttctatagacccccatggcactgactcagacccagacaggctgacctactgctgaccctgggagcccgcctggagttcgaggctctcagtgggtgaggtggacattgcctgaggttggtgccctcggtcctccccagcaagcgagcctgacgctgtccacgtcgtgctggaccgccacctggtcacaggccagaatgccagctccactgtcccggccgtgcagaacctgctcttcctctgtggcagccggtgagggcaccagggtgggcacattcctgccacatcagagctgcacccggtgcttttgcccaagctttgaccacacgtctgtcctgcaggaaatgaacctgctgggtagatgcaccccctgagacagcccaggtgtctccagaggcagccccgtctcaggcttcagggaccccgcctcttccctcctgacaagggccctggatggcagcctggtctggccctgatgggattgttggaggcctcctggaatcagctctgagggggtgtcggctctcctggagggtccaaacccccatcctcctgcatgttctctggtaggaggcagagaaaagaccccacgtgcctggagagctgtgctagctgctaggtggtcctcgggaattccaggctgggttttctagggaggactggttgtcacgtgtggtcactgttgactagacagagtcggctcgggggtcctctgtgtgggtttgccctgctgtggcctgtctgccacccaccacctctttcactgttggtgggggccttgaggggagggcccagccggcgggagctggctcagaactttggccaaaggtgaacggaattttttaggagcagcagcctcctgccccaaggccgaccggcactggcagcactttcctgttgaagaaatcttcctggcgtgtggtttcaaagtgtaagcacctcagtgatgcaccctgtcctaagcattgagaggcacgtttacttgtgaatatgagaccatgagattctcaatgataggaaagtgctgtcccccacggccttgcacagtggcctcgggtagagcggctatcaagagcagacagtggtccagcctgctgggcacctggcctgggctgtggccctccagcgggctgccccctggccccaggttagggcgtccaggagaggcttaggccctctacttcctcacagttccccagtttgagccatcgaaggccttcttcctgcccacctccccgtctcagccacagccgttcccaagcaccagcgtggctcctggtgccagtgacctgccaggaggccccttgtgattataaaacc

SEQ ID NO: 942 - DNA, 1170 bp, Homo sapiens
cctgcaccgttgggatcaatgtctcatttatgtagaaaatgcagaaatctttacattcctcaagctagcccctgccccaatcctgccctggcctgaacacccccagggacagagctggtctctgggctgggggcccccgggcctgggccgggcaggctggaccatacccccagtccaccagctccagtctccacagccatcctggcccacacaggcaccccacacaaacctatttattgaatctgctggacccaagcggctctccagcccttccgtccttccccagccgctcttgtcgccttggcaggacttgactctgcctccctggccagccttgcaagaggactggggtctcctgccctctctgttgagccaggaatcccaagtgaggggttgccctgaggtctgactcttggggcaagcccgccacccactgtgggactttctggtgggctcctcagctcccaccccaggctggggcccagattgtgaggtctgtgtgcatgtgtgtgtgtatgtgtgtgtgcatgcgtgtgtgtgttgtggggatctggcctggcccttggggatggggctgctggggactgccccccttcccgccgtggccaggcgctctgtgtgctgtgtgtgccccaggctctgttgaccccgtccaggaactaacttacccagcttggtctctcctgagtcctccaccctggcctgggattggccagggagcagggcgggcattgggaccagtgtggagcctgagggtgcctgccctgctctggagggagggccaggagctgccacacccccaagtcctctcagggcccaccctcctttttcagcctctgcataaggcccctgggtacactgcagaagccccatccttcccgcctccgggcataaggcccctgaccacacttcagaagccccatcccccctgccaccgggcgatccctgctgtgagccgaagctctccctgccccgccctggccatgtgatcgtgttggtgacagaccctgatgtgctggtgctgtgtccccaaaaccggggccctccacagaggccccttcccagcgacactacctggggctcaggcctggacccccccagttcacggttgctcctgggagctgcccctcccgtcacatcagaaccttggaagctgctgctgctgcttac

SEQ ID NO: 943 - DNA, 1225 bp, Homo sapiens
gtttcggtggcccttcgccccacgctataagagcagtcacttccggaactgctgcccttcgcctttgccgcgaaaagtgcctgacgggggctgggaagggggagggggaaggagtcaacgactccctccccgtcgtcattggctgagcgcctcgtgacgtcactctgaggcgcctcatgcggcgccgcgcacgggtcccagagccttctgggtagcggtttaaccccgcctcttgcgtcggcgccttccttttcctccctgtcgccaccgaggtcgcacgcgtgagacttctccgccgcctccgccgcagacgccgccgcgtgagtgtggtgaccgggcccggggtgccggctggggacgcggagtccgtggggatgcggggtgggcggcggggtatttttgggacggaggcctacgggccgagccacgcgcggcctcgcccggcggccccgggatgggccggcaggaggccgccggggtaactccgccgtcgcgtcctctccgcccgcctcaggatgcgctacgtcgcctcctacctgctggctgccctagggggcaactcctcccccagcgccaaggacatcaagaagatcttggacagcgtgggtatcgaggcggacgacgaccggctcaacaaggtagcggccgcccttgccccgcagccgccgtggggccccagtgtcccatacaggcgattcttctgcctgatccggccacatgctggagggttcggggagaggctcgtttcagtctagttggcgatttcttggatagagaagtaagccgggcggaggtcgggcgcggtggctcacgcctgtagtcccagtactttgggaggacgaggcaggcggatcacctgaggtcaggggttcgagaccagcctggtaaacatgtcgaaaccccatccctactaaaaatacaaaaattagccgggcgtggtggtgggtgcctgtagtccccctacttgggaggctgaggcaggaaaatcgctcgaacccgggagatggaggttgcacggatcgtgccactgtactccagtctgggtggcagaaggagaccctgtctcaaaaggaaaaaaaaaaaaaaaagcagggtgggtacgaggcaaaatcgtgattaacaagctttggaagtttaataccagtgagctgcgtaagattgcgttaaaaaaaaaaaaaagcagtcctggcgcatggctcacccggctttgggaggccatggcgag

SEQ ID NO: 944 - DNA, 2213 bp, Homo sapiens
aataaaaaattagccaggcttggttgctcatgcctgtagtcccagactgaggtgggatagtcacttgagcccgggaggtcaaggctgcagtgagatcctaccactgcactccagcctgaagtcaaagtcaatttcattgccagtttattttgccagtgttgaagatacctatgagtagtcaacataagtagtgagatgccctgtgtccttttgtcagtcctaagtctaagaaagctagtgtccatttatttttatatcacttcccaagtgaggctggtggctccctttgggcagtgcagttctggaaacttcagggcctattcccatgtggggaacccagtcctgctgtgactctgggagggagagggccggggatacaatcgtacattcctggtaacagccctgtgattgtctgcttcaggttatcagtgagctgaatggaaaaaacattgaagacgtcattgcccagggtgagttgatgtggacgggctttcgtttgttttcatggtccatcctaatccctgccggtccatctgtggcctgccaggtttcgcttgtggaccagagcaccctagaagcctcacccgaggagtgagcagggctccagtgggctcacgtcatgggcacttctagacactctcaggagcagggcagcagggggcaccctgtgttctcagcagacgtttaggtggccctgcctcttaagcctgactgctcctagccctgaggccattccccaggatttgtctgaagcttggtgtctggagaactgagttcacgtcagcagtccttaccacatgctttctgtgagggggttgggggcagggactgagggtgccagggatgtccataggctccttgcctctttgttgggcagatggttttttgttggcttcagctgagctggtggaacttgtttggaagttgagctgttggggcagctgttcttgtcttccatgcatgtgaccacgacagggccagctcagcaaacgggccaagccatgaacacagcgttgtggccagagatgtggatactggggcagcacactcattccctacctagttatgaacatgtctgtccagtggacctctgagggtggaggtggggaaattgggcaggcaggcagtgtgggcctaattcctagaaggcaagtccctggataggaaaggtggggaagagaagtccccgttgaggagtggctcagggagggagtgttcaggaagaacgggagacactggcatatggtgggtccagatatgttgggtgccatgtgccatctctggtgccatctaacttccctgtggaacagcctcccaggctgggcagctgctctggtctcacctctctgctttctgtaggtattggcaagcttgccagtgtacctgctggtggggctgtagccgtctctgctgccccaggctctgcagcccctgctgctggttctgcccctgctgcaggtaagtggtggcctggtgagtgggcaaggggctggggctcagacggtgttgctgcagtggggtcttcatggggggactggcctggcacttgggcagtgctcaccatgcctctcctctgttccacagcagaggagaagaaagatgagaagaaggaggagtctgaagagtcagatgatgacatgggatttggcctttttgattaaattcctgctcccctgcaaataaagcctttttacacatctctcaagtattccatgagcactttgtcaagggtggcctctgcccaggttcttatccaagagggcaggtgtggagctgaagtgtgggcaacatggtattggggaagcgtttctggtgcaaaatgagcatgaggaggggagtctgggcatcacagctgcctggggtcccttcctgtggccttgagcagtatcctagctcctgagtacaccccagaagaatgcgaacgggctgggcacagtagctcgtgcccattatcccagcactttgggaggccgaggagggaagatcacttgaggccagcagtttgagaccagcctgggcaaatagcaagaccccatctctaaaaaacaacctaacaaggcgtggtgtgcacctgtagtcccaactatgggaagttgagatggaaggatcacttgcccaggaggttgaagttaacagtgggccgtgatagtgccactgcactccatcctgagcagcagaaaccctgtcttgaaaaaaaaggacagcagagaagc

SEQ ID NO: 945 - DNA, 2213 bp, Homo sapiens; identical to SEQ ID NO: 944

SEQ ID NO: 946 - DNA, 1211 bp, Homo sapiens
gagtcctctcctgccacaggcgtgaatctcagcggcaggatttccttcgtgctctgcgattccgtccagcaggacttgattgagaacccatgagatgctgaatacaaggctcctctgcctctgtgttttcatccacattttcaagctgggtgtggtggcacctgtggtccccgctactcctgaggtggaggcgggaggatcacctgaggccaggaggttgaggctgcagtgagtcgagatcatgtcactgcactctagcctgggcaacacagcgagaccctgtcttaaaaaaaaatcagcatttttggtagagtcgtttggtcttgaaaataactattggccgggtgtggtggctcacgcctgtacaccttgggaggccaaggcgggcggatcacctgaggtcaggagttcaagaccagcctgacaaacatggggaaaccctgaccccgtctctactgaaaatacaaaattagccgggcgtagtggcgcatgcctgtaatgccagctactccggaggctgaggcaggagaatcgcttgaacccgggaggcggaggcggaggttgtggtgagccgagattgcgccattgcactccagcctgagcaacaagagcgaaactctgtctcaaaaaaaaaaaaactaaaatgcccgtcctgcgcggcttctgtggcctgcctgtccttgcagtggtggcactgtagccccaggtctgagtgaggctccagccgtctgcgctggggctgcacaaatccagactcctgtgggcaaaattcttttaattgtgttgcattttgagcccttgaattaatcctttgtggcttggcttttttgggtgtccctcttgatctctgggaaggacgggatctaggccatagcttaatgtcccgtgttgtttttattcacaaagtaggtgtgcacacttgccagatagctgaagctcatcaaacctgtacgtgtgaaagactgagcatgaaccaaaacctgagggaagaaacccttgtggaggccacatggtcagcagagaagagggcctgaggcctccaccacactcacaggcctctcaggctcaccgtgtctgtggatggtggggtttaagggggaggcccggtgtcctcgcgtggggttcgccactgtgaccagccaggaccacagcctcttgttgaggctgagacagcgcctccgttgtatagaaagcgctttgttatttgtttt

SEQ ID NO: 947 - DNA, 1194 bp, Homo sapiens
atgatcccctgtgagaaggtgtccaccctgcccgcgatcacactgaagctgggaggcaaaggctacaagctgtccccagaggactacacgctcaaggtgagcgggcaatggggtgccgcacgccccaggtgagcgggcggtgagggggcgcacgctccaggtgagcgggcaacaggtgggggggcgggtggtgctaggcctgggtactgaccaccagggccgtcccaggtgtcgcaggccgggaagaccctctgcctgagcggcttcatgggcatggacatcccgccacccagcgggccactctggatcctgggcgacgtcttcatcggccgctactacactgtgtttgaccgtgacaacaacagggtgggcttcgccgaggctgcccgcctctagttcccaaggcgtccgcgcgccagcacagaaacagaggagagtcccagagcaggaggcccctggcccagcggcccctcccacacacacccacacactcgcccgcccactgtcctgggcgccctggaagccggcggcccaagcccgacttgctgttttgttctgtggttttcccctccctgggttcagaaatgctgcctgcctgtctgtctctccatctgtttggtgggggtagagctgatccagagcacagatctgtttcgtgcattggaagaccccacccaagcttggcagccgagctcgtgtatcctggggctcccttcatctccagggagtcccctccccggccctaccagcgcccgctgggctgagcccctaccccacaccaggccgtcctcccgggccctcccttggaaacctgccctgcctgagggcccctctgcccagcttgggcccagctgggctctgccaccctacctgttcagtgtcccgggcccgttgaggatgaggccgctagaggcctgaggatgagctggaaggagtgagaggggacaaaacccaccttgttggagcctgcagggtggtgctgggactgagccagtcccaggggcatgtattggcctggaggtggggttgggattgggggctggtgccagccttcctctgcagctgacctctgttgtcctccccttgggcggctgagagccccagctgacatggaaatacagttgttggcctccggcctcccctctgtgctggtgtgctcttgtgcctggtcaggggtggctccaacttgggatg

SEQ ID NO: 948 - DNA, 1197 bp, Homo sapiens
taaaaaccattgtttaacacaaggtcaccaagatttattcctatgttctttcctaaggattttattttttcttttctttttttttcttttttttgagacaaagtctctctctgtcgccaaagctggagtgcaacggcacaatctcagctcactgcaacccctgcctcctgggttcaagcgattcttctgcctcagcctcccgagtagctgggattacaggcgcccaccaccatgcccagctaatttttgtgtttttagcagagacatggtttcaccatgttggccaggctggactcaaactcctgatctcaggtgatccactcgcctcggcctcccaaactgctgggattacaggtgtgagccactgcgcctggccttcctaaggatatcataattttagtgcttacatttaggtctacgatccattttgagttaatttttgtgcacagcatgaggtaggggtccaacttcattcttttgcacatggatatctagttgtcccagcaccattttctgaaaagactattccttcccccattgaattgtcttggtacccttgtcaaaaatcaactgatggccggtctgaaggtagtgagttatctcaattgattgttcacagtcagttacagatggaacacctcgttctactctttcccgccttctcactgctgcacttgaacagtctttaaaaaaatcaattgaccataaatgcaaggatttgttcttggagtctcaactttactgcattgatctgtaggtctatccttatgccagtaccacattgtcttgattactgtagctttgcagtaagtttgaatcaggaaatgtgagccctccggttttgctcttctctttctagattgttttggctattctgaaacccttgtatttccttatgaatttgaggatcagcttgtaaaaagacagatgggattttgatagagattgtgaagctatagatgaattcgggagtttggccatcttaacattatgtctcctgatccatgactgcaggatatctttccatttaattcgatactctttgattcctttcaaaaatattttgtatttttcagtacacaagttttatgcatcttttgttgcatttatttctaggtatgttctttttgccaatattataaatgagattgtcttcttcacttcatttttggatggttcattgctagtgtatagaaa

SEQ ID NO: 949 - DNA, 1299 bp, Homo sapiens
cccgcctgttccgaggtgggtagggggtggggggctgttcccaggattcccctctacgctttctgtggtgaccacggattactgcgtgacaacgggaagccgggagccgaggcccggtccctgaccacgcgtgcctggccacccctgcaggaggactgccaccagaagatcgatgacctcttctccgggaagctgtacctcatcggcattgctgccatcgtggtcgctgtgatcatggtgagcgggcgggggcggagggcctgctctctgggctgccccttccgcggggccttgtgctgactgcgccccccaccaccctcctgcagatcttcgagatgatcctgagcatggtgctgtgctgtggcatccggaacagctccgtgtactgaggccccgcagctctggccacagggacctctgcagtgccccctaagtgacccggacacttccgagggggccatcaccgcctgtgtatataacgtttccggtattactctgctacacgtagcctttttacttttggggttttgtttttgttctgaactttcctgttaccttttcagggctgacgtcacatgtaggtggcgtgtatgagtggagacgggcctgggtcttggggactggagggcaggggtccttctgccctggggtcccagggtgctctgcctgctcagccaggcctctcctgggagccactcgcccagagactcagcttggccaacttggggggctgtgtccacccagcccgcccgtcctgtgggctgcacagctcaccttgttccctcctgccccggttcgagagccgagtctgtgggcactctctgccttcatgcacctgtcctttctaacacgtcgccttcaactgtaatcacaacatcctgactccgtcatttaataaagaaggaacatcaggcatgctaccaggcctgtgcagtccctcagtgccagtggtgtctgagacctaggggttggccggagggcaggggaatctgacatcggtggggcttggctctgtggactctgtggggtccagggtgagggtgggtgggtcgggatccctggtgttcaccaaaggagtcactctgtaaaatttggggagttatttattctgagccaaatatgagcaccggtggcctgtgacacagccccaggtcctgagaacttgtgcccaaggcggtctggctacttaattgtatacattttagggacataggacattgatcattacatctaagatgtacgttggtttagtcggaaaggtgggacgatttgaaggggagggactttcaggtcataggc

SEQ ID NO: 950 - DNA, 1098 bp, Homo sapiens
tgcagccaggtgggcaccaatgcaggagtcaggctgcaactcctgggctgtagtggtgctgtccactgtgccaggccttggtcttgtagtttgtttgtttactctgttgggtggagatgataccattcttttcccaagtgtctctgaagtttgcatgcatctaatgtatatgtttaacgtttaaaaagatgggagctatgtacacataatgatcagcacttattcagaaatctgaacctactaggttttaccctaaaaaaaaaagcgcaaataagactgaaaaatgttttcctgctctttgatttgtcctgaaacacgtctttacaatatgcttgccatggcatatcattgcattagtaatgttagtggcatggatcagcctaccagttggtaagataagcttgactaggtcagcccttacttttatctgaggaaccatatgctcatcttcaaatggccttgccagactgtctcatcccagcctggttctcccagggagcactgttcgtaacccgttagcctggctgtagctaatgggttccattccggtgcaatagcatttccagcgacacatgactgactgactggtggctttcagtttcaggtcttggagacaaatgctgcatgacgggctgtgggttagggatcttgggtgtgggtgatggtggtaggggcctggggccagtcaccagtatcttccttcctccccatctcagcactggggcctgggctaatggatgagggccactaggagtgggatttcttcactgcaagtgctgcaagtaatgcctggggcagcagcaggggtgggcagtggatgtacctgtatctgtctcttctactttttcctgtctgttttccactatggaaggtgacattcaggtgtccctctctaggtggggccctgggagctgggagtgatgcctgctcaccagctgggggctgccctccagaggggataccccatcttccttgccccatgtgggttatagcaggtccttcttcctgggcttgcatcacttctgtttagactttatcacagggcccccaggagccgcctgggcacgtctgcctagtttgccctcgttggtgtgcatt

SEQ ID NO: 951 - DNA, 1176 bp, Homo sapiens
taagtatttcaacctttgaacaagagcatgctcaaatgtgttgtttaatttccatatatttgtgattttttttgtttttctttgttatttccaggttcatttcattttggtcatatatagtaatgcagaagacttcaattttttgaaatttgttaagacttatttatttgtttaacaggtggcctatcctagagaatgttttctgagctcttgggaagagtgtgtctcctgctgtgttgtgtggagtgttctctctatatctgtgaggtggaattgttttgtagtgctttcaagtcctctctacaattattaagtcttgctttatcatttattactgaaagtgggttgtagaagtatgccaatattatattgctgtctgtttcttgctttgatgctgtaattgtttataaagaacttgcaaaattgaagcaaaaaatagcagtataataggaagttacttcaatacctaaatatatatacgaatatgcacccacgcttgtcataggttcccagttcattctcccttctgttactgttttatgttcttgttttttgtgagctctgacttaaagtatgttttaggaagtatgacattttttgacttaagatgtattttgcataatacaattgtaacctcttctgctctcatttcattaacatttgcatgaaatgtctatttccatcttgccactttcagtctctttttgtcattagatctcaagtgaatctcttgtaggtcagctgtagtttgatcttagtttggttttaaattatttagcatatgccttttgattgagtagtttagttcctaaataagcaatttactgaaatgaaaagatgtactttagccattgtattttttttacttgattcttgtagctttttctttctctctttcctttttgtgtcttgtactttgtataataagctttgactctttttaaattttcttttgtgtgtcttataggtattttctttgtggttaccatggaaattatataaaacatcttaaagttacaacaaggtattttacactggtaaatacttaactttagttgtatacaaaaattctttcttattaaatctgccctcaactttgttactgatatccctaaatcatttaatgttgtatatccattaacagttatttatgattatttttctactttcatcttt

SEQ ID NO: 952 - DNA, 1203 bp, Homo sapiens
agtgattttcctgccttagccttccaagtagctggaattacaggtgtgcaccagcacgcccggtgatttttgtatttttagtagggacggggtttcaccatgttggtcaggctggtctcgaactcgtgacttcaagtaatccacctcccttggcctgccagagtgctgggattacaggcattagccaccatgccgggctgttttcctccattttgtagctgaggtgtcttgcctagtatcacagaagtagtggtagatctgttgttgatgtctatatgctattcagtctataggtaatttaggttaaactactttgcaaattttctatccaagcagaaaatggtaagtttttgatcaatattttggcactactgcagaaagcagttaacaatgttaaatcctcccttctgaaggctggaagaaatgaagataatgcccccaagtgtttgacgaagtccataaacccttagtaataaccaaaaaacttccatttctcttataggggatcatcgtcttgctcttcttttatctcagtttgtgggtagccagtcagtccgggagctgctcaccatgcagttggtggactggcatcagctccaagcagactccttcatccaggatgagagactgcgcatctttgctctgttggctggaaaaccggtatcttctacttttaccataatatctcacattggttttttcataaattgaagctggtttgaggttgaggcaaggagtgatctttgtaaattgtgcacagttacacaaaatgttttacacattggacaattttcaaattataaaggcaggcatgcacacttttaaaaatctagttgtatagaaattaaaatgttaaaatgtatcatatcccatatcatatagtggtaaacaatataaataattttatcttcacagaaatattctagtttagttaattaatttttttgagatagggtctggctctgttgcctaggcaggagtacagtggggtgatcttggctcactgcatcctccatctcctaagttcaagtgatcctctcacctgagcctcccaagtagctgggactacaggcacacgctaccatacacagctagtttttaagtctacatccacatatatgttgttcctatttacatgtttgtatatacaaatgaaataaattatacataggagttctgtgattttttttatttatattttgt

SEQ ID NO: 953 - DNA, 1099 bp, Homo sapiens
tagaattcggctcatctccttagctgcccagaaattcatctcagatattgccaatgatgccctacagcactgcaaaatgaagggcacggcctccggcagctcccggagcaagagcaaggtgtgaggggaggcttaatgaatcagtaattaccttccacaacagtggaggcttatcctgccacccctttggggaaactgaatcgtaggggaggtgtaagacttactcagggtcacccatctgggattgaagtccgggattcctgtgctcagttggtgctcttccctcttccctcaggaccgcaagtacactctaaccatggaggacttgacccctgccctcagcgagtatggcatcaatgtgaagaagccgcactacttcacctgagccacccaacctaaatgtacttatctgtccccatgtccccacaccagcctgttttcataataaactttattgtgacaggcggggctgatccctcccatgttgggagacaccatgtggcaagtgacaaagctctgagcccgcccctcttggggccacagtggtagggatgggggaaggggatggaccccatggctggggtagtaccatgactggaggcgggggaggcaaccagaggcctgctgctttggggaggtgcattcccccaaccatgtcccgacacctctggagttcaggcaaggaccttccagtcctacttgtcctgcatcttctcaaggataggcacaatcatgtcaaatttgggtcgctttgcagggtcttcattcatgcagatcttcatgagcttacacacatgaggggaaatacctggtgggatggtaggccgaaggccttccaatgccacctgcgaatacaagaaaaaaagcagcctcacaatttgagtctgtcatgtagagagaagccactggcccttgggacaggattactgtatatccgaacaaatatgtgaggagccaaggcccactacagttattttcaccatcaccaaccactcccgcaacacaaatgtatgctgttgtgctctcaccttcattccaatctccatattggagaggtcagcaaagggtacctcccgtgtcaccagttcccacagaagca

SEQ ID NO: 954 - DNA, 1139 bp, Homo sapiens
aaaactcttggcctctgctttctcctgtagcacaaagagggagttggctggatcttttggtggagtcaggaaagacaggctgagctttctagcctaagtgtggagaaggatagcctcagccacaaaactctgtcaggcattgaatgacaagcatcagtagctgagtgcactcctggtgatcctggttttccttgaccactggccctggggccatgggtgcatggactcgtaaagctgctagggcccctagaaaccacctgggttcagcctctcccacaataagagttcttgcccttcataccctctacctggatggatggtctttgggcagggaattaatgacagaatgagcagtccctaatggtattgggcagttgggagtgagtttaggcagcttctctgtaaccgcttctggggccacaccccaaaactctacaccctctgccccagaacaattctgcagagtggtgaagttcacttccccaactcttctccaagtctagctttcctttccttctggctccaaggtgctctgtgtccgtctgtgtatgtgtgtgtctgtgcgtctgtgtgtttatttggggaaaagggcaatcagcaatcaactgaggtttcttaattgtgattatattcctgagaatgaatgagtaggaaaggaataaggatgttgttatgatcgcctgtggattttgtccattcatctcatgctctctgaacagaaggtatacctgggaagataccagctttttctctcagggttctgagtcagaggacaccatccaagaatgttgttagcttttcagttcccgctctgcattgcctgaaaaaactggtatgttgcacgtatgcttttggttgaaattgaacatactctagtgaatgtgccttaaaaatcaagacactagttcagaggaagcacataatgtccagatctatggcgaacacaggtgttggaagccaggactgtgataatcagaagctataagagaactttcggagcctgcctccttcagtgacaagtagggcacaaaattctagaagcagaaggttgtttttttttttttttctccattctgaaaatagcaggacatttacctcttaaataaacttagcatttagaggtaattctaaatttaaca

SEQ ID NO: 955 - DNA, 1140 bp, Homo sapiens
aaattctgggttgaaaattcttttctttaagaatgttgaatatttgcccccactctcttctggcttgtagagtttctgccaagagatcctctgttagtctgatgggcttccctttgtgggtaacccgacctttctctctggctgcccttaacattttttccttcatttcaactttggtgaatctgacaattatgtgtcttggggttgctcttctcaaggagtatctttatggtgttctctgtatttcctgaatttgaatgttggcctgccttgctaggttggggaagttctcctggataatatcctggagagtggttttccaacttggttccattcttcccttcactttcaggtacaccaatcaatcatagatttggtcttttcacctagtcccatatttcttggaggcttcattcgtttctttttactcttttttctctaaacttctcttctcgcttcatttcattaatttcatgttcaatcactgataccctttcctcctctttatcaaattggctactgaagcttgtgcatgcgtcacgtagttctcatgctgtgattttcagctccatcaggtcatttaaggacttctctgcactgtttattctagttagccattcgtctaatcttttttcaaggtttttagcttctttgcaatgggtttgaacatcctcctttagtttggagaagtttgttattaccgatcgtctgaagccttcttctctcaacttgtcaaagtcattctccgtccagctttgttccgttgctggcgaggagctgcattgctttggaggagaagaggcactctgatttttagaattttcagcttttctgctctggtttctccccatctttgtgtttttatctacctttggtctttggtgatggtgacgtacagatggagttttggtgtggatgtcctttctgtttgttagttttccttctaacagtcaggaccctcacctgcaggtctgttggagtttgctggaggcgtactctagaccctgtttgcttgggtatcaccagcggaggctgcagaacagcaaatgttgcagaatggcagatgttgctgcctgaccctttctctggaagctttgtctcagaggggcacccggctgtatgaggtatcagttggcccct

SEQ ID NO: 956 - DNA, 1173 bp, Homo sapiens
tggctcatgcctgtaatcccagcactttgggaggccgaggtgggcggattacctgagctcaggagttcgagaccagcctgggcaacatggtgaaaccccgtctctactaaaatacaaaaagttggctgggcgtggcagcgtgcgcctgtaatcccagctactcgggaggctgaggcaggacaatggtgtgaacccgggaggcggagattgcagtgagccgagatggcaccactgcactccagcctgggcgacagagcgagactccatctcaaaaaaaaaaaaataaataaaaataaaaggaatatgccatcttggaatccaatctccatgctatgagcaagcccaggcagtcacatggagagtagaactgaggtttctgcctgacaaccagtaccagttgccagccatgagtgaggctgttttggactgggccatctcagtatcccagatgacatcactgaagcagaagaactactcagtcaacccatggaatcattgaaagtaataaacttctgatgttttaagccatgaaaaaaaaagttccagcattgttgggttaatatctagaatatataaagaactcctacaactcaacaataaaaaaaaaaacctgattttaaaatgggcaaaagacttgaatatacatttctccaaagatgaagtacaaataaccaataagcccaagaaaaaatgctcaacatcactaatcactagggaaatgcaaatcaaaaccatgatgagaaaccacctcaagtacattaggatggctatcaaacaaaccaaaaaaatcccagaaaataataaatgttgacaagaatgtagagaaattggaatatttgtgcactgttggagggaatataatacagtgtggctgctgtggaaaatatggcagttcctcagaaaattgaaaatcaaattatcctatgatccagcaattccattctggatatatgcttaaaagaatttaaagtagggacttgaagagatatttgtacacccatgtttctagcagcattatttgcagtagccaaaaggtggaagtaacccaagtgttaatcaacagatgaatggataaacaaaatgtggtatatacatataatggaatattattcagccttaataaggaaggaagttctgacacatgctacaacatggatgaagctttaggacatt

SEQ ID NO: 957 - DNA, 1202 bp, Homo sapiens
tgtgagactgatcactgtcgcccaggctggagtgcagtggcgaaatctcggctcactgcaacccctgcctgccgggctcaagcgattctcctgcctcagcctcccgagtagctgatattacaggtgtgcgccacgacgcccggctaattctttttctatttttagtagagtcgggggtttctccgtgttggccaggctggtctcgaactcctgacctcaggtgatctaccccccctcgtcctcctaaaatgctgggattacaggcatgagccatcacaccggccccacgtagctttgtattcctgcaggcaagcaccggaagcaccccggcggccgcggtaatgctggtggtctgcatcaccaccggatcaacttcgacaaatagtaagtgtccttggactgcttttattgacacagcttgggaggtaggggcagagagagggctggcttaaacaaaaagtttagaagcaagccttgcctattgctgttttttaccaagttaacacttggtgtgaactgagaacctgtcatcgaggctagagtcacgcttgggtatcggctattgcctgagtgtgctagagtcctcgaagagtaactgctgaccttattcactggctgtgggccttatggcacagtcagtcaccaggttagagacatgcttcacattcacctacccacaaactagtggatgataaattttggctattcagaagacgtttattataggagtatgtagattttccatagagtgctgttatgtgacttgaattttagtctcggccctgcctctgacattgtcggtggtttatcctggttccaggaaataagactagccttttcctcatgatagtctttggtggtttttaaaacagttgtttaagtcaacagatgtatcatatgcctgacactgctctacaccagtgaataatttacactctaatagggggtggtaactataaagatgataaacatagcatcttaattggagtgtgtatgaaggtggttgttacctcttcctagccacccaggctactttgggaaagttggtatgaagcattaccacttaaagaggaaccagagcttctgcccaactgtcaaccttgacaaattgtggactttggtcagtgaacagacacgggtgaatgctgctaaaaacaagactggggctgctcccatcattgatgtggtgcgatcggtaagtt

SEQ ID NO: 958 - DNA, 1202 bp, Homo sapiens; identical to SEQ ID NO: 957

SEQ ID NO: 959 - DNA, 1219 bp, Homo sapiens
atgtttttctgtacttccataccttcccttacaaaactctggcttaatctaatccacttatataatctgtacttcccagttacctaccagacattgatattcttcctgtggtagaattatcataggtagttccctatccgtagcagtgcctactgtcactgcccaggttgtatcaggtttgcatttcgtgcttgaactatagctggttttcactgagcacagctcttggcccttcatgttctccagataatagaatcctaatatgttccattgatactcagtgccatgcattatctgaagagattttcccccaaaacagatgtattatgtctgtccttgcgggggttctggtccctgtgtcagtcttaactctcatgaatatagaggtagtgttaagaggccagaaccctagggacgctttaaattcacttcccagcctatttaatgtccattgagtagttctggtggtcaggaaggtggttgtcttcttttgcttagcagggggtatttgagcaggaggaggcttatgctttgccgagactagagtcacatcctgacacaactcttgtcctggtgtgctagagtactcgaagagaatctactggtcttgattcactggtgggggcagtcggtgcccccgttagtgcccagatcagaaacatacataccctgcctagggatttagaaagtgggttggcagtctttcctcacgcccatcacgcagttggtacctactacagtgtattgtaaacttttttctctgttcttctagggctactacaaagttctgggaaagggaaagctcccaaagcagcctgtcatcgtgaaggccaaattcttcagcagaagagctgaggagaagattaagagtgttgggggggcctgtgtcctggtggcttgaagccacatggagggagtttcattaaatgctaactactttttccttgtggtgtgagtgtaggttcttcagtggcacctctacatcctgtgtgcattgggagcccaggttctagtacttagggtatgaagacatggggtcctctcctgacttccctcaaatatatggtaaacgtaagaccaacacagacgttggccagttaaacatttctgtttataaagtcagaataatacctgttgatcactgaaaggcctgcatgtattgtactctgaattttacagtgaatgagagaatgtaccctaattgttcaacagggctcaa

SEQ ID NO: 960 - DNA, 1219 bp, Homo sapiens; identical to SEQ ID NO: 959

SEQ ID NO: 961 - DNA, 1175 bp, Homo sapiens
ctcctgactttgtgatccgcctgcctcagactccctaagtgctgggattacaggcatgagccaccccacccggtccatatagtacaatcttaacccaaaaagtgtgtgtgtttgtgtgtgtgtgtgtgtgtgtgttttgtttttgacagagacatgtaggagacaggtggaaaatttgaggctgatgaaccaaagagaatttcgagtttttagtactatatgtggttgatacttgaagccatggaaattgccaaatttatcaaagaaaagggattgtgtggccaacagaatgttagagaaatttcaagagttgagggcaaagagaaaaatctagagaagaaattacctgtaatgtagaagaaaaagtacagttcactgaagccatgtttcatgcaggatgaagtctaatcctatgcagggatcactgaaaggtgactattgagaaaaagttattattggctgtgaggaagtttcaatagcatagtggaatagtaaagcaggtcacagggaacgaggagagaatctcctctgaggaagtgaagatgagcggtagctggataggataccctggttgaggttgttttttaagttatagacaactgagtagttttgtagaggaggcatcctgtgaaagagaacagagttgaaggtgaaaaaacccaggaggaaggaggaggagattgaaatgagaacatgagtaaaatgggaactagagaaaaaggaatagttaatgagtgaggatagatggagagatgttgagggaattcactttgacttgtgagtaaatcatattagaggggaaaaaggttcagatccaaactgggaacgacaggaaagtaaaaaaaaaaaaaaatctattttaaaaacaagatttgtggcccgggtgtagtcgctcatatctgtaacctcaacactttgggagtccattgtgggaggatcgtttgagcccaggagttcaagactagcctgggcaactcagccagacctcatctctacaaataataaaaattggtgtggtgacacacgtccgtgatcccaactacttgcaaggctgaagtgggagaattgcttgagcttgggcatttgaggctgcagtgagccatgagtgcgccactgcgttccagcctgggtgacaaagcaagaccccttctcaaataagatttgtgacttttact

SEQ ID NO: 962 - DNA, 1101 bp, Homo sapiens
aaaacttcatataaaacttgtgggccgggcacagtggcctcagcccccggagtagctgggattacaggtgtgcacgaccaggcccagctaatttttgtgtttttagtagagatggggtttcaccatgttggccaggatggtcttgatcccttgaccttgtgatcttcccgcctgggcctcccaaagtgttgggattacaggtgtgagccaccgcacccagcctaattgatgttctcaaatgaaacttgtttattgatgataggaatgaaaaataaaacacctgtatttgtaacatttgctggttttcgtttgctcagtgacttattctgaatcatatatattctgtgtacatctaaaatcactgggttattttgaaattagattttgtctaaacagctattttcctttctatgggttagcaaaatcttacctagttaggattttttccttactgtttttttttggcttccagggtacagcttactacatgcattcatcacatcatcaaacatgattatccaagccgctggactgccattgtggacaaaattggcttttatcttcagtccgataacagtgcttgttggctaggaattcttctttgcctttatcagcttgtgaaaaattatgagtaagtgtttctttcaactcctatagagctttgagaagtaggaaaagttgggaaaatttaagccaatttgaacatgtaaaattatatttagcatagataataaaattagtgaattatatggtaatttcaatttattattttctttttgacatagcattctaactccgcagttgcttttctttattctactaagaaactccttgcacccttttttcttaatcaccgtctctttacctattcaaaaactaagttgtctctaaagacggcctcctcaatgtgtgctgataaaagtccttcaggtaagtttttctaaaatgtgaaggtgatcagaatacattgaggattaaagctctttattacttgtggcttttttttctgtgaatttttatcttaatttaggctcttgattaacttcctctgattctttaagaagaattcattggaatttcatgtgatcttctttaatcagt

SEQ ID NO: 963 - DNA, 1334 bp, Homo sapiens
cagccagaaactttatcagacaagttttttccttataaaagtttcatagtaacagataaaattaaccaaacttacatcattcgaacactattgctggtaagatttggcataatggctttctaatcaaggaatataaaaacgtgaaaatgtgtttagtggtttttggtggtgaagttctggaatacgaaaattggttgtggattctggggttcaaagaatgagaataaatatatgtaacattaatagtcatttttaatagtgttatatctgtttggaaattgagatgattatatttggaactgtatcaaaataactgttgtttatatttacagaaaaagatctataaagatcagatggaatacatgttgcagaatcatgtattccctctcttcagcagtgaactaggctacatgagagcaagggtatgttttaaagctgcattatttatatacttttgtcttgtaatgaatgactctgtggacttttatattgaaacttttaaatgttcactttgaagcctgtgtcttattttaggtttctgtttaatgtaaatctttacatggctgctgtaatgtgtgcataggtttcatctgtgtctggtagcagtgtctgtctgtgtttttcattcagatcttgctatccacacaaacatcatgcggccaaagagtaacttgggatcatagtactggtctagtgttgtctctggacacatctaccactggccagcctccaaattcccacacacagaactcagggaatagagattagcttgggggaatttaaggtaaggtatctacagtaactcactgtgtttttacaaaaggcttgctgggtacttcactatttttgtgaagtgaagttcaaaagtgatcagaaccttcaaacagccttagagctaacaagaagatgtctgattgatgatagagaaatgcctgtgaaagtggaagctgccattgcccttcaagtattgatcagcaatcaagaaaaaggtaaaggatttttgtatgtcaagaaaagtgaatgttggccaggtgcggtaggtcacacctgtaatcttagcacttcggtaggcttaggtgggaagagcgcttgaagccaggtgttcaagaccagcctgggcaacatctctacaaaaaaaatttttaaaaattaactggacatagtggcatgtacctgtagtgccagctacttgggagtctgaggcagcaggatcactagagcccgacggttcgaggctgcagtgtgctacgattgccactaccctccagcctgggcaacagatcaaaaccctgcctcttataaaatatatatatatatattaattgtaaaaagcc

SEQ ID NO: 964 - DNA, 1334 bp, Homo sapiens; identical to SEQ ID NO: 963

SEQ ID NO: 965 - DNA, 1114 bp, Homo sapiens
aattctaaaacctaagcatacttgcactataacattatgttaattaaatgttgataaatacattttatctataagactgtacactatcagtgtataaattgataaaatattaagagaaattattataagggtttcaacataagatagctattgctatttttgtcttttatcatttactaacttagccagccttttaaaaaaaatcttacaaaaggtttggtgggtgtaacggtagtgtgttcatactgcgcagttctttttcagatgtctagtattaagaacacattaaatcaaggttggttttcttggactcctatggaaattttcatttctattcattattgaacatgtatttaaacaccaattcctggagctctctcttgtcacttgtgacttgtaatttactgacagtgattgagatgattgtcaatttgttgagtaacaaaatatgtcattgttataaaagtacttatattatgacttggcagaggaactggggagtgatgaagatgatattgatgaagatgggcaagaatatttggagattctggctaagcaggctggtgaagatggagatgatgaagattgggaagaagatgatgctgaagagactgctctggaaggctattccacaatcattgatgatgaagataaccctgttgatgagtatcagatatttaaagctatctttcaaagtaagtcaacttgttacatgtggatccatttcattgaacaaatctgttgtagtttctgcctgccctttaaaggaagagtttggaggatatcaaacccagactagaaaaggctggttaggcaaagtaaccaaaattatttctaaggttgccatagtttctgagtattctttattcatcctgttattttacatttagattgtaattttggaagattataggaaaataatgtagttcaaaaaagtatacagtgacagtgcctctttgctacttctgattcccaatctcccagctttcctcagaagtaaccactcttacgtgtatacctgtttgttgtatgttattatttgtgtgtatccttttttcctgcccaaacctatacttaacgtgttaagagtatattagcatttatggcatatgat

SEQ ID NO: 966 - DNA, 1215 bp, Homo sapiens
aattggagtttttgaaattattatttatttttaattttttttttattggggataggtttgtctggaaattgtttattattatttatttaaaaagatggggtcttgctctgtcacccaggctggagtgcagtggcactatcatagctcactgcagcctcaaactcctgggcccaagcgatcctccagcctcagcttcccgagtagctgagactacaggtgtgagtcaccacatccagctcaaattattttataagaaccaaagtcattactagcatctttactacttgttttcaagtatgtgtgatactgtaattcaaaaagcataaaataaaataatttcataaatttaagttgttttaatagaagcttcagtttcctgttttatttttcaattacatcttagaataatgatggcatgcaaatatctcccaatcgacaatatagtttgtgttagtttcttagaatctcttcctaggaataataccttgttttctatttttatgtcagagaactcaagaaagcacagatggcaaaagctgcagctgaggaaagagcactcttcactgaccggatggccactaggtccaccacccagagtaatagaacatctcgacttattggaaagaaaatgaaccgctctgtcagccttactatatactgagctactcctttcccacctccccctgaacactgtgacaagaggaagctaggttgaaatcactgatagaatccagtttgcaattactttctcgattggtgtcagtagttttactgattaggacttttattgtgaattacagttgaaagctgtattttgatgattgctatgtcaggctttcatctaatcttaccagtctgtcttctgtaggatgtgtcactgttggatgttacaccagcctttccagggttaaccactgtggtggtgtgctgcttatagtttgctgttgcattgtaataaaaggtgtctttccctgtagtgacctgtaaaaagtactcaagggctttattacagacataccctccctttgaaaagggacatgctaaaagactcattactactcagccttcaatgtacctgtgtgtccatcttatatttcttttttttttaattgtgaattagacttgtatatcccactgggagcactttgtaggcattgcatgaaccatgggatgatgattctgtggaggtattgccttgtgaatttgctgctattt

SEQ ID NO: 967 - DNA, 1223 bp, Homo sapiens
gtcccaggagggaagtaccacttggtcatggtttatgatcttaacatgctgttgaatttggtttgctaatattttgttgaagatttttgcatctattttcagggattttggcctgtagttttcttgtgtctttgtctgtctttgatatcaggttgatgctgtccttataaaagaagattacaaatttccttgttttcatttttttgaaataatttaagaagaattggtgataattctttaaatgtttggtagaatttatccctgaagtcatctggtcttgaccttttctttgttgtttggtttttgattatagattcaatctccgtatttgttattggtctttttggccttttcatttcttcttaattcagccttggtagattatacatttctaggaatttatctgtttaggttgtccaatttgttggcatataattgtacacaatcgtcttttatgatgttttttatttttgtggcatcaattgtaatgtctcttcttccatttctgattttgagtcttcttttgttttttttctcttagtctagctaagggttttccaatttaattttttcaaaaaactctttattttgtcattaaaaaattttttttctcgtctctttctcatttattttgactctaatttttattatttgattcatttttttaactttaggtttggtgtgttcttttttttctagacccttaaggtataatgttaggttttgatttgagatcttctttttttaatgtaggcatttatcattataaacttcaatcttagtacggcttttgctgcatcccataagttttgagatagatttttgttttaatttgtctcaagatattttctaatttccctttttggtttcttctttgacccattagttgttccagaatatattgtttaatttccacatatttttgaatttttttctttttgtttttgatttagtttcattccattgtggctggaaaagatacttggaattatttcaaacttcttatatttgttaggacttgttttctgacctagcatgtgatcaaccctgtagaatgttctgtttgcacttgaggacactgtgtgttctgctacttttgggtggaatgttttatatctgtctgttaggtttatttgatctatagtgttgttcaagtttgatattttcttttgatcttctgtctggatgatttgttcattattttaagtggtgattgaagtatc

SEQ ID NO: 968 - DNA, 1170 bp, Homo sapiens
acagctttaaccaaatcatttacccaaataaagtataggcgatagaaattgtaaatcggcgcaatagatatagtaccgcaagggaaagatgaaaaattgcaaccaagcataatacagcaaggactaatccctgtaccttctgcataatgaattaactagaaataactttgcaaagagaaccaaagctaagacccccgaaaccagacgagctacctaagaacagctaaaagagcacacccgtctatgtagcaaaatagtgggaagattcgtaggtagaggcgacaaacctaccgagtctggtgatagctggttgtccaagacagaatcttagttcaactttaaatttacccacagaaccctccaaatccccctgtaaatttaactgttagtccaaagaggaacagctctttggacactaggaaaaaaccttgtaaagagagtaaaaaatttaatacccacagtaggcctaaaagcagccaccaattaagaaagcgttcaagctcgacacctgtcatctaaaaaatcccaaacacataactgaactccttgcacccaattggaccaatctattaccctatagaagagctaatgttagtataagtaacatgaaaacattctcctccgcataagcctacatcagaccaaaatattaaactgacaattaacagcccaatatctataaccaaccaacaagccattattacccccactgttaacccaacacaggcatgcccacaaggaaaggttaaaaaaagtaaaaggaactcggcaaatcttaccccgcctgtttaccaaaaacatcacctctagcattctcagtattagaggcaccgcctgcccagtgacatgcgtttaacggccgcggtaccctaactgtgcaaaggtagcataatcacttgttccttaaatagggacttgtatgaatggctccacgagggttcagctgtctcttactttcaaccagtgaaattgacctgcccgtgaagaggcgggcatagtataacaagacgagaagaccctatggagctttaattcattaacgcaaacaacacttaacaagtccacaggccctaaactatcaaacctgcgtgaaaaatttcggttggggcgacctcggagcacaatccgacctccgagcaacacatgccgagacttcaccagtcaaagcga

SEQ ID NO: 969 - DNA, 1170 bp, Homo sapiens; identical to SEQ ID NO: 968

SEQ ID NO: 970 - DNA, 1360 bp, Homo sapiens
gttccaggcctattcctagagattctggtttagtaggtctgtggtacaaaatccaggtgattctttctcatgctactagttttccagggggcccaggcttgagaaacattggtcctgcagcatcttcctacctttttattgctgatgataaacaagattcacgaggatcatccttgcaggattaaatctttagctctgtgttgtcccaaatctggataatataccactgttcgttaacttaatatacaaattgttggtagggatatccttgtttcatattctaaaactgtgtagtaccacctaaaactttttggatggatttctgtttatatcatgaactattttaatttacaaatcttaatttataggtgaatcagtggctaacctggttagaaactgctgaagaagaagaatcagaggaagaagctgactaaagaaccagccaaagccttaaattgtgcaaaacatactgttgctatgatgtaactgcatttgacctaaccactgcgaaaattcattccgctgtaatgttttcacaatatttaaagcagaagcacgtcagttaggatttccttctgcataaggtttttttgtagtgtaatgtcttaatcatagtctaccatcaaatattttaggagtatctttaatgtttagatagtatattagcagcatgcaataattacatcataagttctcaagcagaggcagtctattgcaaggaccttctttgctgccagttatcataggctgttttaagttagaaaactgaatagcaacactgaatactgtagaaatgcactttgctcagtaatacttgagttgttgcaatatttgattatccatttggttgttacagaaaaattcttaactgtaattgatggttgttgccgtaatagtatattgcctgtatttctacctctagtaatgggctttatgtgctagattttaatatccttgagcctgggcaagtgcacaagtctttttaaaagaaacatggtttacttgcacaaaactgatcagttttgagagatcgttaatgcccttgaagtggtttttgtgggtgtgaaacaaatggtgagaatttgaattggtccctcctattatagtattgaaattaagtctacttaatttatcaagtcatgttcatgccctgattttatatacttgtatctatcaataaacattgtgatacttgatgtagtgatgtgtggctgtaaatggcatccatagtctgggagaattgtcagctttgtttttgaggtataggagacccaccttagtttgacttaaggacttcccaatttttgtttttctgctgtacaagcctgggttccagaaggaatttttagactcttcaaga

SEQ ID NO: 971 - DNA, 1203 bp, Homo sapiens
ggacgtcatcgttcaaatcaactcttcaatggccatgggggacacatcatgcctcccacacaatcgcagtttggagagatgggaggcaagtttatgaaaagccaggtaagtaatatttgagtgtgcatgttttctaaaccttatctgcaacatttatttcaaactgaaatgtttatccttaagattagtaaagtattagtaaaatcacatcactttatttgataggttagatttttattcttccctgtttcatcttttactttctctgggcaaattcagttaaactaactttatggcttggctcatccctttggtacttgattaccataatttgtggacccctttttatctagactttctttctccttttctgaaataggggctaagccagctctaccataaccagagtcagggactcttatcccagctgcaaggacagtcgaaggatatgccacctcggttttctaagaaaggacagcttaatgcagatgaggtacatttgcctatgttacttatataccatagtttgtccattcagaaatttattgcccgatgattataaaaagacgcgttattaagaggactttatgctggagttcttgacgtttttctctcttttctatacttctttttctttctttgaatgtccagcgtcctgtgagcgaagattatgagatatgagggcaagtctcctaaagtctgttagagcaagaaaactggttgtcaaaatattgtggtttctttctttgtaagggtgatttaactaaggataaaacagggcattttctaaactgtagttaaatttgcagttttttatttgaatattttagtcatgctaattctaagagaatgtaagatttataatagtatcttactactgtatgcatcagatctttaaattttttgccaaaaattaaacctgttaatgtggagtaccttctttagtttttcaaaaagcttaatgtttccctagattctgtcactgtataggattttagaatgttgtatttaatatgttcgccaactgcatgttgttaatttagatatattttgttttcaattccagattagcctgaggcctgctcagtcgttcctaatgaataaaaatcaagtgccaaagcttcagccccagataactatgattcctcctagtgcacaaccaccacgcactcaaacaccacctctgggacaggtacagaccat

SEQ ID NO: 972 - DNA, 1203 bp, Homo sapiens; identical to SEQ ID NO: 971

SEQ ID NO: 973 - DNA, 1292 bp, Homo sapiens
tttctctctcgctacaagtattctttcactcagcactggggaagttgggaacagctggtcaccatcatccctttaatcaactcacacctgtttaaagagtgtttctgatttgaccttcatcccttagtttactggcgttaaaaaaagtctcagcaattttcattatttctcgtgggtctcattatcaaacctttacttatttcggcatatttcctctgggcttcttctagtttctgccttacaagcaatgctgttctgtaaatttattgaaacctctggaacatttcacctttagagatggaggatggaaggattggtaccagaagagggctaagatacgttttctgtcttgagctgaaagcacagtctactctccttcgttttgtcgatgagaaagttgaggccagaggggaggtgacatgtttagagtcacccagctggttagtgacagaaaaagcgtgagagttgtctaggattcctgccactttggtccctggcctctcctgggggaggctgctgttcttaggtgctctaagcttaatccctcagaatgtgtggacaggtcagcttagaagagatggggagattcaggatccccctgtgccagagcacagcctcaccggatgctgcttcccacactgaagtgtcctgtccgaccattgctatctgaggcatccacaagcaggtaggaaagctggcgagccattttacttcctgaggacaattccccagccacaggctctgagtcaaatttctatttggtaagcatcctagcagcaaagtcctgcactcagaccagccaaaaaacagcccccattccaagtacttggtgtcaaaagtccccgaacgacttttaaacccaagtcttcttaaggtttcagtactgtggtggctttagcagttgtttttgtgcaactataaattatttaaatcatctgagatgacagtcaattttacaaaccaggtacatattaatttgtataattttgtatatgctctggtacactacctgaactaacgaagggtagaactaattctgtttgtcagtgttcacacctgtaacattaggaggatatgtctgcattgcttatttctttatgttggtgtttctgtggcaaagccctgcacatggcatttctgaaaagccttaaatctttaagatgttgcatgtagggtatgcagtgcaaaaggctgcctcagaactgtgagcccttttgtaagctggaagcatttctcttactactgttacttttgtaggaagttttcaattcagagctgccaaagtgttcccg

SEQ ID NO: 974 - DNA, 1134 bp, Homo sapiens
agtattaaaagaagaatatctaatggtatgtcttattttacatattttaatacttgaatatgactataattctgtactaaaaacctcacattttgttaaattatctaggtagtatttaagataacatatcattcaatttccttactttttaaaaaaatgtttaaaactttatgatggtttcgtagaaatataacttgtagaaggaaaatacatatgcattggtgtgatgtcataaagaagacatgaattaggtaacagggagccctatattcaaatcttacctttgcttttaaataattttatgacaggctaagtcggtgaattcatttggacctgaattttccttataggtaaaatgaaaaagtagttaggtgaacggaggtctcatctaagtttaaacttccacatttcagagatgtcagagttctctactgtttctgaaaatgttaccagcccttccttaataataagttttggctaccttatgctccagatattttatgctttctttacttttctttttccaggattactataaaacaggaataatccgttgtcctgatggcatatctattcctgaactgagagaagcatgtgactatctttgtatctcttttgaatatagcactattaaatgtagagatctcagtaagtatgatgttttgtgtgtaagtggtttgtagaattagaatatattggaacaaaaagcctgaaattagtgctatttacctagttagacttaaagtatttaattcaattataaagcattctagtaccacaaagattattaatgaaagcttgcaaagaccttgatgatctccttgtgcaattttccaaatattttttcaattttaataattttcttttttgacaaacccagatttcctcctagacagttttctatattatttatttgttaccagttttatctcctagatttggatccttggctttggtcaagtgtggtcatttggctgcatttctttgattacatcatccaaaaatttataattttttgtattaccacgtgtgataatatgagcactatggaaaacacaaataattctcaaaaacaatacctatcattaaagatcctagattgaatgtctagccctcatgtatacataggattaa

SEQ ID NO: 975 - DNA, 1181 bp, Homo sapiens
gtaattaggacagcttaaattggtattcttattaatcttttactgtaataactttcaaagcatatttattttacttgtgagaatattcggttccttgggtttctatttttaagtggagtaataacataaaattttccttagtcttgatgttagtttgggttagcattagtcagctatacatcttttttaaaagtctacaaataaagattttagaaagcattttgatgttttgggttgtattcctgggaactaaatgaatgtttatggtgttctgttaacatcttatttgaaattgaaaagtagaaatgctgtgacttaaaacaacttttataaatcaaacatttaaaaagatatatataaatcttgaatttgtaaaagaaaatttgcataacttcgtctaacatctttatttcagaacgagaaaaagatcacagttcctctcgtccaagcagtccgcgtcctcaaaaagcatccccaaatggttccattagcagtgctgggaacagcagcagaaacagtagtcagtcaagttcagatggtagctgtaagacagctggggagatggtgtttgtatatgaaaatgcaaaagaaggagctcggaatataagaacgtcagaacgagtgacactaatagtggataacactagatttgttgtagacccatccatttttactgcacagccaaatacaatgttgggcaggtttgtattattgcagttatttgcattactaattataatgtgcttttactgccattatttttttgtttaagttttacagtaattctctgttgaaatgtaacatttctgttttacagatgaaagaactgagctttggaggctaaattacttgtcccaagttaatacagcttagaaagtgatagagtaagagcttgaacttggttttatttctagtgttctttgcagtaccagtagaaatagcaaatatattagttattgaagtcaggatactaaaatatctttacagattgagactgtaaattgaatccaaccaggtgaatttagcaatgataatatgtttcctgcacttgggttcccattcaatcacaaaatataaacaatcagcattgtttaaaggcggaaaaaaaacccaataggtagtttagctgtaaagtcagcatgaattgtcagttcgatgtagatacttttaaaaaaaaaaaa

SEQ ID NO: 976 - DNA, 1220 bp, Homo sapiens
aatctagtgactaattagctgggtgttgtagcgcacacccggtaatcccagctactcgggaggctgaggcaggagaattgcttgaacccgggaggtggaggttgcagtgagctgagattgtgccatttcactccaacctgggtgacagaatgagacttcgtctcaaaaaaaaaaaaaaaaaaaaaaatctggtgacggcttgaaaaatctagcactgaaaggtaattaccagtaaagtttggtaagtctgtttggtatgtccttgattttattgttgataatggtgtcattgaattgaattggggcttaataatatggaataacctactgattgtacatagtttaaataattataaatatcttaatttttctttacagggaatggccttaagtcttggagataaaatcaacttgtcacagaagaaaactagtatataaaaataaacaaaaagtccttgaagctttacagttaatttaggtatgggcttactggactccaacatcttttgtactctttcatgcttatatagaatctgagttcatgctgaatacttttcagccaataatttatagcctttcccttaaatcaagattgagtttaaaattatagtttgtcttttgtcttaacagttctgaatgctgtcctcaaagtatataatgtttcatgtaccaagacccttttcacagtacaataaacagatctattcataaatttttgttattttataaataaatgattacataattttagttatatggcaatggatttcttttagttgggttataaatttctattataaatttaaattactgagttgtgaatatatgcagctttattaagagaatttacaaattcaatgatataaaataaggtaggccttgattcacttggttgttttttacttatttaatattccaacattgctatctctaaaaatgcattatcatgttttgaagggatttgctcttgaatttagctccagggagaaagtatcaaaataacttttttttttttttttgagatggagtctggctctgtcacccaggctggagtgcagtggcgtgatcttggctcactgcaagctccacctcccgggtttacaccattctcctgcctcagcctcccaagtagctgggactacaggtgcccgccaccacgcctggctaattttttgtatttttagtagagacgggctttcaccatgttggccaggatggtc

SEQ ID NO: 977 - DNA, 1188 bp, Homo sapiens
tcttttttattcgggccagtatgcaatgaatcagaaaactacaactcccaaagtgccccggggcggcgaggggccgcaacggtgacgactgtggcagagaaggcccggaggggctctgcgttctgtagtggcgctgcttgggcccttggcggattgtaagctgctggttttgcggctgggaagagcggcgagagggttcggcatttttcgtcgggatccccgcaaggatgagtgctgccagagagtctcacccgcatggggtgaagcgttcagcctccccagacgacgatgtaaataataatggcggagtggctgagggttgaggcctactaaagcctggagtaggccgggaagggtggttggaggaggacgcgcctgaggtggcctgcagcgggagagcccagggaagaaaccagaagaatgagtgggaaatgcctcccttaatctttatgagggtcagaaggtttgaagaggcccacacgctgagagccggagacctgcgtaggaagggggattgaggaaggaaattctgagagggtcgaggagtgaaagagcttagtcaagggatttcgtacgtgcgttttggggggccgatgagagtgctttctcgggcctttgtactcagtatagagacggcaagactctccctgttttgggttctaaatgttcccgtgacaatgtcgaaatgttcgtgcacgtttgtacagatttttcctgcctggatgatttttacaatgtgctgttgagagttaactttagctgcactagtaagggtaaaccgagaacagtattgagccgaaaattgtgccacgggtgtaatttggtactggctctggtggtgaggtctaagacgttgagacctagaagcccattttgatgtcggatattaatacctcgttcttcttacctcgtctccccatcaaatgccgttcccttcctcagccctcacctcataggttttaatagcaaacggtttatcccttaaagtaacccgttaaatatttactgcactgccgggtgttgggaattcggagagaaatatgatgcttattttaggcctttttgtatatttgtcctagctcctagcccagtgtcatggaaacggtaggtaaccagtaaacgtaaaactaggtccttcatacaatggataagtgtcttggcaacgttgatggggaaaattgttggaga

SEQ ID NO: 978 - DNA, 1331 bp, Homo sapiens
acatggaacccatggatatggagagctgactgtgtatttgaaaaaatatacatgtccttaatttatgtttatctcatcagttttaatggctgcatacgatttcattatacagttgaattacgatttacttagccagtaatcgataaaattttttggagttgtcttccaaaagggagtatctttattgtggtagctgatcacaaaataaatacatgcttatgttgaatttttaaaaaagctagtctcaaaaggttgtatagtatattatttcattgataaaaaattcttgaaatgacaaaattatagtaatggagaacagatcagcggaagacttagaagagggtacatttctttgaagtggtggaactgtcctgtgtcctgattgtggtggggcacacatgaatgtatgcatgtgatgaaatctcatagaactgtacatatatacatagtatatataaaaacctggcttctttccgcgccgatagcgctcacgcaagcatggttaacgtccctaaaacccgccggactttctgtaagaagtgtggcaagcaccaaccccataaagtgacacagtacaagaagggcaaggattctctgtacgcccagggaaagcggcgttatgacaggaagcagagtggctatggtgggcaaactaagccgattttccggaaaaaggctaaaactacaaagaagattgtgctaaggcttgagtgcgttgagcccaactgcagatctaagagaatgctggctattaaaagatgcaagcattttgaactgggaggagataagaagagaaagggccaagtgatccagttctaagtgtcatcttttattatgaagacaataaaatcttgagtttatgttcaaaaaaaaaaaaaaaaaaaacctgtgaaatctctgtgaggtctgtagtttagttaatagtattaccatgtcagtttttctgtttttgacaattgcactattgtaatataacatgttatcactgagggaagctggctgatcggtacacaagaattctctgaacaagaagattagcatggcccctgcgcaaggatgacacgcaaatttgtgaagcgttccatattttgcgcagtctgtcaagatcatttcagtatctgctaattagcactaaggaactagtgtgaatctaagcaaaaacgggtggcacccaatgacgaaattgtggttttcattaccaaaaaaaaaaaaaaagaattctctgaacaattttttttttttttggagacagggtctccctttgtcacccaggctggagtgtggtggcacaatcctggctcgctgcagcctcgacctccctgggctcaggt

SEQ ID NO: 979 - DNA, 2466 bp, Homo sapiens
ctcttgtcgcccagtctggagtgcagtggcgcgatctcagctcactgcaacctccacctcctggattcaagcgattctcctgcctcagcctcccgaataggtgggattacaggcgcccgccagcaggcccagctaatttgtgtgtttttgtttgagaccgattctcactttgtcacccaggctggagtgcagtggtatgatctcggctcactgcaacctccgcctcctgggttcaagcaagcaattctcctgcctctgcctctggagtagctgagactacaggccgcaccaccacgcccggctaatttttgtatttttagtagagacgaggtttcaccatgttggccaggctggtctcagactcctgacctcagatgatccactgcctcggcctcccaaagtgctgggattacaggcgtgagccacaccacctgatcccacctcttaaaagggggaggggggtgcaaaatatctgtactcctggagcttgtagtctaattggaggtatgacacatcaaaagaaaatatgtcatagattgtaagtagtcagagctcattagaggtttaaaagaaataacgtgtaaagtttttagaagaatatctgaccagagttctcagtaaatgttagctgtggaatctcattaatccctttggtcatctgtattccagcaagctcactgtgatgatggttttccaacattcgcagtttccaccagaaaggttttccttagtgttgggtaaaccttccttggatgtctgagtgagctttatgtgcattctcacgttggtttctgtgatgtataaaagtatacccccatcttacagataggaaactatgccctgatttctgagccttgacatcatcacattctccagtttgtgtttcgtgttgaaagttaaaacgtgattcccttttcaggtgtaatcctgagagattcacatggtgttgcacaagtacgttttgtgacaggcaataaaattttaagaattcttaagtctaagggacttgctcctgatcttcctgaagatctctaccatttaattaagaaagcagttgctgttcgaaagcatcttgagaggaacagaaaggtaagctaataaataaaacctggtgctaagtaggactgcttgtactaaattttttcggtaaaatgtaatgcatctggtttgaattatccaaggcttagtacacaaaccagtgtagtgctgctttgaagttcaaattctatccaaagagattttcattatagaaagtgcatggtagctctacattctcttattaatgtttgataatgttaggtcattttgggtggttttcttgaattgcaccaaattttatttttaggataaggatgctaaattccgtctgattctaatagagagccggattcaccgtttggctcgatattataagaccaagcgagtcctccctcccaattggaaatagtaagtatcaactcttttgtcgttgttatcaagaataggagtcagccagtagtaaaagtcctagtagtaaatatgttcagccttgggggctagtagtaaatatgttcagccttgggggctattttgttaactgctctttgagctctggcctggtagtgggaaagcagccacaggcaatacataatcgaatgggtgtggctgcttgtctttaataaagacaagcagagggccatagttgcagaccccagatttagaccatgaataagccctttgactctcttttagatagtaggtagattttcctttcatacctctactcccaggagtttgaattaattttcacatgaattgctcactatgatgattggttgccagacattcgcagtttccaccagaaatgtttttccttatgttggccagttcttccttggatgtctgagtgagcatcttcattcattgtgcttgaacacaatgagttggttcaggtattcagaagtttggtgcactttatatagtttggatttattaactgtttgagaatagcaccattagtggggagattctgttaatgaatgtggagggactagtattaatcctgattttctttctttccccttttttctttttcagtgaatcatctacagcctctgccctggtcgcataaatttgtctgtgtactcaagcaataaaatgattgtttaactaaaagcatgtttcatatttattttcctagaagaaaaattatatatatcagtggttcatatgtgttgatcttgtttgatggggaagtgttttgggtgattgatgttaggattccagggagcagtaagatactgtccatcacatcccttgattggccccttaaaccagttgagcagcttataacctcataggtggttgctttaaacatggagaactggaagacactaggaaataatgcctttgtgtttgttttggtgtcatggcaaaaatgtttctaagtatttttgatacatttaatgttaaaagactgagacagat

SEQ ID NO: 980 - DNA, 1139 bp, Homo sapiens
gtttccactctcgctctcctttcgttgcctgatcgccgccatcatgggtcgcatgcatgctcccgggtgagctcggggcatcaagccggattgctgggcggggggtgggaggaagacagggagtgtgggcagcgggccgaggggatgatgttctgggctgctctggcactagccgccacctcacctcgagactgcttctctccccaggaagggcctgtcccagtcggctttaccctatcgacgcagcgtccccactgtaagtagcgcgctgggaccggggagaatccggggagggggttggcatttgtctcgggtgaagcgacgccagggtgaggaacttgcgtgtatgaggagcgcggttttgcggaaggagagaccgctgttctgcggcgccattcctgggttctcatcctaaggctgctttctattccataacagtggttgaagttgacatctgacgacgtgaaggagcagatttacaaactggccaagaagggccttactccttcacagatcggtgagtgtttgtgtctaacatagcctatttcgcctgtcctcgtgtgacttgtaggatctagtaggtggtaaagttattttaaaaatagccaaaactctggtctcgccaccgtgctagaggcatcattgtaagcacttcacatgtactgatttcgtttaattctgaccacaatactttgaaataaatcttcatggctttcaccccagtttacagttgaggaagcagaggcacactgccgctggatactaaccagccccaaatcacacagctgtcaagtggaggagttggaattggctaagcagagtgcctgacacagttcctcacagttaggtgtggtttgaatctcagctgcgtgtgacttcgtgcaagtggcttcattcagcaaatgtttaccttctatgtgctgaacatggttctggggcctgagaacatactactctccgactcccccgcccaaaaaagccagccgcaatgtgcctgtagtcccagatacttgggatgcagaggtgagaggatcaccagagcctagaagtcccaggctgcagtgagctatgatgaagccactgcactcctgggtgacagagagaccccacctctttttttttttttttttgagacagtc

SEQ ID NO: 981 - DNA, 1185 bp, Homo sapiens
aggtgtgagccactgcgcctggcctatgcattgtattaatttagcatattccaaaaataatttaagacaggcaaatgataaatgtggatgtttctggtggtgcatcacattgtaggtgatttcattttagtagttgtacctgcatagggctaaaaattaaccctctcaaagctctgagagtgccggagggcctgaaagagtgcctggtacttcaaaggttcccagggataagaaaaatgaatgagacagtgcttgctctcaagaatttctcatccatttggaagacaacgtacattttataacagtataattataagggcaggctaaataggatatggtcacctgggctgggagatggaaaaggaatgagggggtttgaggaggaagaggatgctcaagttgagtcttaaatgattaattccttctattcataagggcaggatggataaacgtgatcaggttctaggccctgctctgcttctatcaagcggtgagatattgagcaaactgcttaatacttctggtatccattttccttattcaggattcgactacatatataaagcagtgctgtacatgagaaatatgtgagccaaaaatgggagtcacataggtaggagattttacattatttttttcccctaaatcttttaaatctggtgtatgttacacttggtacatctcaatttggaacagccacatttcaggcacttaatagctccatgtaactagtaactgccatattggacagtatagatctagaggctgggtgcattaatgcatgcccatagtccagtgctttggaggatcgaggcaggaggatctctcttttttttttttttctttgagacggagtctcgctctgtcgccaaggctggagtgcagtggcgtgatctccgctcactgcaagctccgcctcccaggttcacaccagtctcctgcctcagcctcccgagtagctgggactacaggcgcccgccaccacgcccagctaattttttatattattttagtagagacagggtttcacggtgttagccaggatggtctcaatctcctgaccttgtgatctgcccgcctcggcctcccaaagtgctgggattacaggcgtgagccactgtaccctgccagcaggaggatctcttgagcctaggagtttgaggctgcagtgagctatgatcacca

SEQ ID NO: 982 - DNA, 1100 bp, Homo sapiens
ccctagcctagcgtcttttctagtgagtgtgctatctcagatgcgctgaacaaagaggtctatcatttccatgccctcatatggagacttaactgaaagagaagattgggtaggacctgcacatgacaatcctatctcagaaaaaccatggataggggattctatagtcagaggcctattctggtttgctggtattcctctccttgaaaaatcagtacttaatatttctattatgatgccacaagggtagaagctaacagtaggagccatagaagcacaacaacaattcataaactctttagcctcagtagttatgcaaaatagacaggccctagatatccttatggccaaagtagggggtacctgtgcacttttaaaaagaagcatgtcacttctagatcaatacctctagtcaagtagaagagaatgtacaggtgcttaaagatcaaattagaacattgacagattaagagagaatgcgggctccagtcccagttggctacaatccctcttaaatggattccagtcttctttgtggaactggttagctcctttattaggcccccttttgctcgtgtgttttgtactaatgtttggactttgtatattcaatactgtaactcaaattgtttcctctcacttagaggctattaaactccaaatggtgctgcagatagaaccacacatagacacgccattcttctggggacccttagaccaatctcaggaggagccctaactgctgtaaccccaacgacgcccccttccagcaggaagcagccaggagtggtcatcgtccactttccccaacagcagttggggtctccactcctgaagcagggaatgagaaaggaggaaggaagaaaccagtcagacaggcagttagggtgggtcctcggtaaaattcttccaaacaaaagaacagcttgaaaaatcaaactgcaggcacagagaagagaacttgtacagggaggcttgccttagacatgtccacagctgcctaggtaagaaagactacacaggagacttgcccagagatgcccacaatggaaaattccattccctgagacatgcgcagtaaggggaacaaagccatatgg

SEQ ID NO: 983 - DNA, 1277 bp, Homo sapiens
gaggccaagaggtggatcacctgaggtcaagaatttgagaccaacctggccaacatggtgaaaccccatctgtactaaacatacaaaaattagccaagtgtggtggcgcacgcctgtagtcccagaaggctgaagcaggagaattacttgaaccctggaggtggaggttgcggtgagctgagatcgtgccactgcactccagcctgggcgacagagcgagactctgcctcaaaaaaaaattaaaaaaaaaaagctttataattatagagactgtaagtcttgggaaacctgggaatgcatagacaaaatgtgagattttttttttttcatttcatcttcagggtctttacggaataaaggatgatgtcttccttagtgttccttgcattttgggacagaatggaatctcagaccttgtgaaggtgactctgacttctgaggaagaggcccgtttgaagaagagtgcagatacactttgggggatccaaaaggagctgcaattttaaagtcttctgatgtcatatcatttcactgtctaggctacaacaggattctaggtggaggttgtgcatgttgtcctttttatctgatctgtgattaaagcagtaatattttaagatggactgggaaaaacatcaactcctgaagttagaaataagaatggtttgtaaaatccacagctatatcctgatgctggatggtattaatcttgtgtagtcttcaactggttagtgtgaaatagttctgccacctctgacgcaccactgccaatgctgtacgtactgcatttgccccttgagccaggtggatgtttaccgtgtgttatataacttcctggctccttcactgaacatgcctagtccaacattttttcccagtgagtcacatcctgggatccagtgtataaatccaatatcatgtcttgtgcataattcttccaaaggatcttattttgtgaactatatcagtagtgtacattaccatataatgtaaaaagatctacatacaaacaatgcaaccaactatccaagtgttataccaactaaaacccccaataaaccttgaacagtgactactttggttaattcattatattaagatataaagtcataaagctgctagttattatattaatttggaaatattaggctattcttgggcaaccctgcaacgattttttctaacagggatattattgactaatagcagaggatgtaatagtcaactgagttgtattggtaccacttccattgtaagtcccaaagtattatatattt

SEQ ID NO: 984 - DNA, 1225 bp, Homo sapiens
atttcaaaagctatataaattacactataagtgcaatgaaggggtaaaaatacagactgtgaaggaaatatacaaaaagagctacaaaagcatatagcaggggaccttgctctagacacatagtgatagaaactaatacttacaaagtgttcgctgtttcaaagcactgagctctgcatgtatcagcccatttataatcaccacgactctatgtagtgggtgctattgttatccttattttacacatgaggaaatttaggcacagaaacataagtaacttgttcaaagtcaagccactagtaagtagcaaacctagatttgaaccaggtggtcttgctccagagtccatgctcctcagcacattgctaagagaacaccttctcctaccatctagagaggtggccttaggatgatgtgtcaggagctgtgtgaccctgggtgggccactacccctttggacttcagcattcttgagttaaaaataagactactggactagatcagagtccaatgtcttatgtagggaatgagggacccttagaaatcacatgaagaaatttgtgtgcatgcatgtctacgaccataccaccctgaatgcgcccgatctcgtctgatctcagaagctaagcagggtcgggcctggttagtacttggatgggagaaatttgtgtgcacgtgaatgtgacatgtttcttaagtgtggcactgcaatttaaattaaattttcagagtggtctgtggccccaaaggagtgcaggaaattattccttctagaatttagtgttccatgaaatataccgagaaacatatcttgtgtgcttttgtatggaatatgccacatgctcacgctcagaagaatgcaaatgtatacatagtgctccctgcagagtgggtgaatcctgagtccatcttaaataattttccctgcatcttctggattaccctttcttcctttgatttgcgatcattcctccttcaactgcatcgttctgtacattgaagatccagacatatccctgtctcgctctaatgtctaaggccaaataaagcttggctgcacagttgtgatttcataaatgtgcccagtaaatccaacagtgaaacattttattaggtgggaaatgccaaatgccatacataagttatttatttacctatcaacaccaataagacaatttcattttacaggggtacagttggattccaaggctggcaattcgtggct

SEQ ID NO: 985 - DNA, 1210 bp, Homo sapiens
tacctaaagttcttcctcattgtgtaggctaaacaaagaagctgggtaagaagagtgagtacgttttacagtttatatgtatcacttatataacgtaagtaaaattttgagcttatagctagttactaaaaacttaagaaattgcccagaaccgcataggttattgtggatttagagatgagtatacattgaccatgaaatatatgtttaaaaatagtctttctctgcatgtgtctttgtatgtctctctttctgtctttcacatatatacacacattatatgtatacatatatacatgtttttgtaactatatgttttgtgaattttgttttctcaaagttttgcctgaaaatttcaaaatattgaaaatgctttgatgtgtttgagattttataaaatattatccatcttatttaatcagctcaataacaaactgatcagtaagctttctgctgttttgccttttttttaatgcaggactcggaagatggaagaacttattttgtcaagatccatgccccttgggaggtattagttacctatgctgaagtcttgggaatcaaaatgcctattaaggagagtgatattccccgccctaagcacactcctataagctatgtgcttggacctgtaagactcccactgagtgtgaagtatccccatcctgaatattttactgcacaattcagcagacatcggcaggagctcttcctcatcgaagatcaggcaaccttctttccatcctcatcaagaaacagaattgtaggtagagaagacctttgggcacatcccttcaaatacgagatgtatgcttgtgtgtgcttttatacatgtgcagatgtcgtaccatttctgcaaggtgcttctgtataggatataagcatttggtgatattggggagtttgaaagtctaattagaccacataaacgtattactctccctaactctcaaactgttgtttaaaagtgagtggttgatggtatggatgtagtaaagaaagagatgttatacaatattggaaaaagcaattaattgagagctagaggactttgattttgtaagatctttgtaaaatggttttacaaacttggagtttggttttatacagtcagtgcatagtaaaggaactatcattccaaatggaaatgaaatgttttaattcctttatatatggataaaatttgagaaacctcaaaacttttttttcc

SEQ ID NO: 986 - DNA, 1210 bp, Homo sapiens
agcaatgaacagagggaaataagctgtggtgcccagactcttgaaagcattaccttcacattacgaagttcctgaaacttgtattgcttattgttgaggatggagagccgaatgcctcagtgtaaagaatccttgaatcctccagagtagtaaagattaaccaactctattaaggctgttgtgcagttctggttttgctttgtttataagcctttgcttttttaaaacagaagcaaagattcccaaatagatttgtaattgtaagactcaatgtaagataaccctaaagcattagcctataggtcaaaggctttgacattaagtgcattttgcttgggttctagttttatttattaattggacgtgtctgagccgtactttccttatctgtgaaataggattaataattacatatgtatagcttccatagagcattgcacaaaatagggctcttgataaaatctctttttgataaaatctcttttccttacgtgaaagataagagacccttgtaagtattttcgattaactataagaaaataaatactttatagtctacggccataccaccctgaacatgcccagtctcgtctgatctcggaagctaagcggggtcgggcctggttaggccttggaagggagaaaataaatgctttataaatgtttgtatttagcatgagagctgctatgtgcaaatatgtatacatttgccccaatctccatgataatatggaatattgagaatatttattgatcaaaagttatgtaagtactttccttttaaacagccatttcaatattataatttttataataaaactataaaacaaaaagaaaagaatttttttcagttagtaaaactgcagcaagttattaaacttgaaatagttccgtgaacctgagcaaatttttaactgaatataaagctaaatttttttctgattgtgataaaggttttagtataaaaccttaaatgtgttacttgaacaagtggaggtttaaaaatacttattatcatctcaccaaaaagtcacatgcacctgtatgttcatagcagcactattcactactgcaaagacatgaaatcaacctagatactcatcaacggtggactggctaagaaaatatggtccctatataccatggaataccttgcagccataagaaaccaaaatcatgtcctttgcagaaacatgggggcagctgaagg

SEQ ID NO: 987 - DNA, 1217 bp, Homo sapiens
gccttttgtgcaattttatgttcagtgatctccaaatttatttattctgttacaagtatttctctaaaataacccagagctctctcaacttactaggtgttagagctactacaaatgacttatcttcaaacatgatctctttctgattttcttaaagtgaagggctttctaaacaagacctatgtttcatgaaaatgtggttagtatgacattttaaacaaggcattttcttaaagtaacaactcctagatttttttggtagcaaagtgcttgaagattgggagaccaaaactgaattgcctgggcaagtactaaaggcagtatttggtatgttgactttaagaactgagattatgtttgaggagatatcaacttaacagcagagttaaggtagatattttcctttcatgaatctttcatgcagtacatttcttctggttaaatttggggttgaagttgccagtagagtttacctatcgtgattttttttttttctgttaatctggatttcaagagtcaagaaagggtatctgcagaaagtcatgtctgagatgagactcaaagaataagcacatgttggctaaacaaagtagaagtgaaagtgtttcaaccagaatcagaaagaaaggagacagcatacaaaaaggcccagaagtaacagaggaggagatgaggggaagagagagagagagagagacctcatcagaactgtagaagtgcagccttgagagttgaggacaaaaggaggagtgggcaacgagaggctggtgtagcaagggagacatgatgccaggcagacacacagagccagctcatggagagctacctgtatgatgagagctttggctttctcctgaaggcaataagaagattctaaataatttttagacgaggagaaacatgagtagattgcattttaaatcattcaggctgtagtgcagataatgaattgaaaaggtataaagttggaggacgagcattccaccgttttggcttggagagtgtggaggtcaagagggtggcagctcattctggggacctacctcttgaaattccaggtatatatattattatctactgtgtgaggctatcttgtgtcttggttatttaaaattgaaacaccgttaagtttatctttgtcctgcaaacgataacagaaaagcaacatgttgattttggcttattctgatacatctgcctggcatggaggaattggt

SEQ ID NO: 988 - DNA, 1220 bp, Homo sapiens
atccatggccgtgacagtgacaagcggccgtccctggggctggcacctgggagcctggccatggtaggacgcagcgctgggggcagggcctgaggctggcgcggcagtcgacagtggtaagaggcctctggcagccagcccgccaggcaccgtgaaggctgaggagcaccagccgcagaacatcaacaaattcgaacgccgacaagctcgccctgcagatgcctccgcagcccggggaggtgaggagaccaatgacctacagcagaagctggaggaggtgaggcaacctccaacccgagtccggccagtcccctccctggtgaccttgacatcacttgtcaagttcgtgggcaacatctacacgtgtcctcaaatgcaggttctgcgaggtggaattccagggccccctctctatccaggaagagtaggtgcggcacttacagcggcacatcctggagatgaacttctccaaagcggacccccagcctaaggagtcccaggtcccgcaggcacagacagtggcggcagaggcttcctaacacaaaagcattccagatcccctctcgtgccacctatgtctcctcttcttcctctgtgtcctcgtccctcttcctctttctttccatttccataggagtaagccaaaacctcaaaccagcgcccccttgggggctgggcacactacagccagggcgccgggagccagctagccgcccttcccccagcccaaagactctgggaccacagggtgtcttccttcagcctatgcccacctggtccagcaggggcagcagccaggtctcgggtggcagccgatctggtcacaggggaggacagcattcccccgtctagcagccaggcagggcgatgtctgccatcggtggccatttgcaaagaccccaaagacccctgttctggtttcctctcgcccccatgaatatcctctcaaacgcgtctacatgcgaacacacacgcacctcgtgagacctgggatctgccccggacccccagttccagggttgaacgaccacatcatgccacagtgcttgctcaggggaagccacgctccctctgtggggcccgctggagcctgggagccccccactgaccccacaatgccacggaaatccttgttggctgccccccagaggggccttcccaactgggaagagcctagagctgacagctggctcctgccatgtcaagactcccaaagagcg

SEQ ID NO: 989 - DNA, 1234 bp, Homo sapiens
atttcattttctctgacctctgctgtgcctggtaacctagcacctaggttttcctggttggtttctccagataatgaatttcttgtctcttaggaagcatgaggagaggaaggggttgtgggtgaagctgttagcggaaagggatctcaatccagaccccaagagagggttcttggaccttgtgtaaaaacaatttggggtgagtccataaagtgaaagcaagtttattaagaaagtaaaggaataaaagaatggctactccataggcagagcaacagcttgggctgcttgattgataatacttataattatttcttgagtatacgctaaactaggggtgtattatgcatgagttttctgggaaagaggtgggcaattcccagagctgagggttcatctcctttttaaaccatatagggtaacttcctgacattgccatggcatttgtaaactgtcatggccctagtgagagtgtcttttagcattcaaatgcattataaattgtgtataatgagcagtgaggaggaccagaggtcattttcatcgctatcttggttttggtcggttttggccagcttctttattgcaacctgttttatcagcaatgtctttgtgacctgtatcttgtgctgacctcctgtctcatcctgtgacttacaatgcctaacctcctgtgtttcagccttattgtacccagcccctattcaagatggagtcgctgtggttcgaacacctctgagaaaactaatccttatgcagaattccaaccattactgctttttctatcccatctcttctgtcttctggagaagctggccactacttcagctcccttggactattaggtttccacttatgttctgttccatctttgagcacttgttgacatctctcatctttgttcttgggaatttatacctttttatatttctttaagcttaagtggagttttgggagtgaatattaattttaaaatgagagaaagataaataatgcatggtagttgaagtgtcatgcggagaacactaaacttgagatcaagtgacctcagatcagtcttaactctttgtgacttgtagtgcagcactaggtaagtggcctggctttttaaagcctttgtttcttatttccatgatagaggcaatattacccatcatattaggttgtattgaggctcataagagaggatgtatatgaaaaggtttgccaaatgttcttaatgtaattttttaaa

SEQ ID NO: 990 - DNA, 1219 bp, Homo sapiens
gggtctgtatccttatattcacattctacattttgattaaactttaatacacaatcctgtgaggtgtgtacttattttagagatgagtaaactgaggcacaaagtgaacaagtaactggcatatggtctccgcttggccacagtgctatcctaagccccatttctaattgatcactatgtcctacttacactactttatagatggttttctaatccatacccttttttttttcaattcccattgccatttcttagaactttgctacaatcacctaattggtttgtctctaatttttcacccctcctaaatcatcctccacctgctacaacattgacctttctagggtgcacagttattattaatctctagtttatcatctttcaatggtcctaatttctcttagaatctaagtctgagttttgggtcctccatcatgtggcatctcatcttttgtctcctactttccctatttgttactttataagtgaattgaattacttgcagttaccagaatttccactgtaggcagtatggatagaaaaataataataatgaaggagccaggtagtgtattaggtatttatgtatgttatgaacctattcaatctttggaacaaccctatgtggtttctactactgtaattaccattttacacacaaggcacaaagtggcttacaaactgaggcaaagaagattaagtaacttgcccaatttcacacaacttagatttaaatccaagtagtcttggctccagagtgtatgctctttgccaacatgcttggaaaagcaagtagggtatgctgatgaagtgagaatgtatttaaagaaagaccagctctctacccaatcaggtgcctaaggagggcatagtctggtctacatccttgcaggtccagaaatctgatctcaatgctattcctgcccacattcacaatgacctgatttatgaagccagaatgccaatttactaagttacaatgagatctacaactctccgttgaactagatcgaccatagaaacacatcgtccttttgtaagtgcagtattagaggaggataaataagtatataattctcatatgctttatgcttcaagctctgatagcttacttcatccatctgcactactagaatatacctttgaggtggacagggtactttcgtttgcctaacagcctcctccccttaccactctgagagacaaggcttggatgggc

SEQ ID NO: 991 - DNA, 1253 bp, Homo sapiens
taattttaaggcagcattcaccgcattgcccttttgtgaaccaaaatgcttatctcaaatagcttctcaactgattaacaaatgattacccttttgccaaggtaatgtctgtaacttttctagtagctgtggttatgtgtgtacttgagagcaatactattgttcatttctttcaaaaaaatgaaatctgccaagtcagattgatttcttctccccagcaaccacacccccaccaaaccctttgggttatattatcaaaaagatttttgctgtatgctggaagtccagcagggtgcagactacatgagagaaattctgaaggtgatccatgggggctgtagtgtgtctaaggagccactggacctcatggaggaaaacctgtggctcttgtgggattgccaagatggatgaggtgagggaggggtcttcaacattatttgaaatagttgttgaatacagtatttccgttttagtttttcagaaagaggacagaatttgagattgtgctttgtcattcgtagtcagttttataatagagcaatcctcaacaggctgctgagcttcgtgcttatctgaaatctaaaggagctgagatttcagaagagaactcggaaggtggacttcatgttgatttagctcaaattattgaagcctgtgatgtgtgtctgaaggaggatgataaaggtttgtttttaatttttttctaatatttcctaataaaatcttttaaatttttcttgtgaattatagagtcgtccctcattatctgaggcaaggaggatttggaaccctcagatacagaaggctgactgtatttatatgttttgaatttcagactacaggacttttaaatagataggtagtggttgtatgtattttgggggcacaggtgatattttgatacatgtatgcaatgtgtaattatcaaatcagggtaattggaatatcacacatcttttctttatgttggaaacattcaacagttctcttctagctctttcaactatacaatacattgttaaccagagtctaagcactgttgttttcaatcttaccttcacacatgctttcagtttgtgtaatctattatacctataaagtaaacctattttgagaaaacctttattttatacataggtgtatttcttaagtgttattacactaaatgcttatagtcttagaataaaatgaaaaaaatgaagctctttcctgttcataagtttcagattaacatcaaatgggatacagtttca

SEQ ID NO: 992 - DNA, 1383 bp, Homo sapiens
tgttgctgccaccagctttgctggtgaatttcaaagagaataggtgtttgctgtttgatttctagtgaccttttggcgagctctgatttataggtagaacatttgtgtttcttttcattttgaggccaggtggtagagtggaaagactgggagctgtcaggaaaccaaggcttggatctccactctgttatgtaccagctggggcaaatcagggcccattcccaactcctttaaaatgaaaggactagacttggtctttaagctcccttccgattctaacatttggtggtagcaggattgtgcacaaagctcctaatttagagaaagatctgggttttagtcttttctcctctatcgccgccttaccggttgtacaacattggaccagccattctccccaaggcctcggcattttcattgttaaatgggaacactcctaattcacactgttgctgtgaggattacatttggtaatgaatgatagaatgctttgtacatggaaaaggactatacctttcttttttaactacaaaggcgaacatgtaaccctctacctgtgggcgcacatttgctgtggtgttacgttccactggtagcgcccaacctcccttcattcaagcacattttacgggcctacagggaaggttttcttcctgtcctctcctaagacttgtttatgttcatcatctcttctatactagagctgcagtcttacatttgcttacttcctgacatccacccccaccccagtgatttctccccatctccacctctatattatttgaactaaatgaattcatgaatgaacaaatgagtggatgaatgaatggtaatggataatgggctatgaagtcatatttaaaggcactatctcatttaaaaacaatctaaataaataactacaatgatatttgcaagtgtgtatttatattggattttgcattatataattattttaatggaaagcctttttagtcatagtattcaaagcaacttcaatgggtggggaaggggataatctttaagcccaggtaagctctgtttattaaacgatcaagtgttcactggtactttcagaaatagccagagttctacaaaatatgtgttaaaagtctaaacatataattctacttaaaactgtccctcatgtgggtttctgtcacacctgacttacatttattgcctaccgaacttaagaaccagaactaagctataggcctggttcgatggagtgtcacttttcttgacttaaaagtaaccttaaaacaagaggggctgggcaaggtggctcacgcctgtaatctcagaactttgggaggccgaggcaggcagatcatttgaggccaggaactctagaccggcctgggcaacatggcaaaacct

SEQ ID NO: 993 - DNA, 1515 bp, Homo sapiens
tttttgaagactggaattagtaaaaatgataataaaagttttaatgtgtcaataacaattggcaccaagtagtcattttcaggttattaatataaattaatgatatggaaggggtaagatgtaaataactgatatccacattaagctgaaaattatacgcatttctttttgtaacttatgcagtactcttatttttaatattaattttgtgatatagattttcagcataatcaagtacactgcagcctcaacataacattttctgctgtacctgaaatttgataatatttaggtctgttttggacctattcaaagggctttggtcatcagcagtactgaatatacttcagcacaacacagtgtcatctgtgatatgtcctcagaatggacccaaccaatagcagatttaaatagaggctacagtgtactcattgtatttgtgctatagtttagattgtattacttggtggggagggaaattactggataatagcaggaacattgtgtgtgttttatttttgtgtgtgtggttgtgtatgtggtatgtatgtttgtgtgtttgtatgtatgagagagattgtgccttatgtggagtctggtagttttggcccatgaccataccttaaagtttcatcacctatcctctgggaccatttctttccttaatatatttaaatcaccaaagtagcttggcacaaaacaggtgaggcctgtctgaaatatgctgaagcccgtgctgctttgtattaactcattaaaacaaggaacctggatcacctgcacctgatctgcattctagtctggctttagaaacacattagacttaaattcaaacgcaccagaaatgaaaataattgatatataattgtttttgtatagtgaagtagaactttctgagtttttgaaatttccttgtttctcaattattcaggcattattcatgcattttattatagcgtaagttaaactgaaataggcagttagatactccattctgtaactctgaacacaatgggtttgtttctccaatttcctagctgtaagttacaaactgcatcctaaaaaaaagtttcaggaagaccagatgttattccaaggggctgaaagttgtctacataacaggctcaattcatataatgaaatgaagagctgctagcagttgcctgatttatttagttggtaatatttgcagttacttcacacacacaaacatacacacgcgcacaaataggtatatataacatgtattaagaacaaatggtaaataatatatatgtatattttttaaaatttatatttttggtttaggaattaaggttttaaattgaatgctggttttagaaatgcatatcctgagctgtgtttttctctttcctggtttgctgtttattttttattttcacattctatatttttgtttagcctgtgagaggctaaagttttctttgatcatatcactcaatgtggccattaatatttctggagaagacacaaacctatttataatacttttta

SEQ ID NO: 994 - DNA, 1307 bp, Homo sapiens
aacacagttatttgtgaaggtttttctttgccttgttttgaaggtggcctgagaatggagcttctctttttcttgggataatagatacatcaacttttacaagaaaatctctgtctcttcaacaatgatgtccagtgtgtgctgctgagtggtacaaaaggaaatagtacttgattcctgttagaaacaggagtggtagaaccacagtcttcccaggccgcagcctctgtttatagaagcttctgaatgtagaaaagctgttgaatttcatttaaatgtaaataaccttttaaaaagcgtatggagttagccagttccccctagttaatggacataggaagacatttgctgaaatggtagggtggccactttgtgaccatgatgttgcaagttgccctccctggcatggtgagttggcttccagagctgtgggtagaggacatcgcctcacggcactgaggcaccagccgctgcctacccatcaatgcaagcaaaacagctactgactttgtgtagcagggagattggggactctggttccctcgccaagtgtggcagcctgtgcagtgttgggggcttacttggtatctgttggagaatgaggtcctgtcctgctttcacccatgacccatctagcttcagctgtatccattttcttctgagcccatcttccattgtcctcaacgagtttctttggtctttactgaaagaagatagtagaaatttaaaagttgagagaagactagaaatggaactgattagaaggggaggttcaaactgtcaatgcacagacttttcaaagaagttgtttatattttccaatggcaaactgccctttctggaatgttcagagatgatgtgtcatggaaccttcaaacaagtctcttgttcggatgataataggtagtgtccttttagtatgctggttgatctttcatagtgttagtgttttgttacttaaaaaggaaatcagctataaataaaatgtatttttgtaattcccgtgtgtatatatggtatatttctatcaatggccagttgttgtagtccaaaacctaaatcagtttgcaaaacactgtggacagtgcgagattttattgacaggttaacacaatgcctacgtctatccacataggcattcaatgcacttgaatgaacaaagagccaaagaaactcagcctgttcatgcaaatggtatgagtctgataaaatcagctacattgtcctgctttatcaataataatatttcattagtgcaatgatatcaaccagtactttgtctacttggtaaatgcctggaaatactg

SEQ ID NO: 995 - DNA, 1212 bp, Homo sapiens
cggtgcagcgggacagggcgaagcggcctgcgcccacggagcgcgcgacactgcccggaagggaccaccacccttgccccctcagctgcccactcgtgatttccagcggcctccgcgcgcgcacggtgagcgccacccgggaccgagccgctgcaggggaagagggccgctgcgcccgggtgtcctttatctccggacccgctggagcttccgaggggcttgcccccaagtccccccaccccaccccggtcatttcccatgcccttctctgcccccaagccccgacctctctctttcctcccttctccggaagccggcaaaagccggccctccccggtagggaccgttgcagtggccgttggcggccggcgcggcgatgccccgcctccggcgcgagcctcggagcccccgggctggtaggccgagccggcggctccgcgggggaggggcgggtcggggggcggtgcgaggcccagccgggcgccccgctggcgggtcgcgcgcgcgcccgcgcactcttcctgccctcgaggcgcgccgcgccccctcccccacccgctcgcgtaggctaccgctcgctgcgcgttttgtcccgcgtctcgccccgtccgtctcctgactggccgctcttgtccttcctcccgctttttcttctctctccttgcggtctgaagatgccctcggccaccagccacagcgggagcggcagcaagtcgtccggaccgccaccgccgtcgggttcctccgggagtgaggcggccgcgggagccggggccgccgcgccggcttctcagcaccccgcaaccggcaccggcgctgtccagaccgaggccatgaagcagattctcggggtgatcgacaagaaacttcggaacctggagaagaaaaaggtgccaggagttggcggggaagggaggggtggctgcggccgggctctgcggcccctccgaccctggtcgctggagccttcgcttcttttcgtctcgggagcgttactaggtcccctcctcccaccccctggcccacacgccccgtctccacgttcagcgggagcttcgtgcccagaaaacgggctcttggaagaggcacttgtcacctgactcggacgcggcactgtaccccaggcctctttattactcttccgctgtgggtccggctttttggcctttaggagtgggacatgtgagggtgggggcctgtcgtcaggacttc

SEQ ID NO: 996 - DNA, 1116 bp, Homo sapiens
atatttaaaagaataagaaaacttctaccactaaggagctttataatgaaaagaagtaattaaatggtacaaaatggtaatgtactaagagtaaatcttttgagttattttgggtctcttgtgctaaaaagtagatgcctttcagaagacgttaatatagcctttcaaataatttgtttggaaggatcaatcatgcaccctgctttcaaaggtttggaattgtggttggagaattttacccccaatagctgagtctaagggtaggagaaaggtaagagactttattcatgtgtagtttttcttatcattgtatgcaaatttaaggattaaactttaaggagactgtataagacacttcttaaactagaaagtgcgtgggagaacaaacggtaatgagctgtttatgtatatatctttttcttttttaaattatagtggttggcacttaccatggttccccagaccagtcccatcaagtgactggtaaccaccagcagcctcctcagcagaacactggatttccacgtagcaatcagccctattacaatagtcgtggtgtgtctcgtggaggctcccgtggtgctagaggcttgatgaatggataccggggccctgccaatggattcagaggtaaaaaaataaaaaaggaggttctaatgaccttttactagttcaaattattttttgatttgtaaaatatatcacacagtttttgggaaggatgtatctgcattagcctcctatgtgcaatttaaacaatgtatattttggtacaatttgtgtatttggtataatttgttatttaaataacagatcatggaatttttgttcatttggttatgtcaaattaatgtctaccactatctcctggaggataagtattttccacattaccaaaacttacggggattgtttattatatttgtacagatgtgtgtttacatgcatagatgggttaaaagtttatcttctgaggggcagttagtacttacagaaatttataaacagattggatcaagataggaaattggagattaatttgattaactagcctggcttataatttctagttcttcccgtcttcattaataaaaaagtaaaaattccttgtgaaga

SEQ ID NO: 997 - DNA, 1538 bp, Homo sapiens
tgtcagctttctattacctggatatggaaggaaactatttttactctgcatgttctgtcctaagcgtcatcttgagccttgcacatgatactcagattcctcacccttgcttaggagtaaaacaatatactttacagggtgataataatctccatagttatttgaagtggcttgaaaaaggcaagattgacttttatgacattggataaaatctacaaatcagccctcgagttattcaatgataactgacaaactaaattatttccctagaaaggaagatgaaaggagtggagtgtggtttggcagaacaactgcatttcacagcttttccagttaaattggagcactgaacgttcagatgcataccaaattatgcatgggtcctaatcacacatataaggctggctaccagctttgacacagcactgttcatctggccaaacaactgtggttaaaaacacatgtaaaatgctttttaacagctgatactgtataagacaaagccaagatgcaaaattaggctttgattggcactttttgaaaaatatgcaacaaatatgggatgtaatccggatggccgcttctgtacttaatgtgaaatatttagatacctttttgaacacttaacagtttctttgagacaatgacttttgtaaggattggtactatctatcattccttatgacatgtacattgtctgtcactaatccttggattttgctgtattgtcacctaaattggtacaggtactgatgaaaatctctagtggataatcataacactctcggtcacatgtttttccttcagcttgaaagcttttttttaaaaggaaaagataccaaatgcctgctgctaccacccttttcaattgctatcttttgaaaggcaccagtatgtgttttagattgatttccctgtttcagggaaatcacggacagtagtttcagttctgatggtataagcaaaacaaataaaacgtttataaaagttgtatcttgaaacactggtgttcaacagctagcagcttatgtgattcaccccatgccacgttagtgtcacaaattttatggtttatctccagcaacatttctctagtacttgcacttattatcttttgtctaatttaaccttaactgaattctccgtttctcctggaggcatttatattcagtgataattccttcccttagatgcatagggagagtctctaaatttgatggaaatggacacttgagtagtgacttagccttatgtactctgttggaatttgtgctagcagtttgagcactagttctgtgtgcctaggaagttaatgctgcttattgtctcattctgacttcatggagaattaatcccacctttaagcaaaggctactaagttaatggtattttctgtgcagaaattaaattttattttcagcatttagcccaggaattcttccagtaggtgctcagctatttaaaaacaaaactattctcaaacattcatcattagacaactggagtttttgctggttttgtaacctaccaaaatggat

SEQ ID NO: 998 - DNA, 1174 bp, Homo sapiens
aattctcagagatgctgacattttaattcttagttaatgtgtttccagagcattgataataaagatttcaagcatattaaatgcttaatattgtggaaccaccttatagctaattgtcttctgaattggagtccctaaggtgcagctgaattctgctgataataataaaatgtgataggtcatcaatggcttagctaataactcaggtgtcggtctttttccggactccagtgttatgaagggaaggaattttcttgtcacttgacaaagataaacttcatgaacatattgcaaaaatacatacacagtcatttgtagttagtgacttgaggcccacagtttcctttctttctttatttttattattatttttttgacacaaagtctcactctgtcacccaggttggagtgcagtgctgcgatctcagctcactgcagcctcctccttccaggttcaagcaattcttctgcctcagcctctcagttagctgagattataggcaggcaccaccacacctggctaattttcatatttttagtagagacagggtttcaccatgttggccaggctggtctcgaactcctgacctcaagcgatctgcccgccgtggcctcccaaagtgctgggattacaggcatgagccaccatgcccggcccatggtttgctttctaaaagtaagctgaggagagtcaggcccatgatggaaaaattaaacaagaaaactaaacttggaagcctggacatacaaggttagagttgaggagacattaaactggacctcaaagaggttgaaatgggcctctcagtgcacgaaaaccctccctacagttgaggccaagcttttattgaaacctttacaactttttttagtctgtacattttaaaatatgaaaattagtatttgctgtgaggagagctattaataaacacaagcctgaggctcacacaccaagtgggtgtacgtgcacaagcatccggaacaatccagtacagagctatgaggatttggatccagaaaattctggggtggagcttgccccgtctgtgacctggcatgaatcattccatctcttggatctctgtttccttatctgtggtgtggagaggtcagactagattccccaagggcttttctgtctctgatagtgtttctagaccccacatggacactg

SEQ ID NO: 999 - DNA, 1198 bp, Homo sapiens
gatgagaagagcaaggcttggggacattatgtaatttttccaaaccctagttcattaagtggaagaatgaatatatttaaccctttatcccttccacccaccaacaaatatttattgaacacctactatacgcttgctctggacactggggaaccaaatgattatctgaacccatatctatctgatcctgaaggccattctttttccattagagtctagtgaataaactcatttaaataatttcatagaaaattatattactctatgattagacaagatattaaagagatttttatggggtggtgagactatgggaacacataaaaataggcatgaaagactgaataatgctagatttagacacttggcagggaagacccaagccattttgcttgataggtacttaaccccagaaacaacaaaaataataacaaaattttacagtcacattttctgattatagaactttggaaaaaattataaagaagcaaaatttatttttaatgttataagccagagataataactgtaattattttaaagtatgttctagtttctcccccaacccttggctgcttcatatttagctggctttgaactttgtgaatctgtaggttgatgtctttcaccagtatgggaaaaattttagctattatttctttgcatattatttgtactccattttctgtcccttctctttcttggatgccaattacatttattttttagccttctcactctatcccctatgtcccttattttttcccatgtattttaaatctttttgtctctttttgcttcattctgagtttttttaagccatcttttagtttactaatactcttcagtggtatctgatttgctattaaacttatctactgagctttaaattcctgccattatacttttcagttccatgtgtttcctttgtttatttttttaaggtttccagtcttctgctcaatcttgttttatttcctcgaacatattcagcatagttatttttgagtagtgttagataacaacattatctgtattctttataaatgtgtttctattgtctgtatttctcttgattttcagtcttgccttctgtcttagtcagtttgggctgctacaagagaataccatagactgggtgacttaaacaacaaacatttatttctcacagttctggaggctgggaagtccaagatca

SEQ ID NO: 1000 - DNA, 1274 bp, Homo sapiens
cattgactgttaatccccattctctttcccactccaggcaaccactaatctactttctgtctctgtaaaattgcctttcctggaaattttgtatatacagaatcttacaatatgtgatcttttgtgtctggcttagttcactgcatcatgtttttgaggtccatccatgcagtagcatgtatcagtatttattaactttttatggctgaataatattcctttgggtggatgtaccacgttttgtttatccgttcatcggttggtggacatttgggcggtttccactttttggctattgtgaatagggctactgtgaacattcgcatgcaagttctggggctgatgttgaaacacaaagattagccaaactggtaaccttctctcttttctctcctctcttgggtttctcagaacccggcagtgggcaggtgtttgtgacttcagagaaccaacttgtgtattaccccagcatcacctatgccatcatcggcagctccgtcatttttgtgctggtggtggccctgctggcactggtcttgcaccaccagcggaagcggaacaacctcatgacgctgcccgtgcaccggctgcagcaccctgtgctgctgtcccgcctggtggtcctggaccacccccaccactgcaacgtcacctacaacgtcaataatggcatccagtatgtggccagccaggcggagcagaatgcgtcggaagtaggctccccaccctcctactccgaggccttgctggaccagaggtgtgtgctggatggaagagattgaggcgggagaggtcatccattgcggggaggggaataggtgcacacactgaggttcttaggtcttgccaagagcctggcttcagctgctataggcagtggcagcatctgacatttgccgagtcctcgcaaaattctctacatgtatcacctcatttaatcctcttagcacctcgctgagggaggaaactgataggaatgttccaaaactggattatggtgatagttgcacaaatcaggaaatttccaaattctacagatgaggaaactgaggctctgggatgttaaatgacttgtctgaggaacatacagttaggatcctggcctgctcctcctgggaatgtcacgctggtccatgttctggccacagactagctctgagcctcacctgctactgcagagcagtgcccagtacatgtgagaggtttggttaatatctgtcaaatgaatggataaatgaagaagtgaatgaatgagagaatcagtgagttcctta

SEQ ID NO: 1001 - DNA, 1178 bp, Homo sapiens
ctgacatgacaaatttttgaaaagtcatttggacaaaactggcactgaatcaagcaaaaattcaaaatagttctgcctctattaagggaatagaatttgttatccaagtatattcacaacaaaaaaagtcaaagctcaaatggtttcacaggttaattttaagaattgtttaagaaagaaataacaaccatcttagacagctacatcttatataatacttaggaggaaagagacttttagtagtgacaaggtttcatggaggtatctcaagaccaagacctaaagttgattatgattgaagttccattgtccttctactgaacactgaaggaagtatctttttatacaatcataacagaaaagccaaaaagataaataatatggtgccataatgcttacattattatggataagtaatatataatctaaaagtatattagcactgtatattctatttatagatttaaaataactacacactacatatgctaatacatatgatatatatttatatcatatatgctacttcgtatttgttttaacttaccattgtaaactatgactttcctgactcttgtatggtattaagttagagaaaaagtgatcatagtttttgccatttactgttttgccattaacagtaatggcaaaaactgcaattacttttgcaccaacctaataaataggtgatgattaatgcataatattctatcctatgctttaagttgtccattattattgaatatttagcttgttttattctctttaataatgtcagtaatgtatcttttttcatgtttatgactatttgacatatttaaatttcaaaagtgaaaatacataagcaaaacatactaagagctttatgactatttattgccaaatgacttttcaaaaataatggtttaataccatttctacaaacacatttttaatccagttcatttgctgaatattatttactattctttattttctaattccaagtttatattattgtgttcatcctttaaattatttttataaaagcgatattttacctaaattaaaaagccagtgtgattacccagaattagatgacctcattgatgaatcaacaagtatcaaaaatggaaacatatcttctcattgaaagcatattcctctatttacatgcctttgagatttgccagctcttg

SEQ ID NO: 1002 - DNA, 1145 bp, Homo sapiens
aagcaacagaatgggtaagtttgccaacttaattctcacaaaattgtagcccatgcctttcaggggatcctaatatgcaaagtgggaagtttctgttggatatgtggcactacttggctatgcactccaggacagccttcacattggaattttattgggaggaagcatttcatgttacttatgtattgctggctcttctggaaggcaggaggaaatgggatgggtgtgaagccactgtcagagcctgcagacttggaactgtccagttcagacatctttcttttcggtttcttctatacattcttcgagactaggttattttgttcatttcactaaccattttttatttaggtctttaagaattaaactcaaggagagaacttaacctgagcacagtacttggttattcttaaactagtattcacaaatcattgacagatttgatcactggtctcatttgtccctaacatgtttctgtttcccagattacattccaggtcaaacgtgtaaagaaacccaaaggagatcataagaaaactcctgggaaaaaagtagaaacaggtcagatagaaaatggacatcgttaccaagcaaacctagagatcactggccccaaggtggcatctcctgggccacaaggtaaatttgaatgtttaatatgccagtttcttgttttagatgtcactatctcatttctcacaaaggttgtatttgtaacttgaaatagttcagatgagatgataaaggggcaaagtgtggtcaagaaaccagtctatcttctgtatcaatgaaaaaaatgttcaaactctaaaacattatggaaatgcaaattccagtggatttaacattatgtgtaataaatcataaaggaagaaaaattaggtgaatatttacatgctctttccatgtggaaagaactttctaaggcagagagagggaaagaaaataataattctgacactggaaagtaccacaaaataagacaaaggactgaagcaaagtttttttgtagattatttttgtatatatttacagaatatatgataagcagagggtatcaatatcatttaaagagcacctacaaatcaatatgaaacatacagtatttcagtaaaatacgtgcagcgtacataggcagttcacca

SEQ ID NO: 1003 - DNA, 1287 bp, Homo sapiens
gggttcggatgttggccaggctggtctcggactcctaagctcaagcgattcgcccgcctcggcctcccaaagtgctgggattacaggtgttagccaccgcgccctgcctacgcccacttcttactataatctttccattcactagcggcttctctgatcccatttcctcttcgaacctgagctcaaaccagcctgggtctgaccggccaatccgagcgcagtcttccgcagtcgcgagtacggctgcagccaatgagagaccggggcgcctcggtggggtgagacagggcgctcactggcggaaccccgggggacgcggtgatgggaggagtgtgggaggggcagtggaactggagtcagctaatggctgacgcactacgcgcagagggaaagacgggtcaccaatagcgacacggatatggccccgcgggcggggtttaggcccaaagtggtgtcggagcagcgcctattagtgtcatcctcaccgtcacggccggcgcctcctcctggattcattcactcgctcttttcattcacgaaggtagtgaggcctagtggaaagccatggagagcgctctccccgccgccggcttcctgtactgggtcggcgcgggcaccgtggcctacctagccctgcgtatttcgtactcgctcttcacggccctccgggtctggggagtggggaatgaggcgggggtcggcccggggctcggagaatgggcaggtgagtcggatgcagcgccgcgtcctcgctcccgcggcggcccggaccaggcctgggccgtgatgactagttctggggtctgctcctggccttcccctccccagctctcctctttctcaggctcctgtgccccgcgggcccctcctggctcccttggctgtcttctgcttgcttagactacttgcagagttttaaggtacgaaatacactgctcgctcaatcctgggaatctaagctcagcttagggtgtaggagaaaactgccttaagtctctggggcttgtgccctttaagccattccgtgttcatggagccagtcagtcgccctgctgcctcctcagtcacacgctgtcctccttggttcgccccttgtaagtgtttttaaaataaagtttttcgctcggtttgaatattggccctgtgctaaggatgcagagcattctgttaacatgtttgggcagaggatggaaaggggtgtagggacacaatttcagaaggctttttgcactgcggaatcgtacctccccagttacgattaagatagtaatcgtatctggatttggc

SEQ ID NO: 1004 - DNA, 1207 bp, Homo sapiens
agtttcttatctctctgcttccaccttggctctcctgcagttgattctcacacagcagccacagtgatccttgacaagctttggtcagattatgtgatgctctgcctagatctctctagtggtttctcacccactcagattaaaactcagtatttgtctcgtggctttgaataaggctttattttattttattctattttatatttatgtttatttttattttttgaagctgggtcctgctctgtcacccaggctggagggctgtggtgtgatctcagctcactgcagcctctgcctctcaggttcaagtgattctcctgcctcagccccccaagtagctgggactacaggcgagtgccaccacaccctgataatttttttgtatttttattagagacggggtttcaccatactgaccaggctggttttgaactcctgacctcaggtgatccacctgcctcagcctcccaaagtgctgggattacaggtgtgagccaccgcacccggcctgaacaaggctttaaaccacctgcttcctgcttccattgacctctgacctcatctccactactcttactccgttccacccacatacacctcttgctgttccttgaacaaccttggcattgttgctttggggcctttgctttttcctcttcacggaatgctcttcccccagatatccatgtgactgacccttcttactctccttcaagtctttgcagaaatatcaccttttcaatggaaccgcccctcctacctataaactcacagtcgtttctccctcactcccactcctatccattaccctgccccacttttcctttttgtcatagcacttgtcaccatctcccctactgtatactttgctcatttatgatgtttctgttagaatgtgagcactgtaaggcaaggatctttgtcttttaatctcaagcacctagaacaatgtctgtacacagtaagtgccaatgtacctttgttgaattaatggaaatatctgttaagtaaggtattcatacatatatatatatatatatatatatatatatatatatatatatatttttttttttttttttctgagacagggtctcactatattgcccaggctggcctcaaactcctgggctcaagcaatcctcctgccttagcctcctgagttgctgggactataggcatgtgtcccagctgtgtctggcttcca

SEQ ID NO: 1005 - DNA, 1160 bp, Homo sapiens
acttttttccttgaggttctggtgtatttcaattggggggtcagatgttttgctttagttttctattttttgttctactttgcaaaataatttgtgaactgttttttctccttcttctgaaacctcaagtgctatacatctaaaaatgctagattgaaaataaaccaaggctggttagacaaagctggttacagagttatgatagcagggctgtcatactagttttgaaaatgtatagtgcactgagatcaaaaagatgtccttgaatagtattggtaacaggctaacctttcttcatctgtggtatcaggaaattacagggagttacagggaactgaacactctgccatatttaataaacattaaatataaatttggtagtatatttattattctttcccaaatctttacaaaattgttgtgagtagattttcctttagtaagaaagatttctccaattaaagttttagtaacaccttgctaattggtaaggcttattggtaagactaattcgtgaaaaattaaattctagagtgtgttgaccaaaatgtagtttttaattttgaaattgtgataaaataagtccataccttctggaactaccattctttttgaattgttgaagactctggaccaaattccctggaaaatctctttgatagtaaatacattgaatagtaagcatatagaaccagaaactgctataaagttaaccatagagcattgagtatatagtttatttgcttcatggaaataaatgaatactacagttggttgacaatttttacacaagtttagtcagccattttgtgaaaaaacttgagaaaatgaaaaaaatcaggaggcagaagagaatcatgatagaatagcagaactggaagggatgttagcaacctcttcacttcaattattagggaaatacatgctggaaaaggtaatgacttgcccaagattatgcatccagttagagaatggccaggccagacagttcagtggcaaagggcagaagtggtggatgcatctgtggtagattgattaaaagcaacgataggagcgatgagcagcaggctctgacagcaaagtggaagagatttgtctgggttgaattagaggaaagtggtgaggaggaaaagcagaggtgatttagtgatagtgatgag

SEQ ID NO: 1006 - DNA, 1199 bp, Homo sapiens
tggttacataaatgtacacatgtattagaattcatagaactgtatgacaacgacaaaaagtcagtacaaacaatgaggatcagagaggtgaagttgcccaaggacccaccccttgtcattggccacactgggatctgaaccttggtctgtgggactacagagcatcactctggaactttagaactagataaacattgggttcgattctttatcctgggggactttgcgctgagggggtgtgggacctggagctgtcagggctgagtgtctgggtttaaggtgctttacattgaacactgcatttccatcccttcttgacctccccttcgtaatccttcccaccacagcagccagctagaggagggactcaacagcatcctggcagcttgtggcctttttctttacagcatttagactagtgggaccaagtagagggttgatgggatattgatcttctggcctctttcacccaaacagactggatcaaccaggtgtacctgccggaaaaccatgcccggctcaaggctgcccacacctatgtctcagaagagcttagggcattggggatccccttcttgagtcgtggggctggcttcttcatctgggttgacttgagaaaggtaatgctggtggaggtgcgggctgagagggagtttcaggtctccctccagcaggtgaggggcagttggtgaggggtctcagctatgtcctgagccccttccaccctctcagtacctgcccaagggcacctttgaggaggaaatgctgctctggcgccgctttttggacaacaaggtgctgctgtcctttggcaaggccttcgagtgtaaagagcctggttggtttcgctttgtcttctcagaccaggtccaccggctttgcctgggtgagcagcctgcctttccagcccagtcctaactgcagccttcactgtggcctccgcttgtttgtccccacccacgtggccatcagtgccaactggcccctcacttccccttcccagggatgcagagggtccagcaggtgcttgcaggcaaatcccaagtggcagaagacccccgtccctctcagagccaggagccaagtgaccaacgcaggtgagctggtcattgtctcgtggccagagggcccagcagccactgtggacctggggcgttctggggctgcagaagactgactgtggatgtgccatttgccag

SEQ ID NO: 1007 - DNA, 1211 bp, Homo sapiens
tttcaaaggcattgaattcatgaaatgagtatcttctatataaaaagcacactgttagatgctatggggggtagaaacatgaaaagagatttgataccttccctttagggggtcttgtagaaagcctgaaattcccagacaaaataattccattacaaggtaggctgaggtaagtactgtaagagatgtcagacagtgtgccgtggtgtgtttacatagtacactagggcctaaagagacccatttgcaggaagtcacgttgttagctgtctaagggaagactttgacattgaccttgaacattttcagaaggccaacagtggtggcattgaagcaatactgaagagtagaaatattaatacaaaacattgcagccatttaaacttttcaagttttacaggtgtgagctgttgtcttttggcatttttgtgtcaagatgcctcagtattgcttggcgtcaacccttgtagaaactttgtggtctgtagggatcaaagttagtggatcagcaaaactagtttgtaatctcttgcctctttgtgttcctgcaggaggctactttctgtgtggttcttcgtggagctcggctgggccaggcagtattgagcgatgtgttacaagctggctgtgtcccggttgtcattgcagactcctatattttgcctttctctgaagttcttgactggaagaggtgggtagtacctcctagtaaactctacattagtggttctgcgtatattacaaataaaatctcctcaggtcattgtaatgtataccctggttcaagaactactacagatagtttttctctattttccattaggagagttagtacactggtctagagcagttcacaaaccaaggccagtttgcaggctggctgtttttgtaagtcaagttttattgaaacacagccgtgtcccttcctttacgtatagtctggctgttattgtgtcacattggtagagttaagtaattgcaacagaaattggatgacatacagggcttaaaatatcactatctggcctttcatcacaggggtccccaactcccgggctgtggcctgtttggagccgggctgcacagcaggaggtgaccagcgggccagtgaacattaccatctgagcctcgcctcctgtcagatcagtggtggcattaaattatcatagaagcgtggaccctactgtgaattgtgcatacaagggatctag

SEQ ID NO: 1008 - DNA, 1150 bp, Homo sapiens
ctgggcgtggtgacgcatgcctgtagtcccagctactcaggaggctgaggcaggagaattgcttgaacctgggaggcagaggttgcagtgagctgagatcgtgccactgcactccagcctgggcaacagagtgagactctgtctcaaaaaagaaaaaaaaaactgtgcctggcacatggcaagctctggatacatactcaggcccagtgtagggaagtgctttgcctaaggacaaccctgctatgtcagggagctggatttgaacccaacactcgtttctaaagtcttcctggtccatgactccaccacataaaggaagccaggtaggggctggtgagaagggctggccccaggggaatgtcaggaatccttaggggaggagtgtgctaagagtgacaggcattcactccccttcccctggagtgggccaggcagcccacaaagggcccagcctgataagccagttcctgctctttttctttttttgcagcttttcgccatgatctttgccatgtgcctcttccggggcatccagtagagggtatggcctgaagcctgaagactcgccccacccaccactgcccagcacccagtgtcctcccgtgcccctccccgctgtcctcttggccccaggggagaagatgaggccatcagagatggccaggagaagggccaggggaatagagctatttttttaacaaaacaaaatgaagacaaaaatatggactgatgtatcctcgcctggactcagggcaggtgccgtgggttctccagagaccccagcaactggcccaggatgcaggctgctctagagaccaaaggaacaccaggcccagcgccctctttggtccagccagaccctgggccctctctcctcactgcaccaggacctgatgccaagaaagtgaggatttaggcaacaaggaggcaaaagcaaatctcagagaagtcatcaaagcccaggggctgcacggagattcagctgccatgtctttgaggactcggaacccacagcgcaatccctggtccactggaggatggactgttccccccttcaggccggggccaagagtgagctgctaacacggcatccaagaatggcccagctggtaggatccttgctttccccatctgttggaccaaataatct

SEQ ID NO: 1009 - DNA, 1210 bp, Homo sapiens
cgttagtccctgatcccaaccttctccctcctgccagcacaccgatgcacacaccggaagtggcgagcccaagccctggggacaggtgtagggagaaaagcagccccaggcctcagactcgcttcccatcctggcatagagtgggggatggctggagggtgtctataggtacagcccgctctggctgctgccaggtgggcccctgccaggggtcctcacccctgtccaccctgtgcctggctgtccctgcacccagatacagcaacatggcctgtacccagcagagtggtggcaccaccatggttacagcggatgccccgagactctgcttggtaaacgtggcagagcagaatgggaggctggaccctgaggaagggcccctctcctggcatctgtctcttgctacctaagcctgtgcctctccctaaagagctgcctccctgctgccgagccctggtctggccacgagccaccactgcctcccgctgctgcccacaggtggtgccgccaatgggcagtgccctcaggccgaagcctcaatcccccatctgagccaggcctaatcctctaatagtgatggttggtttgtcctcccataactgcaggtggattccacctggggaatgaggctgcgtgtcgggcgtctgctggccctgagacatccagtcttccacactcaactgtgggatgggagggtggcgtggccttaccccatgaggctgtccaggctctggcacacagctgtgctcacaaaatactgggtggcttggttagagctaattgtagtggagcctgcaggtgagggtgagggagggggctgcaggtcaggtaagatctggaagacagacgtacagcttggagggcagggggactctaaggcaaggagatttacagttgggaaggaggcagtggcagaggggtgagggacaggggcccttaagtccagcgaggaaagctcggtgtgggcccgctctacgctccgtttggggtgacctggaacgcctcttctcccagctccctccagccatcagcagcctcttgtcaagcttctgcctcgccccagtctatccccaaccccaaatcaagaccacctttcttcacggtcactatttattctttgttcctttttctttttgtaagaaacattcacaaaaaccagtgcaaaaccatcagtgtgggcgtcctgttttatattacaaaacttcctctg

SEQ ID NO: 1010 - DNA, 1205 bp, Homo sapiens
cctgcacaggacacactgaataataattctctgggcaaaaagcacagttggcaggatcgggtgtctcgatcatcctcacccctgaagacaggtaagtcagggccctcttccttacctggacctccgcctgccctgactcagtccccactacagagagcaaaccctacagtctccaaagggctgagtagaggtgaactgcccacccacatccctgcacgagcccatccaggggctgagatcagtggtggcatgagtgagttgactggccccagagcctgcgaagggcctgttgcccagggaggctttgtcttggtttctgtgtcaccaagctgagagtggcaggtgcaggtagctgggagttgggagagagcccctgccttcatgacctgcctgctctccaggggagcagacaccaccgcatgaacacatctgcctgagcgatgagctgcccccccagagcggccccgcccccaccacagatcgaggcacctccaccgacagcccttgccgccgcagcacagccacccagatggcacctccgggtggtccccctgctgccccgcctgggggtcggggccactcgcatcgagaccgaatccactaccaggccgatgtgcgactagaggccactgaggagatctacctgaccccagtgcagaggcccccagacgctgcagagcccacctccgccttcctgccgcccactgagagccggatgtcagtcagctccgatccagaccctgccgcctacccctccacggcagggcggccgcacccctccatcagtgaagaggaagagggcttcgactgcctgtcgtccccagagcgggctgagcccccaggcggagggtggcgggggagcctgggggagccgccgccacctccacgggcctctctgagctcggacaccagcgccctgtcctatgactctgtcaagtacacgctggtggtagatgagcatgcacagctggagctggtgagcctgcggccgtgcttcggagactacagtgacgagagtgactctgccaccgtctatgacaactgtgcctccgtctcctcgccctatgagtcggccatcggagaggaatatgaggaggccccgcggccccagccccctgcctgcctctccgaggactccacgcctgatgaacccgacgtccatttctccaagaaattcctgaacgtcttcatgagtggccgctccc

SEQ ID NO: 1011 - DNA, 1152 bp, Homo sapiens
gttccatcggctcccatccgggctatcctgccaccttagcggctgctcctccccaggatgcgggcagggggcctctctcccactccccacacaccgatttctgagtagcgataggggctggaggcttattttatggggtagggggccgctggtaggcgaagattgtccgagggagagggggaggatgaagccagtgcgtggcggagacctgccagatgttgatgcctaagaagaaccggattgccatttatgaactcctttttaaggagggagtcatggtggccaagaaggatgtccacatgcctaagcacccggagctggcagacaagaatgtgcccaaccttcatgtcatgaaggccatgcagtctctcaagtcccgaggctacgtgaaggaacagtttgcctggagacatttctactggtaccttaccaatgagggtatccagtatctccgtgattaccttcatctgcccccagagattgtgcctgccatcctacgccgtagccgtccagagactggcaggcctcggcctaaaggtctggagggtgagcgacctgcgagactcacaagaggggaagctgacagagatacctacagacggagtgctgtgccacctggtgccgacaagaaagccgaggctggggctgggtcagcaaccgaattccagtttagaggcggatttggtcgtggacgtggtcagccacctcagtaaaattggagaggattcttttgcattgaataaacttatagccaaaaaaccttaaaaaaaaaagaagaagaagaagaagaagtggaaaagatcctcattgcctaatcgctgcagatcctagaggcactaggaacttgaatctcaccaggcgtagtttgcttttctctcgggtcattttattggcagaagggatgactaaggacaccttcatttgacttgggttgaggaggaagctctgggatagaatgcagttttgctcccccttctccatggaacagtattgtggtctttaagggaaagcctccaatacctaagggtcaattttattgaaagctttttctttgtggccatgtggtaaaaccgtagccaagagttgagtgagtgttacccagacaaatcaatagttcgtaggacacattgaaaagaaagtatccatctctct

SEQ ID NO: 1012 - DNA, 1190 bp, Homo sapiens
ttttggggatgtttcctttttgggctggtggatgattcttccttagtgactctcttatgtgtagtgtttttatttttttcagggacaatggtgacagatccaggcaccgagctccacgcaatgcccggatgtctgcaccttcgcttggacgctttgtcccaaggtaagaaccgagttgctagcaacagagggagccttcgttagagcctaggatttagttttaaacctactttctggtctttgaattgtccacatctggcattgtttcctagtgggcccatagcccagccctgctgtctaaactcttgacggatgatggttagccacattcaaaagagatgaaaaagtggtgctgggagaatcctgtttaagaacagaagtgttgggggaactttagaaggaagggcagaaaaagatagatacaaatctgcggaaggaccaatcttgggagattttatttctttctgggcatctgtggattcagtgggtcccttagcccagatttttcagtgtaggtagttagtatctgtttcgtggtagtctttagtcagcttttcacatgtgattccttcttgtaggcgtttcttgctgcctgagtacttgccttatgctgggatttttcatgaacgtggacagcctggcttggctactcactcttctgttaacagggtcctggcaggtaaggaaatgtttctttggcttttgaaaatgtgaagggccaaggagccagataaagcttctccctcctttacctatgttgatgtgatggtgtcttggcatctgtctgaaaattctattttggggtcctggtttgatattcagttccttacttgaaggcaggaaatggcagggttgaagaaaaatgtttctcttaccctattcccactttccctagacctttttttttcttttaaattatttgtttaaaccatttgtttcttaatccagcaattaaattctagctatgcttttaattgaatgataaaggtgccgtgtttatgttttggttggtgagatactcatgagccagatcctgtgatttaattaggagcttagtgcacacctctccactcctttggtactgccagcatgtggaatttccaggcagtgtggaatcttctgaggaaggaaaagagggagacgcccttggagctggctcagaaatctccacagaacagaaaatgggctag

SEQ ID NO: 1013 - DNA, 1146 bp, Homo sapiens
ctcttcctcctggcatcaggggccatgaagccccctggagagagatgttggagccacccatcaggcatgctctcccccacctctgtccagcccgcctcacggccctggcggcctcgctgttaccagaagacgtttttctctgccttacacttctcactgcctctctggacaccgggcttttgctgggctctccagagctgggcttggctcttccagctggagaaggactgagccccagtaacccctttcctgctttttcctgcctctgtttccctagcaagtgtggatgaatcaaatgactgccggctgggctggtagcaggggccagtcctcccctcttgattgctgggaatgagcagctgagctctttggtgtggacaccgccccaagctgaggtgcctccctatctggtaggctgccctgctttgcagaagccccactgcatgaaggcctgagtgcaagcacccttgctcctgtactgcccccagcagcgcagtctggggtatttcccctgctgaggagtgacagggctggagactgtgtctgctttctgcctcctcttccacacatcctgggtcagcctttcccaagtgatactgcccctggggtgtcctaaccccttggttgtgcagggactggtagcttggatgacatggctcagagtcccagcatccacttgaaacctccctctccacctccccgcccccgagagctacagcgtgtgatggaatcagtgaccggccaggttagcctctcccctcttggcctcctttcccacacgggcagatcatcagccttcatgttcttgtggacctgtctgttacggagtcacactggcccctgccccagccagaggtgactcagtgcctcaggatcttatggctccttcctccagctgggggactcttaaaggggctggggtagagactaagagtgcccgtaggaggggcagagattgtgctgataggtcagtccagataggtgggttctagcaatttccccaggggattaaggggctctagggccacctttttttttttttttctgagatggagtctcgctctgtcaccaggctggagtgcagtggcgcgatctcggcacacctccgccttctgggttcaagcaattctcctgcctcagcctcct

SEQ ID NO: 1014 - DNA, 1047 bp, Homo sapiens
ggaaagaagtttgaaacagatttcatttattttggggaaaaagatatctacagccctatgatatttggtctcttttgtgaaagagaccaaatgaacatatttataacattgtaatactgttattacactgaattagtatcagatattttgtccccttgcattagatttggttaagcaacatgaactactttactctcaggaacgaaggaaacccaagagagaatttctaccaggttaaatgatggcccctagctctggggagtgggaaggagtagagatggatgattagatgaatgactggacacacttcagctggtgtcatggtagaagtgattaaaaattttcatgttttagcagctgaacttgaaagatatgatgtgccacatttatagccctggccatcttttagaagtgagctcaaagcttagggaagatgaatggtgacaaattatcctcattcttcagtcactcctaactcttttattcttttttcaatagtgtctctggagaatggttcgactgttgcctgataccatcaatagcattaacctagacagaattcttctggatatccacattttcatgaaggtcttccccaaagagaaactgaagcaatgcaaaagtgaatttcccataaggaccctaaagaccctgctacacaccttatgcaaattaaaagggcccaaggtgagtaagaatcgcaactggtctctgagggagcttgagagaaaatcatggaaatggcagtgctatcagtcatgcatgtgtctccctcagatcctggaccacctaacgatgatcgacaacaaaaacgagtctgagctggaggcccatctctgccggatgatgaagcacagtatggaccagactgggagcaagtctgataaggaaacagaaaagggagcatctcgaatagtgagtggcctgacttgaaagattgagggacatgaggctacaccggaagtgatcttatctaaggtgtaggtcaccaggatatgctttccgaaggtccaaggtgaaggctcatggactggttgaatcagtctc

SEQ ID NO: 1015 - DNA, 1556 bp, Homo sapiens
cctggatggaagctaagagcttggatttctgggaacaaagggccatccccataagattgagcagaaattctggtcctcttccctgaaaaattttccccaccccagccagcatcttctgcttccccttgggttgtgaccagggagtggggagagaggctgaggctctgctcccctggagaccttctcttaggagttgggtgcttcatggaaaatccaagccttaggttcccttctgtctctggcaattagatgtgttcttggtgtcctccatgtcctttttgacttttccctgtgtccattgttagcatgtgcaaaagttccctgtcattacccaacccctgcccgcccacctcatttcagggctgtacacacagtgagtgttcctgttctctctctctttgtttggatgtattgctctgtgtaactcagtgggtctccctctttctggtttgtttttttttctagattcctgccgtttgttcatcgttgtgcctaaagcatgtcgatgtggcgtcaagtacatcgtccaaatccctgtctcttcagcttctctgatgcttgaactctcacctttgaccttgtgttgacctttgatgctgatgtgtatttttattatgtttgtttctttcttcgtttttttttctttttttctttcctttttttttccttttgtgctgccaaattggttttgctagaacgactgctgaaggggaaatatttaaacttgcatttgaatataaaaaaaatctatttttctagaacttcataagataaccacttgattttgtgattccaattctttgtaattgtcttcagagcagccctactagcacataccgcgtggtgtttgtatttctgtgaacacacagccagtccgtttctaggctttgtttctctgtgtgcttagttttaaagacaactttgaagtaaacaatgaaataaaagatgtcactaaaacctctgaggctcctgagcacattttgctgatacagtctgtggggcttgaggagaccgcatgtattgttctttcttttgtttttcttctgagttctcaactgcggagagcacctgaaccccctttcctttttgaccgcaggctgcactttgggccccagccagccctttttctttttctttttcttttgtggttcttccctggagcgactctggggagtcctggatatcccgcctgccccttcccctcagccccatgcttgttccaacagtctccacagcaaaatgtgatgctttgatttttttgttgttgtttttgtttttgtattgtttttgtgtttttgttttgaattttttcctttcctactaagattatgcccagaaaaaagttttgcatgtttcctgctgtttcttcacaccttcgtatatatcaccttcacctctctgttttctatagtttgtgcaaaaactgatcgatttaaaagggtttcaaagaagctgttttaaattgttgtagggttgattatttttttcaagattgtattgtttaattttgaagtggcaactttctcctctattgcccttagagcgtttgcctgtgc

SEQ ID NO: 1016 - DNA, 1194 bp, Homo sapiens
aagtaaataaggttggatagatgtgtagctggagtgattattagtcatgtggtccattgtgaccaataaagggtaactccaagaaatactatgaaatgtttagatttgatatttaaaatagttgtgtgaagtagaaattgagtatccagatggaaacaatctgcagagtgagatgtgtggacctaactaaggagaacttgggagagggtagctggaaatggcattcattcattcgcagacaataatcacagttgactgcgtagctcctcaagtttagcttattatcctgctgtagttctgtcctttgctgtgctgaattctgctgcccagggacttgagcttggctcagtattcagtgaacatactatcttctgggccagtgctttagctgtgttttttttttgtcctgtgctgtcataagcctcatgtttctgttgtgttggcttgggttcttgtctttgactttcttctctctgggggcctctgcactctcgctttgctgtgctgtagagttatcccagatgcagaaccagccctcactctcactcttgttctgttttttggtgtaatgtctagctttatttgcagctccttcagcagactgcctcctctgggaacctcaacaccctgagcagcctccacccaatgggaggtaagtgtttcactgctgcagaggagcagcagcacccaggccagcagacccagctaacaacagtcttgggagtttggcatcgtttctgtgaaaacatttttttgcttattatgtaaacctgacctaggataaacatcccaggactcaattttcttgtctctatacagtggctctatggctagttgatgccacattgctctgacgttatctggtgcctcctaaccttttaggtcactgttgaagaagaatatggaaaagggctgtttagctcctatagactgaggctgttctctgataaggggaaaaaattgcaagaactctttatttccattataaagtgacttttccagtgactgcagaaaagccaaagatggcttccatgcaaatgccctaccttgaagcttctagaacccaggcatttggtttacctgtgtatcttcttgtttcttaggtgaattcctattttgttgttgctattatcgtacacagaaaacttaaatggagtgccacaacaaacctgagctagggcccatcaggagtcg

SEQ ID NO: 1017 - DNA, 1310 bp, Homo sapiens
aaggaaacttcacctgtcattgtatacattgaagtgttctgaatcttatttgtaatcaatagtcctttgttattttgtgggcctttttttaagtgtttgttttgttaactatgcttaaaagttattaaaacttgatcttgttttgggagttttaccctttaagttcctcctctagcatggtaattctcatgctagataagaaatgtacactgtcagttccctggtaacagctgggatgtcccaatcagaatggtgactttagtttggcatctgatggaatgggtggccatggtgagggagaaccagggaactctggtaaactgaatggaagtagtgaaagaagtagattttttttcccttacgttctcagaactagttaagatcattaaagaaaagaaaatttcctctggaaagcaacattattacataatagaagtttcattttatctcacacagctcaaagaaaatgaacggcaccctggaccacccagaccaaccagatcttgatgctatcaagatgtttgtgggccaggttccaaggacctggtctgaaaaggacttgcgggaactcttcgaacagtatggtgctgtgtatgaaatcaacgtcctaagggataggagccaaaacccgcctcagagcaaaggttagggctttgggttttggtttatcttattttttccactgactctcagagcaggtgagggctttgggtttttaacaggatacaaaaaattggatttttatatgtaatttctttcatgtgcattctctctgtcattgccagaatactcctgtctgtctgtctattggaaaaaatctgtccttttatagtagtaatatcttgtaatccaaacatatttaatggctttaaaaagttaaggtgttagcatgaggataatttgtaaattgggtcttgggcagtcctttgtgagggttctaaatttaagagacagactcacgtgagtgtcttatttgaccttgggaacagataacaaagataaaattgaagttaaaccacataaagttttctttagtgtttgggctagcataagctgaaggagaaagactgtccacatacccattggtttcttgttagtattacagaggccttgcgggatagtttatcaaatagaaaggatttgtttaggcagcttgtttgctgttgccacaaagtgaacaggagaggaaaggcggagctgcttccagaattgcctagcagagtggaagtttcacaagactgatggtagataggtattaactttgccccgtatatacacacagacatgttcttattttccattttaccagt

SEQ ID NO: 1018 - DNA, 1228 bp, Homo sapiens
ccttgagtcgtcttggaaacggtcgccagggaaaccgttcttcccgctcaggcccgcccgccctcgtcaaaagcttggctcagagagcgggggaggggtgtgtagcgtagaacccaaaacgcccgccccctcccctcctctcacccgcctggttcttcagcgtcctcgccttctctctaggctctgccacaaggagctaggaccacgctcacctcacgatttccctacctgcctgtctcgctttctcacctgcgttccctcctttcatcccggagcccggaacctccgcttccggctccacgtccgcccggaagaagatctgctgcacacttccgtttccggtccgtgcccttggggctccgtgtcctgctgtctttccgtccgctgcctagtctgcatctgagtaacatggcggcggcggcggtagccaggctgtggtggcgcgggatcttgggggcctcggcgctgaccaggggtgagcacgggcagccagctgagaccggggtcaggcgcagcggcgtgcccagtgcagagagctcctcagggctcatcccgcgcgtctgtgccttttatctccctgtgcagggactgggcgaccctccgttctgttgctgccggtgaggcgggagagcgccggggccgacacgcgccgtgagtatgtgcgggcagcgctcttctctgaactatcggcggggccccttagatgcctgtccttgccctaggatgcccttccctacgtcctcctggcaaatcttggagatctgacttgcagtggtcttcaccctgcatgcagaatcgagccctccctgtgcccttaggcctgttatggccctgattgttccttgtccatttcaatcatcccctttttgtctgattaaactgtcagctctttgaaagcaagcaatataacctttaggcctcagagccctgtaataatagtacctagcgttaattgagtgcttaatgtgtgcctggaacctcgctaagcgttttagtgaatgatcttatttcgtcctcacaacagccttatggggtagatagcatcttactcttcttactatagatcaggaaacagtccaaagaattaaactgcccagggtcaaagacctagtgaatgacaaagtaggcctgcctgctgccagaggcagaaacacctaaccattattctgtagcttgtgatgtgtgattgctcagtggtttagggttgcatgaatgagtatgtacatat

SEQ ID NO: 1019 - DNA, 1112 bp, Homo sapiens
ttcacttggcagctaataactagttatatcagatgcagcatttctggttctgagaaaagagttagtgatccttttattagaaatactggtacgatttccatacttagaaaattcattcagaaaatgagactgaaatgttgtatataacagagaggcctagttttatcagtagagtcacagaggagactcctataacaaatggtgattttatgaagcagagtggctaacatctttataaggtggaatctacttggtgaagtcaaagttattaataacttcaatatttttccattgttgagctgttatgtaatgttttccttcttttctcttatagctgtcccagaaaatacttgacaaattggaggactaccagcaaaaagttgataaggcaacacgggatttattatatcgtcggaccttgtgatttggattgtcacctagcctttgtaaccgcttggtgcctcttaggacttaagactaccctacaggaaccctgtactcaaggccgatttttgtaactgtaaatgatgtgtacaacattcaagtctgcattctgcacaagataggagggcggaagagtcagaggaccctgtgcttgctggtggtgctaacacaatttctggtgttcaaccttggtctcaaatagctgcttttgtatatgattcacgagcttttttagagtttatatttttttaaactaccgaagacattcattatctgcaaattaagactcaccttcactttccaaaatagctgagggttgttggcttgttgtagctgaccaccaaaagcagtcactgcaaatcttttaattcttccctatcaccttttgtattttaatgcaattattttggtccagaactgacctgtattttctgtattgtacacaaaagctaataattttgtgtactttttatttattttggaggttttatatgatcttcaattgagtattaaataatttgcctagattaagcctaaaatgatgaccagctaattaaagaagatattttgaatctggttctgagctaaagttgagtaaattcttagctaagaaaaaattggaaatccatcatctatattagcaacagattctcagagtaaattgttaa

SEQ ID NO: 1020 - DNA, 1218 bp, Homo sapiens
ataaaatgcctccggctgattgaagagtcagtaactgtggatatgtcagttataatggaaatgagttgttataacctacagtctccggaaaaggctgcagagcagattctggaagatatgatcactattgatgtgtaaggagaattagggtaaagtgcatttcctaatggaaattcagcatttttagcgccaaagttggaattttaatgtatgttccagagcgtacagaatagtagcttaaagtcaaactgatgcgccatgattctaagtacatatttctacttttaacagaaaatttaacacgacttcaagtctagaaatagacttataaaatatgctttaacaattaaccgagctaaaaattctaaaaagcaaaagtgttcttctcatgtttgttttgtgtgttgtttatgaaaaactgagaggaaatttgctatgcatagggactgtatcttatatgccagagtgattatcttcattcctttatctggttctcttgtttcataatgtatttagcttataggacatatagaacttgccttacgtattctcggtagtaataagagttttgtaattgtccttatagagaaaatgtgatggaggatatttgtagtaaactgcaagagattaggaacccaatccatgcaattggactacttatacgggaaatggattatgaaacagaagtggaaatggaaaagggattcaatccaggtaaatgacagaacaacaaatgtgcctctttgattaaaacaatgatgcattcaactccatttttcttctttttacagctcagcctttgaatattcgaatgaatcttacccagctctatggtagtaacacagcagggtatattgtgtgcagaggggtgcataaaatcgccagtactcgtttcctgatctgcagagatcttttgatcttacagcagctgttaatgaggcttggagatgctgtaagtactgcttgagggaaaacttgtaaaatctaaaacctgttataggcctacaagcacttaggagcaaaatgtcagccctactagcacagatacttttgtcttggttcactgctttattctcccaagcttggccttatgagatgctctataaatatttttgaattaagaatgaataagcattgtaatccttgtgagagtatagattaagagcatatatggaggggacggtggggagggagaacatcagaaagaatagctaatgg

SEQ ID NO: 1021 - DNA, 1199 bp, Homo sapiens
atcatgccactgcactccagcttgggcgacagagaccctgtcttagaaagaaaaagaaaagaaaagaaagtgctaatccccctatggggatctcctcttctcctcccctctctggaacctcacttgtcagttcttcctcccacttccctgtatctttaaactatcccccgcttttagccccttcccactatcatttaaattactcaaacttcttctattttaaaaacctctccctaaactcagtgtgtcccctgctttaggtcccagcacacccactgagccatctgctccccctggtgccttctccacacagcagcctgagccatgtctctaatccattaatctcatcacgttactccaaagtttacatcacttctccttgtcttggggattaaatccaaacttcttaacagcccctgttctgccctgccttgcaaggcagcctcactgcttgcccctctccattttacctgctgtggagtccaactgagcctcatgtgccccatgaatcaggcattagattctcataatgagctgaatcctgctcttatgaaatccacactctttctcctctgggagtctctgaagtgagtgataccctctgcttagaatacacttccccttaaacctctactctcttcctggatagctttgggtcctctgtcacttgtctgctttggcatcaccccctcctggaagccttccttgactctccagattctcaggagcatgagaggtgaggtgctcctcccatgaatggatggagattagggagtatgggttattcatgtttaattcaacagttcttagctcagtacctggcacaaaacagttactgtggtggccaaagtaatgaccccaccccccaccccccaccaattgctcatgtcctatgttacacagcacaattacataggaagggggaattaagagtacagaaggaattaatgttgctaatcagctgatcttaaaacaagattatcctggagtatctggaagagcccatgtaatatcaagctttctttaaatgtggaagagggaggcagaaggttaagaaccagagacggcgggtacaatggctcatgcctgtaataccaacacttttggaggccaaggcaggaaattcctctgagtgcaggagttcaaggccagccctgacaatatagtgaggccccatgtctaccaaaaaaaaaaaaaag

SEQ ID NO: 1022 - DNA, 1121 bp, Homo sapiens
acttgattcatttgtccatccagcaagcagtgactgagcgcctgttaggagctggatgttggagatagctgtgaaggtagagtagagagtgcagggacgagtgtggtcagggaaggtgtcactgtgaagggcagaggctgagctgtgtgcatgtctggagagcagcattcttggtagagggcacagcaagtacaaaggcattggtgctttcctggcaaggaggccaggatgtctgcctggcagtgagagaggagttaggtggtagtgaggaccaacgggttggggggttggattgtgtcaagtctcgaaggcctctagaaagactttggcttcagtgagagcaacaggccatttgaagggtttgcaggagaggcatgggatgctgctgtcttagttgtgaagagtcacctggcccactggattaagaatcagttgcagggaggtaagatcagcagcatggaccagtcagggggctgttggaatagtccaagtgagagatgatgacggcttggaccctggaggtagcctacggtggagatggggagaagtggttggttctggatagaatttgaaggcatggtggaaaggactttcagatagatagagagcacagaatcaagggtgaccccacggcttttggcctgagcaaccggaaggatgagtttatggttgccgagacggggacttctaagggtgaagcaggatcgggggagatgggaggagtttgctttgtggatttgttgaatttgagatggttttcagacatccatgtggaaacgtcaagcggatggttgggtagtcgagtctggccttcaagggaagtgagcaaatttgaaaggaacacttgggaattgtcagagtaggaatgcttgtgaagactggctgagattactgagagtggggatggtgcaggaggggagggcccagaggcacagccaaggagactgggaggacagtgagagagtccaccaagtggagacagcctccaggactgggggagggcgccatcagctgtcagatgccactgacaggtcaagtaagatgagcacagagaattggattcagctccagggaggtcatccgtgaccttgacgagagtagttaggtggcaaggtaaagga

SEQ ID NO: 1023 - DNA, 1505 bp, Homo sapiens
ggtgacaggggacctgaaggcccagctcctcttccctcttgccaatacagggacaagtcaaagaagaagaagaaagtaaaggtaaagatggaaaagaaatccacgccctctaggggctcatcatccaagtcgtcctcaaggcagctaagcgagagcttcaagagcaaagagtttgtgtctagtgatgagagctcttcgggagagaacaagagcaaaaagaagaggaggaggagcgaggtgcggcaggaatgtggggcctgtgggctgggcagggtgaggggcatgtgtgtctgtgtggggttggtctgtaagagtaatgagttggagtggatggtggaattctgaggttctgaaggggggtgctgtagttgggggcggtagggaattgcgggcccttcactgaagagtgggtggggcacccaggactccagcttttcccttaagacacctttggttttcaggactctgaagaagaagaactagccagtactccccccagctcagaggactcagcgtcaggatccgatgagtagaaacggaggaaggttctctttgcgcttgccttctcacaccccccgactccccacccatattttggtaccagtttctcctcatgaaatgcagtccctggattctgtgccatctgaacatgctctcctgttggtgtgtatgtcactagggcagtggggagacgtcttaactctgctgcttcccaaggatggctgtttataatttggggagagatagggtgggaggcagggcaatgcaggatccaaatcctcatcttactttcccgaccttaaggatgtagctgctgcttgtcctgttcaagttgctggagcaggggtcatgtgaggccaggcctgtagctcctacctggggcctatttctactttcattttgtatttctggtctgtgaaaatgatttaataaagggaactgactttggaaaccatgtcctcatgctttctttgtagccttggtgtgttgctcccacttttattggtggtgtttactgctctggtcagactgggcagggccttcctggccagccgggaagcaagtctcgaggtacatcctgttctgttcccggctggacgagcattggttttcacccgcctctgcccggatgggccacctgagagtctagaaatgagagctgatctgattaggaagtttctcccagttacactccattagccaaccaagctagggggaggcagctcttggctgcatccttacctatgagtcaagggtcttccaaggctttcgataatgaaatcaggattgactgtccttcccgcagccgggggagtggaaacctgagcctggagagtcggggaggatgagcgtgtgcgtagagtggtggtggttgcagcctggtggtggtgcaacaaagtacggagttatatgtgaagcttttgttcttacgggaagaagggggtatacaaacttcagtgtagggaggaacccatgtctgagaaggggcctaaaaggagataaag

SEQ ID NO: 1024 - DNA, 1168 bp, Homo sapiens
agagacactggagttcaacgacgtctatcaggaggtgaaaggttccatggtgagaatggcttggacaggtgatacaagtagagagaaggaaggagggtagagtttttgtccattaatgagagcttgctttggtaacgttattttggaaaaagaagactcagtataatgtgtacctagtgtctccaccaactcaaggcaatactgagagatagtctcagagttatagggaccgtatatgctgttcagttcccaattcctgttttacaaatgaggaaactgagaatctgttaagggttctagataccagagtctggtttagaatctagactccttggcaccctcagctgttgctcctgcattgataatctggccagtccacttgcagcaggaatgtgtgttaggtagagctgtagaacccaggacatgctgtgtactgtctccatgcatctgggcctgcttttcttacagaatgatggtcgactgaggttgagccgtcagggcatcatcttcaagaatagcaagacaggcaaagtggacaacatccaggctggggagttaacagaaggtatctggcgccgtgttgctctgggccatggacttaaactgcttacaaagaatggccatgtctacaagtatgatggcttccgagaatcggtgagatgtcccatggctataagcctcctttttactgcatcttcttattttaatcttctagagactcgaggttccttcctcatgtaaccctgtgattgctagtttgggctccttagagcagggctgtgaggccatcaggcaatcagtgtttggctttgagcgttgaagtcttgtgaatttctgtgtgccttgactccagaagattttcttctgtcttgatttagatagtagtttctgcctgtggcttttatcaaggttcagaatcttagcttgatttctttgtgtgtatgtgtgtttttggttttttttggggacagggccttgctctgtcacccaggctggagtgcagtggcgcaatctcggattactgcagcctccgcctcctgggctcaagtaatccttccatctcagcctcctgagtatctggtaccacaggcacatgccaccatgcccagctgatttttaataatttttggtagaaacggcgttttgccacattacccagtctggtctt

SEQ ID NO: 1025 - DNA, 1167 bp, Homo sapiens
ataaataagatcctcactttggcagtgcttcctctcctgtcaattccaggctctttccataaccacaagcctgaggctgcagccttttatttatgttttccctttggctgtgactgggtggggcagcatgcagcttctgattttaaagaggcatctagggaattgtcaggcaccctacaggaaggcctgccatgctgtggccaactgtttcactggagcaagaaagagatctcataggacggagggggaaatggtttccctccaagcttgggtcagtgtgttaactgcttatcagctattcagacatctccatggtttctccatgaaactctgtggtttcatcattccttcttagttgacctgcacagcttggttagacctagatttaaccctaaggtaagatgctggggtatagaacgctaagaattttcccccaaggactcttgcttccttaagcccttctggcttcgtttatggtcttcattaaaagtataagcctaactttgtcgctagtcctaaggagaaacctttaaccacaaagtttttatcattgaagacaatattgaacaaccccctattttgtggggattgagaaggggtgaatagaggcttgagactttcctttgtgtggtaggacttggaggagaaatcccctggactttcactaaccctctgacatactccccacacccagttgatggctttccgtaataaaaagattgggatttccttttgattgcgcgtttgtgtgtttctgtattagaaaagcctgacaactgcagaggaattgcccatcttaagggcaaaggccatcctatttggtttcaccaaatgccgggcattgatccccaggactggcaagagttggagaagtctagtttccataaatctagaatagcggccacatgttgttaggtggtgggtttactctgggattggcctgcggttgccagggaggagagtttggcggcagatggtggcacacaacatttagcgccatgcaaaggtacagaaaagattgcgcgaagcgaggctagcagtcggacctagtctccgccccttcctgctgtgttcaccatcccagcgtcccctgtcccctccacccgaagcgatgggtggttccgtcaggcgcttcccgcaccttcccgctccctgcttgcaaagtgg

SEQ ID NO: 1026 - DNA, 1167 bp, Homo sapiens; identical to SEQ ID NO: 1025

SEQ ID NO: 1027 - DNA, 1188 bp, Homo sapiens
gcaggtaagactacctaggcctcttcataggcctaactaagatcacagttggaaaaaaaaaagtatagaaaaagaaaagaaagttgttttttttttctaaaatttaactttttgtattcattgaagaaggaagtaaaacatctccattcaaaagaaatttgagagtctgtttatgccatacactgaagtacaacaataaacaaaatagacctactgtttgttctcaaagagcttacattctagttgtgagagacaaataataagcgagtaaatatgtagtatgtcagagtgtggtaatattattgagaaaaaagtaaagtagaatgagtagtatggaggaaagaacgtctcagggtgggggtgaggttattttatatagagtggtcagggagggtctcatgtgtaaggtatgtttgagagagaccaagagaaatggaggatggagtcatgtagatatgaggagtaggaagtgcaaaggccctgaggctggttattgccaatgaacaaaagagattgaggggagggaaggagaagtaagagacctgtccagagaggaccaatgggaatgtattttgggggaaggggaataatgtagggtcttgttgtatactatattgtacaaagaaaaattatctccacttcaaaccccagagacaacggctgttaccgaatttttgtgtctttcttgtaacttgaggtagcacctgacccaacctccatatttctcccattgtggaatctccatgaaagtatagttagcagataatttgcatagtagcagattttgcataggttgattacctttgtcttagagaatgataataaggcagctacttagaataagctgatatgtttttgggaagtgggatcaaaatttttctttttcttttttttttttcttttttgatacaaggtctgtctcggcagtgttaacaatctcagctcagtgcagcctccgcctcccacgctcaagccatcctcccacctcagcctcctgagtagctgggactataggcatgcactactacacccagctaatttttgtattttttttttttttttgtagagacagggtttttccctgttgcccaggctggtctcaaacttctgagctcaagtgatctgcctgcctcgccctcccaaagtgctgggattacaggtgtgagctactgtgcccagcccccaaat

SEQ ID NO: 1028 - DNA, 1207 bp, Homo sapiens
gatttgagatgaggaatttttaaccttgagtgctgtcaatgagctaaatggagcccctgagcgctcatggtagaaccaaaggcaaagctatgggagaggaggcaagaaggaaggaaagagaggagttgagtataatgagttgatatttgttctactcttaccatggattcattattcttaagacatggaatttggcctctaagtttgctgtagagagtgtgagagagtttagggaacctgatggtatagaagcataaatccatcaactgagagtactaaggctggactccagccagctagagcctggtttattggtactgattagcaccctctgcttctatttctcttttgtgcaggctatgagctcttatttcagccagaggtggttcggatatacatctcacttcttaaggagagcaagactcctgccatcctagaagcctcagctggagctatccagaacttgtgtgctgggcgctggacggtaccttttagaaaagggatttggagatgggaaaacttagataactagtttgctgccatttgtaatttgttccacccctttctatttgctattctagtatggtcgatacatccgctctgctctgcgtcaagagaaggctctttctgccatagctgacctcctgactaatgaacatgaacgggtggtgaaagctgcatctggagcactgagaaacctggctgtggatgctcgcaacaaagaattaattggtgaggagttgaatgctaactgttacctcaaaatttagtacagtgtttgtagtccagcaggtgcctaataatttattgaatttattgaaatgactgaagggaaggaccctcccccgcttcatagtttatgaatgcgagagttggtaagggttttagtttaatggttcttggaaagaaaacaagtgacaactcttcaaaaataaaataataattgctattatttattgagcacttactttgttactaagcgttgttaaacacttctgtgtttccatttaatcctcaccactttacaaaggtccatttttttaaataggataaggaaataactcatggaagttaagtaaattgcccagagttaatgtagctagttagtagcagaacccagttatttatttatattttaaattcataataactcttctattaaattattataatattcaagatattttcattagagtatctgaaagga

SEQ ID NO: 1029 - DNA, 1207 bp, Homo sapiens; identical to SEQ ID NO: 1028

SEQ ID NO: 1030 - DNA, 1082 bp, Homo sapiens
atctcaaagtaaggctggtaagagaagtgagtggtgtgactcttactccttaggtgcccagaatttaccatcatctctgaaggagttacagggaagtggtctccccaattctcccctccctccagtattgccccctctcactttagcatatattaattagcaggttgggctagagaaatcagctgctatgcgggttgattattattattatttctaatccttttccttatttgccttctactccccttaatctaatctaaaagctctgttccatgcaactggagttccttatccctctcttccccttcccttatatattgaggctatggggtaggagaaaagtgcacaacccaccaccccctttactcgtgcattaaaatttcttatttacccttttcccccttcccatttcttcccactttcatctaccttttctggcaaaaaggagccttttgctctctgtgaccctaagagcacactgcacagggaaaattgccccatccagacctggctccactcttgatctctcttgtcctcttctgctcttttcctggtgctcttttttctcggtggggtgtgggtaatagaacagccgtgggcttttggggacctttaacttttttttctctcttttgtttataaaaaacactaaacattcaattccagagaaccaaaaatcccaccttcccaccgaacactactaaggggcttgtgttctgctccataccttttctcttttctttctgtcttgttaatgcttttaaaaacaaatgagttttttatataaataaagtttttaaagtgtgtatgtggggggtctgtgtcatttcttcacttcaagctgttatttcttccctgctttgcatctttgttacttccttatgtatcagtgtcctttccagagcaaccagaaggaggttataccaggatttattttgagctcagccccaactctttatcaagcaacattcttgttaactatatgtgaaacattttttcttctgaagattcttaaaaattgaatgtggctgaagttgaacatgggagcttattgctaatttagagataggaaactgaagcat

SEQ ID NO: 1031 - DNA, 1082 bp, Homo sapiens; identical to SEQ ID NO: 1030

SEQ ID NO: 1032 - DNA, 1340 bp, Homo sapiens
agcacacacatacatacaccctccacctccccatcccctgttctccctctgttgctccccttataaaattgatgttgtctttaccagaaaggtagacaaaaaagaagcagcagcagctcttaaagtgagggttattctcatactcggttccagccatcagcagacttcctgctcatcggcagatccccctttccaacctgtaactctgatgtgctctggatcagcttttaacttttaatcatatattactgtcttctaaatcccttctcctcctctactgctgccctatggttctggctcctaccccctgcggcacacttatcttcaaataccatagaattctaatctctggaggctggcagcttgacttggcactttagggccccttagcagggtgagctgttaaaacagcacacatctctcatcccctcttcctttattcccccctgggtttcagaaaggaaggatatatggggaccacctcccccttctttgatcccagcatctcagtccccctcccaaccctccatatggctctcaatggtgctcacttgcttggaagcaggctcccaatagggagggggctgccctctacagtctctttgactgtaagacagggctctgtatcagtgagacgatgagaaaagtcccaggctaatggcagaaatttgcactttgaacatgtgtgtttttgtgttgtggaacctgagattccttatttattaacaggaagtctgattttttttttttggagtctttgttgctatattttgtggggctgggagagagagattagattattttgacatgggatcccttccataacaggtactttgaaggcaagacatagggttgaagaagcacagccagcctctgaaatcatagctctccagtggcttttaaagaaagctggtcctcagcactaacaaaatcactacaatagcctagtgcttttttggaagcctttttagggaagaatgttaggttcatggtaactagtatgctctttgagatttttacagtgttgaaacttaagaattttgagagggtgaggagggttgttcagaatctaaattacagatagatgattgtttcttgtgaatttgtttcttttcctttttttttgtccctaccatttccttacatttcccttggggcccatctctggctccttgctttttgtttcttgctttgctttatcagttcattccagctccctgttagtgaaggacactgctgttagtgaaggaacaaagtctatgagtcctaaaattttaagtcaaagaaaactgctctgtttcccctttagtaacacttctgaagaggaaaaacttcaatag

SEQ ID NO: 1033 - DNA, 1194 bp, Homo sapiens
tccccaaaagtctgattggcctttatctgaaccaatcaaaggtgggtctggcggacgcgtcccaccccaggctctcactgggcgctgtagaatgacaggcccgagagaaatgccaatatccgcggggtcttcctcaagtgacactcagcggcaccaatcgacgtccttcttcccggcggccgagccctcctccccgcggctggccgggcggggcggggacgctgcgcggcggtggctgatgcggtagccgtgtggggcgctccgggcggcgacggcggctctcgtaggcggttccggtcttgtatctccaggcggcggcggctcatggcggcgacggagctgagaggagtggtggggccaggcccggcagccattgcagcacttggcggcggcggcgccggtcccccagtggtgggaggaggcggcggccgcggagatgcggggccaggctccggggccgcgtcagggacggtggtcgcggcggcggcgggaggcccgggcccgggggccgggggagtggcggcggctggcccggcccctgcgccgccgactgggggctcgggcggctcgggcgctgggggttcgggctcggctcgagagggctggctcttcaaatggaccaattatatcaaaggctaccagcggcgatggttcgtgctgagcaacgggctcctgagctactacaggtaactgcttccggggcgctgtcgctcaccttgcctcccccatatctgccaacagtcccagctccggcattaccgccagccggcaccgcagccagggttgccccaggccccttttcgtcatctgtgcggattgacagcccaggggtcggagcccactgtcacgaaagtgaaaagcccctggacgtacacctcccctcccctcgggttacccactcttggtgccttatcttcccttcgctcccggcctttccagtcattagtcgtttggagagcgtctgtgcttccattgtatttccaccagcacatgggtgcaattattaattctgcaagcaaggcactggtgtaggtactaagggaacacatgcagcagaacaaacccgaggcactcctcccaaggaacttacagtggaagtcccaagttgtagctgtcagtgcccagtctccaaaactcaaggttattcgtagctctggatgtacccgtccttgctcccttcacattcagacataa

SEQ ID NO: 1034 - DNA, 1229 bp, Homo sapiens
gtgagaagggggggctggcattgctttattcattcatcccaccagtgaaaaatgccaggcactgagggaggcactgggggtagtgtgcaggtcagcctagggaaaacaaacaggagcctgcggtgtgataaatactaattagagaaggcctggttgtttgggaatctgttattagggatcagtgttcagactaaaggaggaaaagccttctcacagttgcctcttatctttctcctcagagcatagcggcctgaccacaggggtggccttcgggcatcacgccaagttcatcgcttcaacaggcatggacagaagcctcaagttctacagcctgtaggccctggcccttctgatggaagctgggcctcatctcagtagaggggtagaattagggtttgggggggggggtggggggaatctatggggggagggggctctgtggggtgggacattcacatcatttcactctggtctgagtggtggcctgagaaccatggtggcatggaccaccctcatccatgcaactccaggccccatgggaacggatgtggaaggaagaactgtcaccctcttaaggcccagggtcggagcccagggcctctcccttcctgtcgttcaatggacgtggtggtggctgttccacacccattttgttgcagttcctgtgagacaggagaggctgagccaagggaactgtgaaggggatgggcaggagggcttgtgcagggttttgtaagcagtgatctagtttcattaaaaaaagaaaacaataaccataaccacctccccgtgtctgtctgcaccaggagcacctgggactgggaaggtcaaggggagggagcacacactgggacactggcttccgggaagcccatcttcctttcctttcacagctcttaccctttttttttttttttaattgcacagcagaaataaaaacaaatctgcagatgaaatttgccatgtccctgcggttcttgaccttgtgtctaaaggcctcaagtcactagtcctgccacttgccttgtagacttggtttcctacacaagcctggaagggagggagacctgcagggaagattagctggatcttgctggtggggaggtctgagcatctccatcagggttctttagttgtaggctttctagcctgtcctcagctggcataagtcaaaaaggagatttttttattgactctggcgattgaaaagctgtggtaggactggtttc

SEQ ID NO: 1035 - DNA, 1214 bp, Homo sapiens
tttgttgtgattttgtcttttgacaaagaagaaagggcaatgtgaattgccccaaatcacagagcgaaatggtagtagtcaggaccaaaacactttcttagccgttttcttagttcttgtacccatctgtttctgtattttcttcaccaggccatccagcagtgtctcttaaagggtagcccgagaaacaactgacttagaaaagcgtggggcacagtctgtctacgcagacccgaggaatctgcattttaacaaactcactgggaaattctcgcgcacgccaaggtttcaaagaccagggtcccgtggcacagtgccgcacagttgtcaaaacaagtgctgtccaattgttttggttttaaattctcactgcgtcatgggaaatgtagtttcgagcctcctctctcccgacgccccagccaatcctccggcgctttacggaacgagccgagtcaatccggaaataaccgagtgttcgtggcgggccctttcctgcccggctgcattctgggaaagggcaatttccgttaggtgctgaaggctgtggcgcgcggctgtccccattcccacgtgaagcgctacgctagcatcgctcggctggcggctcccagctcgccgcggagcagtcccggcagcagcgggggaccggaagtggctcgcggaggctcagaagctagtcccggagcccggcgtgtggcgcctcggagcacggtgacggcgccatgtccctaatctgctccagtgagtgttggctgcggccaagcgcgggtctcaggaggccagagagcggcgcgggagcgtgtgcggtccgctgcggcgcccgggccggggtggaggcgggaatggggcgctccggaggccgagcggcggcctgtcagcaccggagccccccccgtcggagcggggtgcatttgcgcagtgccccgcagtttacatagtgcctgaggtttattgtcgcagacattactgaggccggtcgcctcattctacagagtggaaacaggtctggacagagagagctggtgcaagggaagcagccttaatgtaggagtcagaaaactcgaggtcttgtccagggtccgcctcccattggctttatgaattggctcaaggctctgggcctcggtttccccatctgcaaaatcgagagcattgcagtggatgttttgcgaggcctcgctcggatagtcggagcttttgcaatttgcaaaggt

SEQ ID NO: 1036 - DNA, 1339 bp, Homo sapiens
tcaaagcgatgtcctctttgggtcggtcaatttctttccttcctgattgcctgctaggccaaatggctgatttttttttttttcctgcttctatgaggatgcgcatatgacagtccattttggtggcacatggagagggctgcagttaaggggaattctggagggaaacctgaggtttctggagcactaaatataacaagcagtgacatagttgaaccagtgatgtcgaagccagcaaagcccccatgtgtggagcttggtgtatttctggttcagacagaaatagacacctaccagagggcatgatggcatcagtgcttgcgggcagccttgggccaaacttagtctccatccctgctgcctggccctctcctcctgccttttcctctctgctccttggggagctccatctagcacccgaggattgtggttttgcttctggctgcaagtactttcacatatcctgttgctcatgagagggtggagggagcagctccttgatctccctggggagggggtgggctgagccgcaggaatgtgctctcagagatttctgcctctcctcgagcctcccggtggagtggtattatcgcaggaaaactccagtttgtttttgataaatcatatgtacaggctcgggggtcccttcgtcttgggctgcctgttcgttactttggtgtcactgtgttcacagggaaggatggagacgctgaaggataagaccctgcaggagctggaggagttgcagaatgactcggaggcgattgaccagctggccctggagtcccctgaggtagagggaggctggtatgggacccaacagaggccagcagatgaggcttgttaagaggcgctttttaaggatgctggcttattggaagttttggccaaattcatctcccttttctgtgaacttcatcctggtttggactcagaggaatccctgaggcttcagaccagttcctgggagttcttgggagtgctggggagtccactgcctcctggtgccttcccaggacccagataccccaggagtccccacactgtcgttccagcccaaatctggaggcagctcctcaaagcactggtatggttttgtacccacttttccccaagagccttgtgcgatcccatatctccaggtgactctaaggcttctaggagccattcttgggctgagatctagctcgtctcccatttgatcctgtttctcctcataactggcccctaatcctctagttcttaatcacagactccttgaggaaagaaacagaatcctgcctgtgcagagatttacacttaataaaggacattccctgcccctagcatctcctgtgac

SEQ ID NO: 1037 - DNA, 1159 bp, Homo sapiens
aggcattcatgcaaaaatgacatctattgtaatcattagcaggactttggggaataagaaatagaagcctcatgtagcttattcgtagggctctattagggctgcatttaccacctttccactcctgtgtggaccctggcagatgcttggagacatttgttcatctgctgtttatctagatcacttcagcatcggtgaggttggtctctcaagaacccaaagctctggtcagtgaatggaaggagcctcaggccaagaacatcagtgtggcctcctgcaatagcagccaggtggtggtggctgtaggcagggccctctactatctgcagatccatcctcaggagctccggcagatcaggtgtgtgtgtttttctgtctgctcgctttcctcctcttttctctaggacttctttgagccttggattccttcctctgccatattcttctttgttcagccacacagagatggaacatgaagtggcttgcttggacatcaccccattaggagacagcaatggactgtcccctctttgtgccattggcctctggacggacatctcggctcgtatcttgaagttgccctcttttgaactactgcacaaggagatgctgggtggaggtatgtgtcatttagggacctgggttgggacagagtcaaaatgtggaacaagaacataatgtccccctttctcacagagatcattcctcgctccatcctgatgaccacctttgagagtagccattacctcctttgtgccttgggagatggagcgcttttctactttgggctcaacattgagacaggtgagagtagtattttgagtgagggactctttcaaaaatagagtattagaattacacagaattcttagtcccagggttctgcttttgaactttcacaggccagctttttgtcctgttttctttcttcctttctcctgatgtcattctctctgtaggtctgttgagcgaccgtaagaaggtgactttgggcacccagcccaccgtattgaggacttttcgttctctttctaccaccaacgtctttgcttgttctgaccgccccactgtcatctatagcagcaaccacaaattggtcttctcaaatgtcaacctcaaggaagtgaactacatgtgtcccctcaattcagatggctat

SEQ ID NO: 1038 - DNA, 1131 bp, Homo sapiens
agattttgtttgatcttacttagtatgagttaaaataaaaacttagaatttctctatgttctttagttttgtaatattaggtcattaaaactttgatgttgttgattattcaaggctggttgttctaagcttcagggctgccagctgtgatcagatcttcatttctgcatgtgtgtctcagaggcccaaatccacacttgaactttttgcaaagttgtgtcataaccctactcattgatgggaaaatgttttcatcagccaaaaattactatcttctgttttatgccagaaattcaatttgacaaatatttaggtacttagtgctatgtgaaaggtattcatgcttcaggagctgtaacagtgactaagatgtgatccctgccctgaaacacattgctgaattccttccataacttctttgttgaagctgtcttccactggctgagtgtagctttcttctggtccctgctttttagcatcttaaaggtgaccttggcagtcccaggactgacatgagtcataattcagaaaaaggaggggaagatgatgttgacaatggcaggactgaaagttttgacaactttagcggagcaatcaattgtgttctctctaccattattccatcagaatgcttttaagaattgtatcaatttaaaaaaaatctcataggtgtagcttatcagtgcgtgtttcacttagctgttttgtaagtttctcgaggctaaggaacacacacaggcacacacactgtatctcttttttttttttttctgagatggagtcttgctcggtcgcccaggctggagctcaaccttcgcctcctgggttcaagtgattctcctgcctcagcctcccgagtagctgggactgtaggcacgcgcccccatgccagctaatttttgtatttttagcagggacggggttttgccgtgttggctaggctggtcttgaattcctgacctcaggtgatctgcccacctcagccttccaaagttctgggattacaggcgtgagccactgtgcctggcacacagtatctcttatagtacctagtgcagtgtgacaagttcatttttctaattctttaaacctttcttggttggttgaattgttaagaatggtagatctcag

SEQ ID NO: 1039 - DNA, 1195 bp, Homo sapiens
ttagtttgggtttttttttttgagacggagttttgctctttttgcccaggctggagtgcaatggcgcaatctcggctcaccacaacctccgcctcccaggttcaagcaattctcctgcctcagcctcccgagtagctggaattacaggcatgtgccaccacgcccagctaattttgtatttttagtagaaatggggtttctccatgttgatcaggctagtctcgaactcccaacctcaggtgatccacccgccttggcctcccaaagttctgggattataggcatgagctaccacacccggcctgttgggaagattaaatgagacatgctcaaaaacacttagaactgggcctggctcttagtcactgctcagcaaatggaaccaatcttattgttcttcttgctccctacagacctaggctactctgaagcaggtggcttagccctggccctggctggatgcaggacaggttggcagggaggcagcagagccaaattttgtacaaaggagctggtgctagcaagctcaggaagaagccacagccggaagttcaccttgccaggacctggctcagctgcaggttcccaccgggccaccaggtggcggtgggagcccagccctctgagtccacgttgggccccagtctcactctgtcttcaggacaaagccaggggctgcagcccttgttcagcagactctggcttttcacagcctgtttgaaaaagggagtagcttcatttgattgagtttccactatatcatgggcatatactctgttctagtaaatccctattttacagaggaagaattttagctcccgacaatgatgtatcttccctgagttcctgcagctaatgagaggcagaagtgggatttgaacccaagtccctgtaacagcagagctcaagccacactccattctggcccccacgctactcacttctgtctgcaccctgtatccactcagccaagcctggcggcactgctctgtaaccctccaccagcctgtccacaacccctcctgaggctgcctgtggccagtcctctcctccccaccccttcctgctggtcacccgtgcttcctggcaccaccacactattcactcatccaggccttggcttatgctccccctctggctggaagagcctcccttttccctcctcccatgtctcctgccccctttttccctaccc

SEQ ID NO: 1040 - DNA, 1177 bp, Homo sapiens
tcttgctgctcctgtctgaagaaatcagactgatttcctcttaagactcctagggatgtggtgaagagctgggactcaagtgcagtccacggtgtgaaacatgagggaggtgaggtgtccgtccacttcccccataaaggtgtgcatttcagttaggctgccccgccacagagcaggcttcatctgctctgccatccagccccatctggatgtgaggtggggtggagacatcatggggtgattgcagaaagggggagtggcggcccacgcagcttctgctgaggagctgaccgctctgagctgttctgtttcgtattgctgctctgtgtctgcatgtattgtgaccgtgcggctccacctcttccagctgctgctacagctgaggcctggatcccggcctttccctgtgacttacgtgtctgtcaccggcaggcagccctacaaatcctggtgacctgctctcccaagaacagagcctgtccccagatgtcccagtagcgatgagtaacagaggtggctgtggacttcctctacttctccttgctggatcagggccttcctgcctcccgctgggcaggtctggccttgctctcttggcagggccccagcccctctgaccactctgcagctcaccatgcagctgatgccaaagttgtggtgtccagtgtgcagcagccctgggagccactgccaccttcagaggggttccttgctgagacccacattgcttcacctggccccaccatggctgcttgcctggcccaacctagcgttctgtgccatgctagagcttgagctgttgctcttcttcaggggaggaaatagggtggagagcgggaagggtcttgctcctaagtgttgctgctgtggcttttttgccttctccaaagacgcactgccaggtcccaagcttcagactgctgtgcttagtaagcaagtgagaagcctggggtttggagcccacctactctctggcagcatcagcatcctactcctggcaacatcaggccaacgtccaccccagcctcacattgccagatgttggcagaagggctaatattgaccgtcttgactggctggagccttcaaagccactgggatgtcctccaggcacctgggtcccatgaccagctccccatctccataggggtaggcatttcactggtttatgaagctc

SEQ ID NO: 1041 - DNA, 1175 bp, Homo sapiens
ctgtcattcagaaagtaacctctaacttgtgttttctttcttttcttctgatgttctcattgcaggagtctggttggaagcaaatgtttttttaatggacttgcatctcctcaccttgatcaggactaaaggacggaggccgccccacccccttccctttcctccaaacccctaactccctccagacacccagggaataccctctgccccacaggattgaagactgcttggcagtcctcccaatcccacacctcctgtttgccaggggaaagaacctaaagacttcgtgtgattgggaggggtggcagacaggaagaaaacatgtccaggcccctggtctccatagagaatggtgctttgtccaagaaaacgtatgagtttctgattctccgggagccgttcaatggtgaggttgatgggaagacttccttcccaaagaaaatagatcctccatgcaggatctaggagagtgactgggtgtgccaaaatatgcccagggtcctgccctcagcactagatttaatggggccaagagggtccaaaccccttgctaacataccacttctttgtttaactcctttacctttccagccctttgaggagggaccatgagaacagaaattaccttatgaaaagctacttctgttcctgctttccctctcacgtattgacggtttatttctttgacctcccagagggctgaactctttcaactctgcgctgcccagccttctcagtggacttgcccctcctaagcagagaaggcctatgaggttgcttgctgctgggaagcctggcagagccaattaccaccctctgctgcttagtgcttgggtacctcttgcaataaccagctcttagttgttccctttccctggggcttttccatttaacacatggagcccttcccccagaaggctacttccttgttttagaggaaggtactgcccattgggagatggggacattgggacctcagcaatgaagaacccttgtgaagtaaccaggaggaatggggaaagaagcaagttgggcaggatatggcctacttccataggcttttcttttttcaggtttgatgtaagcatgggcttacatcccccaggtacatacttttacttattgtgggataacctggcactagtaggcaggtaaagtcacaaatttggtgtctt

SEQ ID NO: 1042 - DNA, 1271 bp, Homo sapiens
tatctctaagtgggacgaaatgatttgagcttagcaggcagcctgattcccaatgtgtaatttcatgcggtcagtgtctccagaggttcttgtactgggcataatgccagggggctgagttgggaatggggaagatgaatgagagacaatacctactttcaaggaaacttctgatgaagcagaatgtggttattaatcagaaaagaggtacaggcaataggttctggggactccaaaaggggcctgactgcacctggctttgtgaagtcacttttctagctggccttgaggctgggcagggtttctgacaggcagaggtggagcaggggggatgaactctgagcagagaagctggaaatgaggggtaagtttgaccaccagacatattgtggaggactagtgtcaggggaagagtatggtgcttggttcagtgatgagagatttgatcagggcactggcatggactgagccatggtcctggcagattcatttggcggcatgctgaaggatttagattggctaggaagagctagaggcaaagagaccttgtaggccttggtacttttgaaggggacatgcaagaagggctggggggtgccaatgggaatggaagaaaggagcagtggcactagatactgcaggattggacccctgagaagctgaagatgagtgagtctggataaccaggagaatggctgcaccatgcaaacaaagagctgctgagaggaagaggaagagttgttcgtgactgttatgctcgctgcttttctcactataggacttggcctggatgattaccttctacgtccgcttcttcctcacttatgtgccactattggggctgaaagccttcctgggccttttcttcatagtcaggtagtattcggtgggggcggatagggactggtgaaggaaatgttggggagtgaccagtctggtctaggggccgtgctggggctttgggtaacagtgggtgtttcaggagttggcttgggaaagtagacaggctggagcagttatctgaggggggaatcagaattctgggctctgtgtgtactgtttttgtctgtgtaatacatctaacaggttcctggaaagcaactggtttgtgtgggtgacacagatgaaccatattcccatgcacattgatcatgaccggaacatggactgggtttccacccaggtaagggacagtcactcagaagactggagcataacacaactattgaaaaggatgcgtaggtgaaaacagcaaaaacaaaaagtccccc

SEQ ID NO: 1043 - DNA, 1457 bp, Homo sapiens
ttctccctttctcctctcctttttctcttcacatctcccccatagcaccctgccctcatgggacctgccctccctcagccgtcagccatcagccatggccctcccagtgcctcctagccccttcttccaaggagcagagaggtggccaccgggggtggctctgtcctacctccactctctgcccctaaagatgggaggagaccagcggtccatgggtctggcctgtgagtctccccttgcagcctggtcactaggcatcacccccgctttggttcttcagatgctcttggggttcataggggcaggtcctagtcgggcagggcccctgaccctcccggcctggcttcactctccctgacggctgccattggtccaccctttcatagagaggcctgctttgttacaaagctcgggtctccctcctgcagctcggttaagtacccgaggcctctcttaagatgtccagggccccaggcccgcgggcacagccagcccaaaccttgggccctggaagagtcctccaccccatcactagagtgctctgaccctgggctttcacgggccccattccaccgcctccccaacttgagcctgtgaccttgggaccaaagggggagtccctcgtctcttgtgactcagcagaggcagtggccacgttcagggaggggccggctggcctggaggctcagcccaccctccagcttttcctcagggtgtcctgaggtccaagattctggagcaatctgacccttctccaaaggctctgttatcagctgggcagtgccagccaatccctggccatttggccccaggggacgtgggccctgcaggctgcaggagggcactggagctgggaggtctcgtcccagccctccccatctcggggctgctgtgtggacggcgctgcctcaggcactctcctgtctgaacctgcccttactgtgtttaacctgttgctccaggatgcattctgataggagggggcggcagggctgggccttgtgacaatctgcctttcaccacatggccttgcctcggtggccctgactgtcagggagggccagggaggcagagcgggagggagtctcaggaggaggctgccctgaggggctggggagggggtacctcatgaggaccagggtggagctgagaagaggaggaggtgggggctggaggtgctggtagctgaggggacgggcaagtgagaggggagggagggaagtcctgggaggatcctgagctgctgttgcagtctaacccactaatcagttcttagattcaggggaagggcaggcaccaacaactcagaatgggggctttcggggagggcgcctagtccccccagctctaagcagccaggagggacctgcatctaagcatctgggttgccatggcaatggcatgccccccagctactgtatgcccccgacccccgcagaggcagaatgaacccatag

SEQ ID NO: 1044 - DNA, 1214 bp, Homo sapiens
ttactcttgggttcaatccagtagctcatctgccccccagtctccttaggcactgattccttcatgctgtgctttgagaaaggaagcctaggctgacgagaccatcttgcctccctgtagatcgtcacagctacctgtctctggggatccctagtataacacattcagtgttcccctttcagtcttactactttgaccgcgatgatgtggctttgaagaactttgccaaatactttcttcaccaatctcatgaggagagggaacatgctgagaaactgatgaagctgcagaaccaacgaggtggccgaatcttccttcaggatatcaaggtgaacaaaagatcctaggggtgtcatacttcatcatctggcagtgttcgggtatcagaaatcacttaaactagcaattgcccttataaagtgatgatacactgggcttttgccttttgtgcttttttaggcttaccatctaaactaaattaggcaaatagtaatgtcccttttgccaaaacgtggtggttagagatgatgggcttgctgacttctaggttagttggtagagatgcattaacctattctcattcagaaaccagactgtgatgactgggagagcgggctgaatgcaatggagtgtgcattacatttggaaaaaaatgtgaatcagtcactactggaactgcacaaactggccactgacaaaaatgacccccatgtgagtattggaaccccaggaaataaatggaggaaatcatttgccttagggattgggaaagctgcccactaactgtcttccccattgttttgcagttgtgtgacttcattgagacacattacctgaatgagcaggtgaaagccatcaaagaattgggtgaccacgtgaccaacttgcgcaagatgggagcgcccgaatctggcttggcggaatatctctttgacaagcacaccctgggagacagtgataatgaaagctaagcctcgggctaatttccccatagccgtggggtgacttccctggtcaccaaggcagtgcatgcatgttggggtttcctttaccttttctataagttgtaccaaaacatccacttaagttctttgatttgtaccattccttcaaataaagaaatttggtacccaggtgttgtctttgaggtcttgggatgaatcagaaatctatccaggctatcttccagattccttaagtgccgttgttcagtt

SEQ ID NO: 1045 - DNA, 1234 bp, Homo sapiens
gcctttgggcaaatctgctgaatgggagaatacagaacctgcctcccaggtggtggtcgggacaggttcaaggagtgcctggctcatgcgagctctcaaggactttgtaaggttaagctgccagaggaaggttggaaggatgtgacacaagggcgttctctgggtttgatggtggtacaggcaggggcagggctgaagagggtgacagagctctctgtagggaggttggagagggtgacagggctctgtggtgggcaagggatggggaggttcatggagagccccaaggcagtgtctggtctgtggtctcctgcaggcaccccgctcagccaggctatcattcaccagtactaccacccaccgaaccttctggagctctttggaaccattctcccactggacttggaggatatcttcaagaagagcaagccccgctatcacaagcgcaccagctctgctgtctggaactcaccgcccctgcagggcgccagggtccccagcagcctggcctacagcctgaagaagcactgaggctggcctgcggccttcttggcagcctcgcctcctgtccatgtctatctgtctgtctgtcggtctctgtcttggtctgttgccctccttcttggcatgccattgtggagggcttggccaggtgtatataaacgtcctctgtgctgggtgtttctgctgcaggtggcaggtggccccaggcctgtttggaggatgggctgggtgggtgggtggggaagaaatgggcccagccccacatggcctgcagacagtgctctgtaaatagttgttttaatttagctgaatgttagcattttagtctttggcattttagcgtttgggaggtagattaataaagtatattccttcaagcctgctgttgataccatgaagactgggcgcctcagtcccagccctgtagctgtgtgtcttgggccaccagtggcctgcaggacgaaggtactgttccatcacctgcggtgtgcctcaggatcaccaggtgcaggcccccaccctcggagatgctgctgcagtgagtggttccactgcctggataacccttgaggaacacgtcagttactgtcacgatggggcaggtggagctccttcctattttttggggtgctccctgtttgtaaaggggagtttgttcattgggaaagacctgggtcttgacacggccctgccacttagtcccctaccctctccattccccaggctccac

SEQ ID NO: 1046 - DNA, 1184 bp, Homo sapiens
tgaagaactcactcagaccttcatgagctgcaatctcatcactggtaagagagtgggtctgagaaggaaggagaacaaggtgtagcaagtgctgtgattccaaaggctgaatgttctcccttgccgcttcaggaatgttccagcgactggacaagctgaggaagaatgccttcgccagtgtcatcctttttggaaccaacaatagcagctccatttctggagtctgggtcttccgaggccaggagcttgcctttccggtgaggaaggtggaggagaggagtctctttagggtggggcagggatataagaagcactgtgttttatttctgagttgatggatgtttaggagggttcaggaatgcttataggaaggagcagttcatgttcacaggagacctggggtctgatgacatgtgtttgagctggaagtaacacaggtgtggggtggtgtctcataacttgaccacatgctggctttttatccccagctgagtccagattggcaggtggactacgagtcatacacatggcggaaactggatcctggcagcgaggagacccagacgctggttcgagagtacttttcctgggagggggccttccagcatgtgggcaaagccttcaatcagggcaagatcttcaagtgaacatctcttgccatcacctagctgcctgcacctgcccttcagggagatgggggtcattaaaggaaactgaacattgaaccctttcctgtcctgcctcctttgtgagtggtggcgtcttcaaggggagtagatatgttgaagcagggtactttctgtgttcgcagtacctcgatatgcaggagagaagacttcagaagaacagaaatagaggcctgtgttcacttgtgattttaattaccctgcctcctacggtgatgactgtcttctagctgggaaagagcggaagcagttggggcgggtagtgacatggggctttgtgactacctaattcttagggatcagattccaggcctttcccagtgaagggagagaatagctgctaataacaagagctaacgtgtataattcacagagcgcaaaggaactttacattatttcctgtaactgtcctgtgaggtaggtagctgacaatatgcaagggttgtagtttctttttctttttttttctttttttttttcagacaaggtctggctctg

SEQ ID NO: 1047 - DNA, 1184 bp, Homo sapiens; identical to SEQ ID NO: 1046

SEQ ID NO: 1048 - DNA, 1128 bp, Homo sapiens
gaaggggcttgactaacttttataccttggtttaggaaggggaggggaactcaaatgcaataattttacagaggtaaaaacatgcaagaatcaaaagaagcaaaatggttacagagagataaacaatttaaaagacaaatggttacaaaaagcaaccgtaccaggtgcagggctctaaatccttcattataattagatatggggctatgcgggacacaactcaaggctttatgttgttatcactttgagaaaaatcctgggaacttcatacattgtttgtgccagtaccttatcagttaattgggctcctttgaaatgctgaggatctgcttaacacaggtcaactccttgtggaagggggttgggtgaggagcccttagtgtcttgtaaattaaagggtcaattggagtttgtccggctttcccagctagagagagagtcttatttacatgagaagcaaggctaggtggttaaagagacaaacagggaagattcaaagtagtgagttagagtaaaaacaaggttaggcatttaacacatgtatgcacacacacatatatgtgttttttggttgttttttttttttttgttttttttttgttttttttttgagacggagtcttgctctgttgccaggctggagtgcaatttcggctcactgcagcctctgtctcctgggttcgagcaagtctcctgtccctgcctcccgagtagctgggactacaggcgtgtgccaccaattttttttttttttttttttagtagagataggttttcaccatgttggccaggatggtcttgatctcttgacctcgtgatccgcccgcctcggcctcccaaagtgttgggattacaggtgtgagccaccctgcctgtccttttttttccccccagacaggactcttcctctatcgcccaggctggagtgcagtggcgcgatctctgctcactgcaacctctgcctctcgggttcaagctattctcctgtctcagcctgccaccacgcccagctaatttttgtatttttagtagaaacggggtttcaccttgttggtcaggctgggcttgaactcctgacctgaggtgatccacctgccttggcctcccaaagtgctgggattacaggcg

SEQ ID NO: 1049 - DNA, 1204 bp, Homo sapiens
ttaggagagatgggggttcaccgtgttagccaggatggtctcgatctcctgacctcgtgatccgcccgcctcggagatcccagcagtttgggaggccgaggtgggcggatcacttgaggtcagagttcgagaacagcctggccaacagggcgaaaccccatctctactaaaagtacaaaaattagctgggtgtggtggcaggcacctgtagtcccagctactcagaaggctaaggcatgggaggctgaggcacgagaatcacttgaacccaggagatggaggctgcagtgagctgagatcacgccattgcaccccagcctgagcgatagagtgagactctgtctcaaaaaaaaaaaaaattgaaaaaaatgaagaaatgggaagtaatccagggaaggatgatgttgtatgaagctattgtctatagggtttgaaaagaaggtgagcactgggacttaggtagagcaaggactcttgctgtgaacagaactcttcagggcctttccactgactttgtttacacccttatgtcctggcaggttctagagccttctttccgccaggcctttcccaataccaaccgctggttcctcacctgcattaaccagccccagttccgggctgtcttgggcgaagtgaaactgtgtgagaagatggcccagtttgatggtgagtctgaggagactgggaggcatatggccaggatcagggtctggtttgctctgcatcaaccccttgatttcctgtcttgcttttgggttatggggacctgcagaatgtagggtgtcaatgtggtagctaatattatgtgcagtttcgtgtacactcataccctgactaatttgtattactatatagatttgcgatataaagtatttgttgctgagtgtgttgttgctggaggacacacagtgaactgatgagcagtctggggcctaagttccttacttgtcccattcgtcagtttcctctgttaccttgcttgctctgtgtggttttggaggggtgtggaaagaggcagaacattcgttcactttcctgccttcctctgcaccagctaaaaagtttgcagagacccaacctaaaaaggacacaccacggaaagagaagggttcacgggaagagaagcagaagccccaggctgagcggaaggaggagaaaaaggcggctgcccctgctcctgaggaggagatggatgaatgtg

SEQ ID NO: 1050 - DNA, 1109 bp, Homo sapiens
ggtagagggtggatgcccagggcacccaaacctcccttccctttcgtgtcgaagggagtgaggagtgaattaaggaagagagcaagtgagtgtgtgtccctggaggggttgggcgccctctggtgttaccacctcgagacttgtctcatgcctccatgcttgccgatggaggacagactgcaggaacttggcccatgtgggaacctagcctgttttggggggtaggacccacagatgtcttggacagttttggggggagggttttttaattttttaaaaattttgcctccctttgtgaaaggggatggggaggggaagagtaaacagataacaggtggtggtacctggttgggggaggggggcgtgcactgccatgtctttttttttttttttttttttttttttcctaattgggggtttctctttctgtccggtgtccggactttcctaattggagtttgaggcccctaagctggcatcaaccccaggccacgctcgctctttccttccctcccctccccctctgccttttgtacgccagttctcagaaataaagatcttttgtccgtttttttaacctcggattctgtaattggttcttatagtaacaaataaaaagctgttttcttcagcttctcctggctcagctgttctttgccatgggtgtgtgttgtgtgtgtgttgggggtgtctttgagagggaaaataaaggacaaaggacaacaaaggaggtacagatggttcttgccctgggaacagctttatgagataggcagcctggacccaggcggcttgctccagctaggcttcttgtgggacccaaactgctccccagctcccagtggtgctggagctcaagaaccatcttggcccagattcattcaaaggagttgagatgagctttctggatgactggtggcctccataggaaaggggaatgggggtgtttcttcctctgtttcccacctcttactcccctctcccttttgtttaaggaattctggaagttgctagcagccagggtaacatgtatacccccttgggggtggtggtggggttataggaggatcccctcacctagctgtgtggtgtatttggcagacgagaat

SEQ ID NO: 1051 - DNA, 1208 bp, Homo sapiens
cagggcgagattagagttggttgcaaataccaagctgagatcccagatcgcctagtagagggtaagcaacaggacaagactgtacggctaccaggttgtctaattccaaggggcactttaacattatagtctctgtgaatggcgtcacctggggttgtgcagtgcactgtctgcagggctctctgccatgaccctgacagaatgggcctgtaggaacctgaaaagggaaaatgggaacagttgggaagagaagtcggagagttgatagaatccaagcagaagaagagaaggaggaggtgctattgtgaatgaaaagacaccaactgttcccccctgccctctccctgttgatgccattgttcttttccccaggagaatctgataatcggaaccagcagaagatggagatgaaggtctgggacccagacaaccctctcacagaccggcagatcgaccagtttcttgtggtggcccggtgaggggtgggtggatagggaagatgggctgggggaggtgtggacattgttctgagtcccatggttcttagagatggactttatttctttcattgccatggatgttttccttctttctcctttggcttaatttcccagcccacttgggcttttgacttttctttcgcttttgacttctcaatttctcccttagagctgtgggaacctttgcaagagccctagattgtagcagctccattcggcagccaagcttgcacatgagtgcagctgctgcctcccgagatatcactctggtgagcagaagttggtgggtagttgggcaggctgggttttctggggacttgcagagcctgggaacagaagaggagggtatctctgagggagtgggagtgttttttttttgtttgttttgttttgttttgagaggagtcttgctctgtcgcccaggctggagtgcagtggcgcaatctcagctcactgcaagctccgcctcccgggttcacaccactctcctgcctcagcctcccgaatagctgggactacaggcacccgccaccacgcctggctaattttttgtatttttagtagagacggggtttcaccgttttagccaggatgatctcgatctcctgacctcgtgatctgcccgcctccgcttcccaaagtgctgggattatgggtgtgagccaccgcgcccggccgggagtgggagtgttttaaggagcaggaagg

SEQ ID NO: 1052 - DNA, 1132 bp, Homo sapiens
gggtgaggggctggaagcagtggggcagagtgagccaggtggctctttctgctgctcccttccccggaccacccctctgtttcttctctcccgacctccgttagatgcgctggacccgtggtgtctcagtgtggcctgtggggctggtgggcggcctgcgattcgagggccctcaggtacaggacggccgggtagtgggcttccacacagcatgggagcccagcaggcccttccctgtggatatggctggatttgccgtggccctgcccttgctgttagataagcccaatgcccaatttgattccaccgctccccggggccacctggagagcagtcttctgagccaccttgtggatcccaaggacctggagccacgggctgccaactgcactcgggtaagggaatggagatgggcatagaaacctggctcttggatggacaggtgatgggggaggtacagtgagaccctgggaatgggtggtttaaccaggagggactctccagatctctgatcagccttgctgactctactgaaggggaagctgggaactagcgggggaaagtggtctcctgccactctgccccgagttctgggaacccatgtggcacagagaggatgaaggaataaggccctgtttgttgtttttttttttttttcagacagagtctcgctgtgtcacccaggctggagtgcagtagcgcaatcttggcttagcgcaagctccgcctcccgggttcacaccattctcctgcctcagcctcccaagtagctgggactacaggcacccgctaccacgcccggctaatttttttgtgtttttagtagtgacggggtttcacggtgttagccaggatggtctcaatctcctgacctcgtgatccgccttcctcggcctcccaaagtgctggggttacaggcgtgagccacgcgcccggccaaggcccggttttagaggcactaagtcttcctccaccctgccctttacactttgaagcctatactgtatatgtcgatagggttagagaatccattccaggctcggggacccagaggcctggctgcagctgggcctggctctcactgcatccctcctggcacaggtactggtgtggcatactcggacagagaagc

SEQ ID NO: 1053 - DNA, 1226 bp, Homo sapiens
ctgcctttctcttctgggatgttgacagaggctggtgttcaggcctgtgcctcctggtggcacttattcctcattttcctttctcatttctctccccatcctttgcaaacttatctgctcattgtgggttccctctccaagctttaacatttagtcccttcctccaatgccttcgttcctttggacccttggctctctattccccaacccctccttccactagcccctcgtccctgccccctctggattggagcagacagctctcctaccttccaggcaaggatcaaaagacccagctgagggcgatggggcccagcctgaggaaacacccagggatggcgacaaggcaagttggagcgggtgggtggttggaggatagggctggctgggagggtggaggggagaggcccatgagaaacttgaacttagtctccccatcagggatgggatttagttgatgggagcggggaaagagagaactggtatgattggagagtggtcctcttttcttcttaacagccagaggagactcaggggaaggcagagaaagatgagccaggagcctgggaggagacattcaaaactcactctgacagcaagccgtatggtgaggggctcgggttccttgggctggggtgcagggctcctttccaagcagaagctctgaagcttgtttgtttttcttccaggccccatgtctgtgggtttggacttctctctgccaggcatggagcatgtctatgggatccctgagcatgcagacaacctgaggctgaaggtcactgagtgagtcctatggtgacatcaggaagatggaggtgggcaggaaggagtcaggcctttagggagatgggtgtgcatattggatactctaggcaagcatgggtcatttcttgtgtccagaatcacctttggtgatagaaaattttttgagaaaggacaagaggagcctttgcttatctctcacctgtgtctgtggagtggtgttagcatataacgcagcctggggccagttagcagcccaagtctgtctgtttgcctgcaggggtggggagccatatcgcctctacaatttggatgtgttccagtatgagctgtacaacccaatggccttgtatgggtctgtgcctgtgctcctggcacacaaccctcatcgcgacttgggcatcttctggctcaatgctgcagagacctgggttgatatatcttccaacactgccgggaag

SEQ ID NO: 1054 - DNA, 1334 bp, Homo sapiens
aagaacgcggacacagactatggtaggaacggcctttattggctgcagcgggaagtggaggagggtatacagcgtccgcagacctgaaatcaaatgagaaagtgtgagcaccccgatggaggagccagctggatctcggttgtccttctccgagattcccggtgtcccggcgtttgaggatagaaccagcggatgggaagccgccagcaccgaagacatgacgccgagggggccagagccctttccctcttcctccgtacattacggggagcggcaccacaagcccgatccccgccaagaaaaggagggtcctgagaccccgcccagagccttccacccggcacccccaccactcccggccgcccaatctggctactacagctaaaaccacacttactagctcaccaccctccgaaaggcctcccgcaccgcggagctcctttatatagcccgaggacccgcccccgagttgcgattggcccgcggaaggccggggcggagccccgcggatccggcgctgagcggaagtacggaccgtgaactggagtggaatcgcgactatgggagctccggggggaaagatcaaccggccccgaacggtgactgtgtgggggccgcgactttgtttcctcaagcgttcctgagcccttttatctcgcacgagatgggatcagtgaggggccggggctgcctggtggaggggccccgggtcgcggcgagcccactccatctgattcgcatctttctccccggcaggagctgaagaagaagctgttcaaacgccggcgggtgttgaatcgggagcggcgtctgaggcaccgggtggtcggggctgtgatagaccaagggctgatcacgcggcaccacctcaagaagcgggcgtaagtactagaccctcttcctgttggtcgtccccaccgagtcttccttcctccctgcagagctccggagcagcttcacctctcagctcaccttgtgcactgacgcttatgcggggaatgtctgtcggctgttagttcctaagctctgatagcctctcacaatacctgtagcagacaacctttctttgggttttggattctgttaagaatctcaggaaagccggggatggtggctcatacctgtaatcccagcactttggggggctgaggtgggcggatcacctgaggtcgggagttcgagaccagcctgaccaacatggtgaaaccccgtttttgctaaaaatacaaaaattagccaggcgttgtggccggcacctgtagtcccagctacacgggaggctgaggcaggagaattgcttgaacctgggaggcggaggttgcagtgagccgaga

SEQ ID NO: 1055 - DNA, 1196 bp, Homo sapiens
cttggtctatcacagccccgaccacccggtgcctcagacgccgctcccgattcaacacccgccggcgtttgaacagcttcttcttcagctcctgccggggagaaagatgcgaatcagatggagtgggctcgccgcgacccggggcccctccaccaggcagccccggcccctcactgatcccatctcgtgcgagataaaagggctcaggaacgcttgaggaaacaaagtcgcggcccccacacagtcaccgttcggggccggttgatctttccccccggagctcccatagtcgcgattccactccagttcacggtccgtacttccgctcagcgccggatccgcggggctccgccccggccttccgcgggccaatcgcaactcgggggcgggtcctcgggctatataaaggagctccgcggtgcgggaggcctttcggagggtggtgagctagtaagtgtggttttagctgtagtagccagattgggcggccgggagtggtgggggtgccgggtggaaggctctgggcggggtctcaggaccctccttttcttggcggggatcgggcttgtggtgccgctccccgtaatgtacggaggaagagggaaagggctctggccccctcggcgtcatgtcttcggtgctggcggcttcccatccgctggttctatcctcaaacgccgggacaccgggaatctcggagaaggacaaccgagatccagctggctcctccatcggggtgctcacactttctcatttgatttcaggtctgcggacgctgtataccctcctccacttcccgctgcagccaataaaggccgttcctaccatagtctgtgtccgcgttcttttttccgggactgcagagttcggggaagctgtacgccgcctttcgctacgcggaatttgcagatcttcccctggacctcaggcctctccggctggagtagggtggacgcttcacataagcttctctggtcgaacttacccgaatctccagatggccgcgctgcgtcgaatgctccacttgccgagcctgatgatggggacgtgccgcccctttgcgggtagggaggtgggggcagagtggagagggcaaggtgggggcagagtggggagggtaaggtgggttcctcgtgagtcaggagtgtagtccctgaaattgtgattctcaaaccctacggtgggccgtgcgtggt

SEQ ID NO: 1056 - DNA, 1196 bp, Homo sapiens; identical to SEQ ID NO: 1055

SEQ ID NO: 1057 - DNA, 1177 bp, Homo sapiens
tgctactcagttggtcacaatatctaatagttccctttctgacttggccaggtaacccagaatctcccaatgaaagaaggctgcacagaggtctctctccttcgagttgggtggtctgttgatttttcccgtccacagcttggtaaagttatttctttaagttcctcattagtgtttactaccatattgcttactctatgggaagtccggttgtaggtaactaatttgttgactgttctaggtgaagatgaattctcttacggtttcgatggacgaggactcaaggcagaaaatggacaatttgaggaatttggccagacttttggggagaatgatgttattggctgctttgctgtaagtgctcctgaaagttgtgggttataacaaggagcggatagagggcactgggaattcacttgtgcttcccatcaactgctggcttttatgcatgtgatgtgtgtggctcgcttagttactttgtgcagcagtctgtgtgaaaaaagaataaattgtaaagtttaatcaacccaaagcctcgtcagccaataagtgctcttgtcccttgtcattgtagaattttgagactgaagaagtagaactttccttctccaagaatggagaagacctaggtgtggcattctggatcagcaaggattccctggcagaccgggcccttctaccccatgtcctctgcaaaaattgtgttgtagaattaaacttcggtcagaaggaggagcccttcttcccaccaccagaagagtttgtgttcattcatgctgtgcctgttgaggagcgtgtacgcactgcagtccctcccaagaccatagaggaatgtgaggtatgccaaacagtatacgaacactgaggttgtatgctttgcagaggtgggtgcgtatgctctccagggtctcagagcgttaccaaacaggaatgggaggatgttcttaaattggttttgataaacatgaccctcatttatttttcattatatttctggttctgttttttgcaggtgattctgatggtgggactacccggatctggaaagacccagtgggcactgaaatatgcaaaagaaaaccctgagaaaagatacaatgtcctgggagctgagactgtgctcaatcaaatgagggtaagttgctgttggggatttgtcggatacagtatttggaga

SEQ ID NO: 1058 - DNA, 1177 bp, Homo sapiens; identical to SEQ ID NO: 1057

SEQ ID NO: 1059 - DNA, 1218 bp, Homo sapiens
tgccaggctagagtgcagtggtgcgatctcggctcattgcaacctctgcctcctgggttcaagcgattctgctgtgtcagcctcccaagtagctgggactacaggcacccaccaccatgtccagctaatttttgtctttagtagagaaggggtttcaccatcttggccaggatggtctggatctcttgacctcatgatctgcccacctcagcctcccaaagtgccaggattacaggcatgagccaccacccccggcctattttttttttttttttttttttttagagacagggtcttgctctgtagcccagactggagtgcagtggtgtgatcatagccttgaactcctgggctcaagggatcctcctgcatcaacctcttgagtagctgggattacagcttgaagcaccttgcctggccctaaataaatatttttaaaggaacctttggacagaggaatatgttaaatgaaactacggggatgtaagcagcaaactccagaccctcaacccgtaaaacaaccccagcttcttcaacaaataaattgcaaggaaaaagggaagggaaacctagtaaaacttaaggccaggttcagtggcgcacgccaatgatcctagaactttgggaggctgaaggggacagatcttttgagcccaggagtttgagaccaatgtgggcaacatggcaaaaccctctgtctacaaaagatagaaaaattagctgccactagggtgcatgcctgtaatcccagatattcaagaggctaaggtgggaggatcacttgagcccaaaaggttgaggttgcagtgagctaaaattgtgccactgcactgaagcctgggcaacagagtgagaccctgtctcaaaaagaaaaagacagttaagagacatcaatcaaataaatgcatgacactactttggattctaattggattctcattgggaaaaagagaaacttgagtaagaattattgtcagggccgggtgcggtggctcacacctgtaatcccagcactttgggaggcccaggcgggcggatcacaaggtcaggagatggagaccacggtgaaaccccgtctgtactaaaaatacacacaaaaaaattagccgggcgtggtggcggggcgcctgtagtcccagctacttgggaggctgaggcaggagaatggcttgaacccgggaggcagagcttgcagtgagccgagatcgcgccactgca

SEQ ID NO: 1060 - DNA, 1243 bp, Homo sapiens
agaagtgggaagattgcttgagcctaggagtttgagacagcctgggcaacatatcaagactctgtctctacaaaaagtttttaaaaattagcctagcatggtggtgtgcacctgtggtttcagcaacttgggaggctgaggtgggaggatcgcttgagcccaggagttcaaatttacagtgagctgtgatcgcaccactactttccaacctgggcaacagagtgagaccctgtctcaaaatttaaaaagcaaaaaacaaaaacacaacacttgaggggacaaagaaaaggcaagatcactcttttgttttttttttttgagacagagtcttgctctgttgccaggctgaagtgcaatggtgcaatctcggctcactgcaacctccacctcctgggttcaaacgattctcctgcctcagtctcctgagtagctgggattagaggtgcacgccaccatgcccggctaatttttgtatttttagtaatgacggggtttcaccatgttggtcaggctggtctgaaactcctgacctcgtgatccaccggcctcggcctcccaaagtgctgggattacaggcgtgagccaccgtgcacggccgtaagatcactcattttttttctaggttggactcttcacagaaattgggcccatgtcttgcttcatctctcgacatgtaagtctgggcacactgggtggggctgaggaagacagatactcattcatcaccatctattgaagcatccatttaaagtgctaacctagatctcactttcctttcagtccatcccttcagagatggagtttgatcctaactccaacccaccatgttacaagacaatggatgaggtgagtggacagaaagaagtcagggagacaaggagagaatcagccatcctgagggagaatattggcctggggatggctgagtacagatggtccccgaattaccatggcttgattcatgattttatgactttacgatggtgtgaaagtgatgtgcattcaatatgcccccgggcttacagtgaagtgattgtgatgtaacttctcataaactgaggagcatctgtacactgttccctcctctcctcaggatattgtgattcagcaggacgatgagatccgcttaaagattgtggggacccgtgtggacaagaatgacattgtgagtcttttccccacctctctacctataccaggttgagctgagaactgtcgatttcttttttcttttttttttttt

SEQ ID NO: 1061 - DNA, 1099 bp, Homo sapiens
gggggaaaatgtccccttgattcagttatctccacctggtcccgctcttgacacgtggggattattaaaattcaaggtgagatttgtgcggggacacagccaaatcatatcagtcatctcattttcacagcaaccctgtgagctagagagggcaggaattattgtgcctgttttacagtttaggacacaagggctcagactgatgaaggccttggccaaattcacatagaaggtgacagggcaggaatgggacctagttctgtgaaccccaacactttggactttgtctagcttcaccgttcttgacccactggccagtctgtttccttctctgagcctcactttcctcatctgggtactcagagctccttgtttagaaactccagagcacgagcagcaaggctggtgtggagggtgttggatcacactcctgggctctccgggaggctgggcagcttttccagtcttcattctccactcccagctccactggggccatgtcagagcgagaagagcggcggtttgtggagatccctcgggagtctgtccggctcatggcggagagcacgggcctggagctgagcgatgaggtggcggcgctgctcgcagaggacgtgtgctatcgtctgagagaggccacgcaggtacactcccctcaccccctgatacctccaactttccttgtttctgcctttttactaacctccaccctcgctgatttattcaagtgtacactgggtgcctgctccatacaacagagacagtccatgcctttacagaactctacttgtagctgtctgggcttccagcagacaaagcgcttgccaggcatcttcccatgtgctcctcacaacagccctgttgggcaggcagagcgggtagatactcacattctgcatgtgagaaactgaggtgttgacagaagatgtgacacccggggggtgtttttgtacaggagcagagacggaatctaggcttctgatccctaagcgtggtctcctgtttgccttctctccagtctggcccacttcatttggggtttcccatgccccctgcttcacatcctttgactctggcttttgttccctccctcccagaa

SEQ ID NO: 1062 - DNA, 1099 bp, Homo sapiens
actcggtctcaaaaaaaaaaaaaaaagttggacattcaggttgtattcagggccatatgcaggtatatgtgaatgagtttctgtaggttacatttatagaaatagaattgctagatcaaagaatatgaacattaaaattgtaaaacatgaataaggtgatacactgtcttccagaagaataccgcattcatgttttacaattttctggtggatccaatgcagtctgggcccttccttttaggttgcactccaggacttgcagacgaactccaagattggggcactcctgccttactttgtttatgtggtcagtggggtaagtgaccaggctgggacagggagaatgttttataaggaagagatgacccagcaggtgtagggctcatggcaagtgctgtcagaatggtgggctcctgcctgtcccctcatgtccctgtaagctaccctcttctcccaacaggtgaaatctgtaagccatgacctggagcaactgcaccggctgctgcaggtggcacggagcctatttcgtaatccgcacctgtgcttggggccctatgtccgctgtctggtgggcagtgtcctctactgtgtcctggagccactggctgcctccatcaaccccctgaatgaccactggactctgcgggatggggctgccctcctgctcagccacatcttctggtagccactgggcctaaacctgcgggtgggattgctgcagagccaagtgggttggggtaaggaaatggggcgaagcctctggctttgagagtctatgagaagatggggaaccttttccctaggagcgtcctagctggtgtgctgtgacacactgggattctgaaaatggattacaaatacgccaaggtattggttcttcagccctcaggtcctaggccagtcacccctggcagccttcttcacttaaccccagcactcccgagtgtgctgtacagatgctattctctttgtgttgtcttgtgccctgttgggtggcaccatgcctcattcccctccctaactgaatggtgctcccacaggactcatggggaccttgtaagtggcctctatcagcatatcctgctatccctgcagaaga

SEQ ID NO: 1063 - DNA, 1178 bp, Homo sapiens
aggtgggaggatctcttgagtccaggagtttgaggctgcagtgaactatgatcatgccacggcactgaacttgggtgacagagtgagaccctgtcccaaaaaaaaaaaaaaaagaaaaaattttaaaagattagaaaagatctcagagctaagcgtagggactgggggtatggggagccagctggctgtcttcaccagggtctcctccctttgttccttccaccctttgcagttgaagtctgagcgggaattggacaagataaaggggctgaagctagaagagctctggctcgatggaaactccctgtgtgacaccttccgagaccagtccacctacatcaggtcagttgtagcctgtgtctcccctcctggggaccttcaccccctgggaggctgagctaatgcatcctgaccagggcccgtctgcggagatgtgcagccctgagctggaaccacctgtcctttgagaggatcgcgtgctccccactttggtctgtctgtgtcttccagctttgtcctgagatgttctctcttctcttctgacttgactatctgtttgctgggtctgtggcctttctctttcttcctgaacacaaccttttctagaatctccctaccctgttgttccaggaaaggcatctcccctttctactctaaccagagggtatcttgtacataccctatagatggggttgccttgtgccaagagcctggtgtccatgggttgaggaagccctccctacctgggacttcctactgagatgggccttccctcctttgtactgtgatggcccctcttgcccttgcgccaagagggacccttttctcaggatccacttgcccagggctgttgctgtccatgctgaggttgaggcctcctaggggctggtggcatgcaatctgtctctcttgcccagtgctatgagctgggctctccctgaagaagaaacctgggttccccaagatgtgaccagagctggggccccgccagcaggcgagggaatcccaaggcaggtgctgggcgtggaggccacgggggcataggctaccaaggagacagagaactgaccccctcgggggcgctgcctctccctcactcacacactgcacgtcaccctgtttggccccggtggatggctggttagccagagacgggtaagattcctcagggaaggaac

SEQ ID NO: 1064 - DNA, 1308 bp, Homo sapiens
ggagagtgagtgtcaccatttcccccgtttaaatggggaggaaacaagagcctaaataccaagcccaggccattaagtcaggaactggagagcagggagcccaacctccttttttggactccaaaacctgtgctttgacaccgcgccgcggcttctcccaagaaaggtcccggagaggggcgccgccacctgcagcactgtcccgccgccccctggaaagccgaaaaacccctaggatgggagactaacgccacaatcggggaaaaggaggccacgcgggcattgaaatcacgactggtgtgtggaccaatcccaggatcctaaaaaagcgaaaggggcgggtttatgcaaaacaaactgagcagggagcaggcggcggaagaagtagaggacgtttaaatagggctgtttccaaaatatagccactactataaagaaagaataatgaaaactgtgtttcggaattataatgtattgggagataatttaacatttagtgcctggatagttaccataactggttggaagatgggaaggataaggccgccgaggcgaccgaagtaaaggtatcgcttctcggccttttggctaagatcaagtgtagtatctgttcttatcagtttaatatctgatacgtcctctatccgaggacaatatattaaatggatttttggaaataggagatggaataggagcttgctccgtccactccacgcatcgacctggtattgcagtacttccaggaacggtgcactctcccttcggggagagaacaaccgttgtttaatggaagatttcgatcagttagggtacaagctaaatagttatgttcttgttgtttgagttggattaggtgtttttatcgctagtgtgttgaatgacgcgtgtttgagtgtcttgttgagagaaggttttgttttataactgagcacggagcgtagtatctccatgtggtcttcagcaatcttcatacttcagcctctggggtagttggaactattgagcgcttgccaccacccccggctaatgttttccatttttatttcttatttattttttttgagacgtcgtcttgctctgtcgcccaggctagagtgcaatggcatgatctcagctcactgcaacatccgcctcccgggttcatgcgattctcctgcatcagcctcccgagtggctgggactacaggcgcccgccaccacgcccagcgaatttttatacttttaatagagacggggtttcaccatgttggccagggtggtctccatctcttgaccttgtgatccgcccgcttcagcctcccaaagtgc

SEQ ID NO: 1065 - DNA, 2410 bp, Homo sapiens
aactggagaacgcagggagtggggggtaaccatgtctgaggaatctttcacccacagctttgtttttctctaggtactactaaccaataacctgcttggctcaaaggtgagtaatttcacggtattcaatgcactcagtatatagggtaggaaaaagtgcctttttaggcctgtgtttgtgatgacttacatggaatctcgttcggctgatgacttgctgttgagactctgaaatctgattttctgagaatgatgggtgggaacaacataatgcgggatatgagaagcactactgacttggtcttcctcctttcagggccagcaccttctctctaaagcccaagaggagtttgaggtaaatggctttgcaatagttaccatcaatggctgctatataaaattttctgtgatttttgtgtgtgatagcactgtggtctgggtgaatgtacacagacataactggcttaacccaaagtctttgatctcctgaaccaccagtgatgaattgctgctcaccagtgatgagttgaataccgccccagtctgatcaatgtgtgactgaaaggtattttctgagctgtgagcctgccttccagtgacatgttctaaaaattgcaagttatttgaggaggctttacagccaataggaagttcttgggctaagtagtgtttcctataaaatgtgccctgaaacttctttctgccaagcaatagatacaattgagagattgtaaaatgtgacatagaatgaaagtctctcaagactacatttttctttcttgattttgcaggaaaactaggtgtctgtgttcactccaggctgaagttacaggtgagtaaacctaaatgtaaggtggactatgctaaaaattcccaatgaagaaactttcacatgtcttactctctgtcctagtcccagagcctgtaaaggtgaacccactgggactggctgggggagaagaggaagatttgttccagaaggaactgtctgagggatgataaagatttctatacagagaaagggagtaatcatcacttgttgaaaacattggttttattttttccaggtctgagcaaataaggtgtataaaaaatggtaggtatctgtttaaatatttaactgattttataatagcaaccttttgctcctaggttacatagtgttaaatattgtgttcatttgtattttccaatccaataagaacttttttttttacctctgcaggaatctgtcttggaggacatcagaaggtgaattttccaagttcttggacaacctagctgttgaaaagctttctgggtttggggggtatttcagatgtaccttaaagtgttagcagacacagattaagacactgggagccaatgaaacagcagttgagggtttgctgtgtatcacatttctgtattttatcacccccttcctgcaacattatttatctggaatctacctgcccttttgttttttagatacaagggcttggttttgttacccaggctggtttcaaggccatagctttaagagatcctctcaccacagatttccaaagtgctgggattgcaggtgtgattcatggcacccagactttgctgcctttcttacatgatccaggcccagaacccaaactcaggcactgtatagatgaccactttcgtaaactactgacctagcttgttgccaattgttgattgaacttcccataactccacttcgtgtctgttcctctgtatacagccaccttctgttcccgtcatgagcctttaggtctccatttgcatattgcaaatactatgttccatgtaggtagctcattcagggccttgctcttcacttcaaaaaaggttcccttgaggactggctgtcaatttgtgttgctgtgttggttgttgatgaaaataataaaatgattgattacatagtcctgtttactttttttgtgtgtatgtgtctcttagcatcagtgtgtaaatttccatgggaaactggctttcctctcatgctccctgaagtacctggaacttgaagggacatctgacagtttgcctgataggcagtgtgttaaatgagtaacctgagtagaacatccatcttttttttttttctcttgcctagtcttagagtacagtgacatgatcacaacctcactgcagcttcaagcttttgggcttaagcaaacctacttgactttaaccagcagctggggctgggactacagacaccacacccagcccaaatctgttttttcctgggggaagcaagggacaatggagtcaagctggagtgcagtagtgccatctcgcctccctgcagcctccacctggattgagtgattgtcctgcctcagccccgagtagctgggattgcagatacctgtcacgaagcaagcctagttattgggattttagtaga

SEQ ID NO: 1066 - DNA, 2410 bp, Homo sapiens; identical to SEQ ID NO: 1065

SEQ ID NO: 1067 - DNA, 2410 bp, Homo sapiens; identical to SEQ ID NO: 1065

SEQ ID NO: 1068 - DNA, 2410 bp, Homo sapiens; identical to SEQ ID NO: 1065

SEQ ID NO: 1069 - DNA, 2410 bp, Homo sapiens; identical to SEQ ID NO: 1065

SEQ ID NO: 1070 - DNA, 1574 bp, Homo sapiens
ccgctcctgccacatgcactgggtgagaaaaccaagccgcaatgcggtcggtgagccagcacgctcccgtaggacgcatgcgcgcctttttcgcgccgcaagttcaggtggcgctttgtctacgccctccttccctggaactctctacccacaactccccggggtcgcatgcggtcaacgtatgcgcgtgcgctcgccgtagccccgcccccaaatcccgtgggcctctgcggcatggtatttaatcgtctccccggggagattcgttctcatttttctactgctcgtggtaagtggcttcgtggtctttatagctgttactcttttgtactttgtctttttcttttattttcttttgagcgattgtgcgaacatagcatagcacgcactatgccttctgtgttgtagctgcctggccagggcgactggcggataaggtcttgtgcgtggcctcgaggcttaaaagtagcagtggggctttgtgaaggacaaaatggcgatggcgggccgtgtaggtcccccttcctatgatgaggaccttttcacagacctgtactgagctccgtgaggataaataactctgaggagatgggccctgcaagcctcttgcttagccgtctgttcagaaaatagcgttttcgaaatgccctgagttgacctaatgtcttattgggctcctgtctgcaggatttacgcgcacgttggaaccgaagagagctctgttgttgcagtaagttcttacggccatttcttaatctctgctctttcgttgagtgtgtggaagttgctacggggatgattttacgaactgaactctctctttctgatggattagtggagaaaacagaaaattctgagtagcactgtactgtacgcaacaaatgtcagggccctattgatttgtctgaggtgttagtgaagggtgttattttttcagatgttcagcccacaagagcttactggtgaaggaatgggacaagacccatctttatgcaaagccagcgttacagtaatgttccaggtaggtgtacatggtttatgctcttacagaggagaccttgtagataaccactccatgatgaacacaaaatgacaagcatatggctgaactttcaagtgatgtcatcttactactgagaagtgagagagaggtcttaaggggtctttgaatgactatttttaggtacataaaatgctttcctctgttgtctacagcatctcataatctatcctggggaattcagctgcctcccagggtgaatacaggtaattatccaaattggtgtatgtcatctttgtaaatgttcaagaaaacaagtggccggcggaacaatgttttttggcgccttccatcttgttcctcttgaaatgattttctggggagggagatcgcaacccggtactacagttcttgtaagggtgtgctgttaccctcatccatatatcgatcacgttactgtcagatgatttgaattgataagctgatgttctgtgaggtacaaaagttaatagcatgttagagttctgatggcagttgttgtttatgaataagcttcattccatcctaatacctt

SEQ ID NO: 1071 - DNA, 1574 bp, Homo sapiens; identical to SEQ ID NO: 1070

SEQ ID NO: 1072 - DNA, 1574 bp, Homo sapiens; identical to SEQ ID NO: 1070

SEQ ID NO: 1073 - DNA, 1574 bp, Homo sapiens; identical to SEQ ID NO: 1070

SEQ ID NO: 1074 - DNA, 1574 bp, Homo sapiens; identical to SEQ ID NO: 1070

SEQ ID NO: 1075 - DNA, 1175 bp, Homo sapiens
gagttctaggccaacgtatttttctcagtacttcaaaggtgttgcccctttgcctttttgctgacattgtttcttttttttttttttgagagggagtctctctgttgctcaggctggagtgcagtggtgcgatctcggctcacttcaacctctgcctcccgggttcaagcaattctcctgtctcagccttctgagtagctgggactacaggcgcgcaccaccacgcctggctaatttttgtatttttagtagagacggggtttcgccatattggtcaggctggtcttgcactcctgacctcaggttattcacctgcctctgtttcccaaagtgctgggattacaagcatgagccactgtgcccagtctgctgacattgtttctgacaagaaatacactgttattcttatttttgttcttttgtacctaatctgtcttttttgtctggttgcttttttctttaaattaaaaaaaattttattttcgtgggtacataggtatatatatttatagggtatgtctggttgcttttaagattttatcactgtttttgagcaaattattatgtgttttgatgtagttctttttttttttttgagacggagtctcactgtgtcgcccaggctggagtgcagtggcgtgatctcggctcactgcaagctccgcctcccgggttcacgccattctcctgcctcagcctcccaaggagctgggactacaggcgcctaccaccacgcccggctaagtttttgtatttttagtagagacggggtttcactgtgttagccaggatggtctcgatctcctgacctcgtgatctgcccgccttggcctcccaaagtgctgggattataggcgtgagccactgcgccaggctgatgtagttcatgttatttgtatgtgggttttgttgagcttcttgaatctgcagatttataatgtttatcaaatttggacattttaaggttattatttcttcaagtttttttggtctgttactccctttggagactcctattacatgtgcctcttgctgcttgaagttgttccacaagatgttcatttaaaattctttggccggcgcggtggcgcacgtctgtaatctcacactttgggaggccgaggtgggtggatcacctgaagtcaggagtttgagactagcctgaccaacatggt

SEQ ID NO: 1076 - DNA, 1221 bp, Homo sapiens
ttgctctgtcacccaggctgcgatcttggctcactgcaacctctgcttcccaggttcaagcgattctcctgcctcagcctcccgagtagctgggattacaggcgtgcaccaccatgcctggctaatttttgtattttttggtagagatggggttttcgtcatgttggccaggctggtctcaaactcctgacctcaggtgatccacccacctcgacctcgcaaagtgctgggattacaggcgtgagccactgtgcccggccaacactgccagattttgagactaaccaggaagttcatctcgggcaggcagggtctgggcctgggcagcgtgtgctgtgtgctcacctgatggggtgtcaccatgtgccaagccaggtatgagggatctcacgacttggtgggctcctgggacatgatcccttctccccatctgataagctcaggaggagcctagaaatatacagggtctttgtctaggggacattaaaagacaggtgtggtggacagaaggcagtggccaaggcttcaggatgccttgtatctagtgtggctcccccactgcatgatggcaggcaggcaggccggccacggaactcccatgtctcaaacaccattatccacagattggcaaaacttgtatcctacctgataggagggaataaataatgctaaaaatctggttctgcaagcacaaatactgcaaatggttttctctcatcctttcaatcctgtgacttgtgtttacatttatgccaatgtgcttttaaaacaacatggctgtgttgctgggtgtttacacttgagaaaacgtatgtaaaagtttgttgtaaaattgtgaagccaaatgcccctttgctgttctatgattaatggcttggccttctagactgtgagctcctgggcagggaccaggttgtattgactttgttttccaagtgtcctgcctggggcctggcacatagtaggtgctcaataaatgtttctcgagtgccctctgagtgtgtattcctgtgtgacatttttctagtgcatgttggtccctggagtgtggttctcagcacagggtggttgctacagtgactgtgcagggtgggaacttcatccccacattgtggccaataggggtctccccagcctcagccagggccctggggactatgtgagtgtgtgtggccagcagctgtgtgtggcacctctgggcttccaggaaagagttggaga

SEQ ID NO: 1077 - DNA, 1206 bp, Homo sapiens
cgcagcaccgggctcagagccagttaatcaagtcccagggagcatggcgcaggcatgtcctcgggcggggggaacccgatggggccgggccacctcggcctgcagtgggggcctacaggtgactccaagagcagaccacagactagggcactccacagcctccagggtgtgcttgctgccgggaggccccgcccccacccagagccaaagcgaactgtgccgctccaagctcccaggtccaggctcgggtcccccactcagccccacatggcgttcaaaggcccctgtttgctgggagcaggtctgggtcccttgggtggggctggatcatgagccccagcttggactcgcagtccagtgcccatcccccacctcacacagccactgcccgcctgaagccaccacgccttcagcaagaagagccctttgaggtgggcatgttgggggtcaagaaaaggagctgtgacaaccagtgctcctgggcccacctgcatctcccccagtccccgggtactctgtgagcctcagtttcctcctctggaaactgggttgatgacttgttgtgtaaggaccagagcctcccagcaaactgaggggggtggtgcagtagagaggggacttagaggctcaagccggtggccaggaactagctgaggtgaaaagggccggccacaggccaagatgttggggtgcacggaggcctgaggagcagggagacctgagaggccctgccctgggctgggcgggctgggtggccacacccagaagcctgtctgttggcattggctggcacagcctccctaggctcttctctgcaagcctccgggccattcccctgcacagcctggcccagctctccggccttggaggcagctttatgggggaaccatgtggcttggtgtcgaggcccaggggccagaacgggggcccagggaaaggaggagctgaggaactgggtcccagccaccaggttggccacctgacccccagagcccccccacccgtgggacgtcaggcacagggggctagagaagggggcacagtagactggcctcccggggcacccactgtgcgtgggtggcctgggaccaggtcctccgtgcatccaagtctgagcccccagcactgggccgcagccactctcctgcctgtggcaaatcccatctcctggcctggcctcccccagctccacccagcaaagtcttc

SEQ ID NO: 1078 - DNA, 1264 bp, Homo sapiens
ccagaagcccctgtggtagacatctgcccttacctacgggcttcaagaggccaggggacatagtggaacccttgtccacccttacctgatgtgtttctcaccatccgtgtcccgcagtgaggccatggggtgaaatcatatgggcagggccagtgggggctcccgaggagtgtcaggaggggatgacctttgcaaaaggttcatccttcgccctgcagcctccagtgcccagggccgagtggtgtggcaggatgctcaggttgtgatcttagtgggcccgaggcacacatgagtccagggctggggctgcgctccagccagcatgaacagatcacttcctccctcctcaggtgccggaagctgcgaaggtgacacatggcttttcagactcagcagggtgacttgcctcagaggctatatcccagtgggggaacaaagaggagcctggtaaaaaacagccaagcccccaagacctcagcccaggcagaagctgctctaggacctgggcctctcagagggctcttctgccatcccttgtctccctgaggccatcatcaaacaggacagagttggaagaggagactgggaggcagcaagaggggtcacataccagctcaggggagaatggagtactgtctcagtttctaaccactctgtgcaagtaagcatcttacaactggctcttcctcccctcactaagaagacccaaacctctgcataatgggatttgggctttggtacaagaactgtgacccccaaccctgataaaagagatggaaggagctgtccctgcctgtgtcactgtttgtcactgtccaggctggctggtttgggcatgaatgtctgcatcactaaatccagagcttgtcttgctccctcattgtgcagatggaggaaatgaggactaaggccccacagcagatcccaggcagggccagaattatgtattcatcactttcaagttattgccacgcatgggagtcagggatagcccagtcaatacagactgcctgccctcctgctcttcaccagggttcttttctagaaggagacagccttctgtggccagagagcttggggtaggacccagatctactgagtgaccttgcttgtcactacccctgcctctctgagcagcagtttccacatgtgcacatagagggaacagaagattgctgtggttggcgtcctcgggccccagagaagtttgagactatctttacgtaatagaaaagaacacttgttcttcctgccaggcagcgct

SEQ ID NO: 1079 - DNA, 1193 bp, Homo sapiens
atcttgccggtgggcggtggctgcccggggttggccgtttgggccggccgggtgccaccgctcacccccagccccggcttcttccgctgggggcgtgggacctgctactcggagagtctagggacccggacagctcctgcccgccttctccactcttcctttcccaggagcccagtccacgtgtcggtccgtgcggaggagcccgttcgctcctcgctggccgagggctggaggacctggacatcggggaccgcagcgtctcctcaccagactccctgtctgcacacgatgtccactcccctgcattctcagatagcccctattctcagatggcctcaatgaggacagaatgaggaagggtccaatgaagactagggtcctggcgtgagcgcaaatcgtcgtcctgagcgcttagaacgcctgggtttgggactggaaggttgcgtttggggagtacggacagctaggccaccccctgccgaatagaccctcccctacccctgcccgggggcggagtaggggagaggggcctgtagaggggctggccctttaagggggtgtggtcggggggcggaggaagagcgagacagagaaagcgcttcggcggctgcagctcgggcggcggccgcgggggacaaagggcgggcggatcggcggggagggggcggggcgcggccaggccaagcccgggggctccgcatgctgcagctgcccccgggcgcccccgccgccgccctcgccgcggagccgcgcggagcggagccggcgagctaacccgagccagccggcgggcgtcccggaggcggtggcgcagggaggggcccgacgctcgcacgtggccccggcggccgccatggcggacagcggcaccgcggggggcgcggcgttggcggccccggcccccgggccgggcagtggcggcccaggaccacgcgtctactttcagagcccccccggggccgcaggagagggcccgggcggggcggacgatgagggcccagtgaggcgccaagggaaggtcaccgtcaagtatgaccgcaaggagctacggaagcgcctcaacctagaggagtggatcctggagcagctcacgcgcctctacgactgccaggtgtgttcccaccccgcgccgacaccccaaaatcggtctcgcgccggtccgcctggcagctccactgtgagctcgcctgtca

SEQ ID NO: 1080 - DNA, 1146 bp, Homo sapiens
gcaaagcccccgacccgtccgcgtgcccctgccccaatccccgctccggctgcagtcgccgccccggccgccagggggagccgacgcggtgggagggggcggggcccgggaggccccgccccgtccccgccccgcccgggccccgccgaggctctggtcggtccgggacagactggcgggcgggcgggcactgacgccgcggggccggagcgggccgcgcggtgggagcagcggcgccgtcggtccccgtcagggctccgtgggtccccgacccgcccctggccgggccatggcgggcgcccagcccggcgtccacgcgctgcagttggagccgcccaccgtggtggagaccctgcggcgcgggagtaagttcatcaaatgggacgaggtaagcgcgcgggcccctgctccgcccaaatcccgggactctttcagtcaagctcgaccagacgctggggacccccaccccagcctcgcctgcccgtggcgccaccctcatcccagtctggcggcgccccggaaacttaagtccccgatcgtctccgtaatgaagactttgtccccccaactcccagtccctcagctctggaaaatttgcctccactccttggcgcagagactttgaaccccaataaaccccgtccccccgttttccattcgttcttcccaccgctccctgccagactaattctcgttccccgatcctggcctggtgcccagacccctgcccagcactagactccccggctgcaggaccctgacttccaggctggctgggggcatcctcattctgggtgtgtgccagggcgcccctactctccccggtgccctgcctgaacagtcctcgtccattcatcatttttccccctgttctggttggcaccccttcgccctgcttctggatcccagcccagctccctgttcagatgggagcacccagtcaccccctagtggagactttgccccccaagttcctccacccctgggaactttgctccccactccttaggcttgggaccttgaaccccaatacatcctggcccccctttccctgtcctgcccctggtgcttcccaaatgcctgtgtccccaccttcggctgcccatccccatcctgggtgcatcctcttctgccccctgggccctt

SEQ ID NO: 1081 - DNA, 1154 bp, Homo sapiens
aaagtgttgcaaaatacacattaaatcacttttaattagctatttcgcttcttgcttttattaacagttattacaggaaatggaatcatctcagaaaatctggggggaaggttgctgtaacatggggtgccaaattggagtcccagggagaagactaggggaaggggggtggggaccagtttgaaaaaaggaatgctggtctggggtgtttaggcctgcaaggagtggggagccatggagggtgttgagcagccactttaggaagattagtttggactaagtcttgctaatgaggacttcagtcagggggcgaagaggtgctttatgatacgccccacagacaccattctggtaccttgacactgctgcttggggaagagtctctctgacttcctctcacctagggcaagcactctcaaaatagtccctgcccatgggacctgcatgctggcgagagggggagacacccaaatagggacattacattcatttaataatatgtattggctggtccgaatacagtagtgtttacaactaattgatcacaaccagttacagatttcttggtcccttctccactcccactgcttcacttgactagccttaaaataataataatacttattgagaggtgctcaatcaatatgatttacactgcagcacagggtttggcttgggcttcctcaggggtgggatgtgtgtgtttttgtgtgtgcatataaacctcctaaaaattgggagcaaaattttgtggcatataaaccttcctggagagaaagtccctagctttcttgagattttctaaggaaagggactcaaattcagcttccataggtgcaatgggagtggtggggttggaaagctggaaacacagggtgtggtcactgcttgggaacttactcaacagtcagtgcttactttgttgcacgttcacaaaaaatctgggaggcagatgctgtcactatccttcccacttgagacatgcagaagctgaggccagagagttcacttgctcaagtcccatagcaccaacatttgaacccaggcagtctggtcccagggtctgtgctcctgaccatggtaaaagtggaaatttgttgtctgaagttaggggccagatactgaaaatgtttctcaaacattgtagaagtcaa

SEQ ID NO: 1082 - DNA, 1126 bp, Homo sapiens
agtatgaagccggccgggctggccccggagggggtgctgagcggcggcgggcgggcaggctgctgctcacgctaccgctcctccgccagacagcgggcaaagtgctggcccatttctatggggtgaagctggagggcaaggtgcccatgcacaagctgttcttggagatgctcgaggccatgatggactgaggcaaggggtgggactggtgggggttctggcaggacctgcctagcatggggtcagccccaagggctggggcggagctggggtctgggcagtgccacagcctgctggcagggccagggcaatgccatcagcccctgggaacaggccccacgccctctcctccccctcctagggggtgtcagaagctgggaacgtgtgtccaggctctgggcacagtgctgccccttgcaagccataacgtgcccccagagtgtagggggccttgcggaagccatagggggctgcacgggatgcgtgggaggcagaaacctatctcagggagggaaggggatggaggccagagtctcccagtgggtgatgcttttgctgctgcttaatcctaccccctcttcaaagcagagtgggacttggagagcaaaggcccatgcccccttcgctcctcctctcatcatttgcattgggcattagtgtccccccttgaagcaataactccaagcagactccagcccctggacccctggggtggccagggcttccccatcagctcccaacgagcctcctcagggggtaggagagcactgcctctatgccctgcagagcaataacactatatttatttttgggtttggccagggaggcgcagggacatggggcaagccagggcccagagcccttgactgtacagagactctattttaatgtatatttgctgcaaagagaaaccgcttttggttttaaacctttaatgagaaaaaaatatataataccgagctcaaaaacactgtgtttggtgtcattgggtcaagggttggggatacacacggcagaattcggaaacagggtatagatcaacaaaaatacacagtcataacaagaaaaactggcgcctggcacaatcaactctcagtttcctcttcactcagcagcatgttgggga

SEQ ID NO: 1083 - DNA, 1214 bp, Homo sapiens
tccagtgcttgcctaaactcctccgccctgcaggccaccgaggtccgtatctgccctgtggaattcaaccccaacttcgtggcgcgtatgatacctaaagtggagtggtcggcgttcctggaggcggccgataacgtgaggatccttaccccgccccagcatatcccggggaatgcggggcgggcacacctcagccgggctgaggcgggagttcgggatgcccggagataattttggcctcttgcccacagttgcgtctgatccaggtgccgaaagggccggttgagggatatgaggagaatgaggagtttctgaggaccatgcaccacctgctgctggaggtgagaagcggcccatcacttgcttcccgggccacctgcctcccgcactgaggctgccagtgctcagctctgtccctccctgcccgcaggtggaagtgatagagggcaccctgcagtgcccggaatctggacgtatgttccccatcagccgcgggatccccaacatgctgctgagtgaagaggaaactgagagttgattgtgccaggcgccagtttttcttgttatgactgtgtatttttgttgatctataccctgtttccgaattctgccgtgtgtatccccaacccttgacccaatgacaccaaacacagtgtttttgagctcggtattatatatttttttctcattaaaggtttaaaaccaaaagcggtttctctttgcagcaaatatacattaaaatagagtctctgtacagtcaagggctctgggccctggcttgccccatgtccctgcgcctccctggccaaacccaaaaataaatatagtgttattgctctgcagggcatagaggcagtgctctcctaccccctgaggaggctcgttgggagctgatggggaagccctggccaccccaggggtccaggggctggagtctgcttggagttattgcttcaaggggggacactaatgcccaatgcaaatgatgagaggaggagcgaagggggcatgggcctttgctctccaagtcccactctgctttgaagagggggtaggattaagcagcagcaaaagcatcacccactgggagactctggcctccatccccttccctccctgagataggtttctgcctcccacgcatcccgtgcagccccctatggcttccgcaaggccccctacactctgggggcacgttatggcttgcaaggggc

SEQ ID NO: 1084 - DNA, 1199 bp, Homo sapiens
ctcctccgcctcccatggacccttctaactttgtcaccatgatgggcatgggggtggcgggcatgccgcccttcgggatgcctccagctcccccaccgcctccaccacagaactagacttgttttttaagaaaatatatattatatatagagagaattggtctcgtttaaacacgccgaacctcaccatatggagccagacattgggacgcacgcatgtgattgtgtgtgcacgcatgtgtgtgtgtgcacgcactgggctgggccaagcgactgaggattcgcttgggaacgggcaggtggtagtaggggcgccagcttgggctctcctggcgccccgtagcatcgagtgtcttctttgtcttctttctctcctcacccaactccctttgcctctccccaaaccgggccgccaggatccctccccgcggcggcgatggcccgagccatgagagtgaggactttccgcgcccattggtgacccttccaggcagacagcctcagcaacgcccctggtggacaggatggttcggcaaagcagcctgagttatttttgtggacggaatcggaacacgctggctccatatcgtgaaatttttattaatttttttctttttcctttgttacttctttatcttttcctttcttcagactccgtccaaggagatgctctccccggtcttctgctgcaatttagattcctttcccttctctccagttctccttcccttaccaaggagaggggagcaaatggttttgggcaagggctttggccattcatgtcaagctggttgtgggtttttcaaggtgccatagccacccccaaagatgtttgtttaaagcgtggggttttttaatctctgccacccttgtcaagggagtcttgtaaagttgccgagggtaggttcatctccaggtttcgggattcccatccgtcctggcgatcctgccagcagtgggtgggcagcctgagctccctcgggctcgcctgccagcctggagttcttcctgtgctccttgatcacctgagctgcctcagattccatttggtcctctccttcctggaaggcttccttttatgttttgttttaatcccaaatgtctgaatgttttgcagtgtgtaggggtttgagccccttgttcattctccttcctttttcctcccgcttccctctccatgaagtgattctgttgacaata

SEQ ID NO: 1085 - DNA, 1178 bp, Homo sapiens
attgttccctccccccagccttgtccccttcatactgtagtagcccaagccacccaagggactccattttcttgggccacacccctttcttcccatcaccacccacataggaagggaagacagaagagccccttttcctggctgtcattccctgaagcaggcacagggtgggccatcatgagacataatgatctcatccccccctaagagctggctgtacctgaaaggatcatacatgcgctgtgaccgcaagatggaggtggcgttcatggtgtgtgccatcaacccttccattgacctgcacaccgactcgctggagcttctgcagctgcagcaggtgagggctgagccaatggggcaggactgggctaggccagacttgacttgctgtgggaccctgggcaggggcactttcccttcctgagcttcagcttcccctcctggaaaaatgggttagtaattcctggcctggcctttcccagggctcttgggagagtagaattgagatgtgaaattgctttgactccattaaagggctggtcccagaattttggcccttccacatggtgggtggtccctgttggttctgacccccacctctgcccgataggctaaggacccgttctcctccctgttccgtggctcataactctctccttcggctcctagaagctgctctggctgctctatgacctgggacatctggaaaggtcagtagagggaagtggccaggctgcgcctggtgaggccggggggctgggtggcagcctgaattatgatcctttcctaggtaccccatggccttagggaacctggcagatctagaggagctggagcccacccctggccggccagacccactcaccctctaccacaaggtgggggcatctaaggagggtgcagaagggagaccctaacagtggctgaggcaggggccctcatctgggcagatgagaagagaactttgtgtgttggggggtatcgcccatccagtctcactttgtgtcaactgtgtgcagaatcagttcagtcagggctgtctgaggggtgtccagggttccccagcctgggagtggcaggggctgcatttgtcccctcagccctgccttttctgccactgcttactgtccttcctggagtataacagaggtcaaatgtggcaggagcactgatgaaga

SEQ ID NO: 1086 - DNA, 1154 bp, Homo sapiens
agtggtgtgctccaaactcaccgaggtccccagggtttgtgcaaagccctgggccccagacatgactctccctggaatctccccaccacccgagaaacagaaacgtaagaagaagaaaatgccagagatcttggtgagtgagaggcaggggtttttctctgccgtgtgctctgggagacgtgcagggctggggctctggctcttttgggggataggcagcacctgcagggtgtgggtgagatgctccagccaccatgttcccttctcactcacctgctcctcatttctcttccctcagaaaacggagctggatgagtgggctgcggccatgaatgccgagtttgaagctgctgagcagtttgatctcctggttgaatgagatgcagtggggggtgcacctggccagactctccctcctgtcctgtacatagccacctccctgtggagaggacacttagggtcccctcccctggtcttgttacctgtgtgtgtgctggtgctgcgcatgaggactgtctgcctttgagggcttgggcagcagcggcagccatcttggttttaggaaatggggccgcctggcccagccactcactggtgtcctgtctcttgtcgtcctgtccttcctatctccccaaagtaccatagccagtttccagatgggccacagactggggaggagaatcagtggcccagccagaagttaaagggctgagggttgaggtgagaggcacctctgctcttgttgggaggggtggctgcttggaaataggcccaggggctctgccagcctcggcctctccctcctgagttgccttctgttggtggctttcttcttgaacccacctgtgtaaagaggttttcagttccgtgggtttcccctttgattctgtaaatagtcccagagagaattcgtgggctgagggcaattctgtcttggaggaagaagctggacattcagcctgtggagtctgagttttgaaggatgtagggagccttagttgggtctcagaccataagtgtgtactacacagaagctgtgttttctagttctggtctgctgttgagatgtttggtaaatgccaggttgatagggcgctggctgcttggagcaaagggtgcatttcagggtgtggccaccaggtgctgtgagtttc

SEQ ID NO: 1087 - DNA, 1150 bp, Homo sapiens
gcaggtgcaagtggactgccactttctgcagctctacctgtggcgttttgtggccgacgaagaactcgtgcacttgctgctggacgaagtggtggcctctgctgccctgcgctgcccagaccctgtgcccatggagcccagtgtggttgaggtcatctgcgagcgcggctaggcgcagccgctgccatgcaccggtctgtccctgcaccccatggcacccaggatctggtctcggtggtccttccccgcaggcaggtgtcaggaccggcctaataaacatgtgtggcctcctcctctcgcttgctgggcgggcctttccgggggcggggttttgaagctgaggcttctgaggcgcccgcgtcgggtccgcccccgagcgccgattggctggtgtgctgggcccagcatgggcagggggcggttccacttaaaaaccctgggacgagagcggtccttgtctgcgttccgtgtccaggcaggtgcaggcgccgcggggccggatcctccgcgcggccgagtccatctcctgggaaatggggcggacagtgtttccttgactgactattgtgagcgccctctctctccggcggagcggagaccatggcccccactcagggcccccgggccccgctggaattcggagggcccctgggtaatggggcagagagatgggacctggggcaaaggctaagcgaaggagagctggagcgggtgaactaagagcgggggcgagatctgaggatggaaggctttgggggtgtcggaggcagagggacccgggggtttgcagcgaagggtgtctggagagggagagctgaggaggggccggttctgggggctgcagaacggggatttatggtgtcgactgggagcaggaggagggtcttcgaggggcctgggggcgggggactaagatggacgcctgggaagggaactgggaggcagcggggtgcctgggggccgagggctgaggacggggtgcggaggcgcactctgggaatgccgagagggtcccgcagagacgtcagggcgcccgtgcgggccggcggggagctggggggctaggggcggacgcccgacgtgatggcccttcccgcaggcgccgcggctctgctactgctgctgcccgccaccatgttccacctgctcc

SEQ ID NO: 1088 - DNA, 1150 bp, Homo sapiens; identical to SEQ ID NO: 1087

SEQ ID NO: 1089 - DNA, 1099 bp, Homo sapiens
gaatgggctcggcgagggaaaggacgccccgggccttatcagagcccccttggacccgcaggtggccgaggggcaggaattgaaggacaagagtcgcctgcgctatcctattaacggtgcctaggggacgggccctcgcgctggagttaagcggccgggggtggagctccaggcctagcggggaggtccacggagattggcccccaccccaggctcctttgtgtgcctctgttacgcccaggacagacgccgggggctctccctatgcccctcgtccccacagccttaccccatttactgctactccgtgcaccacagcagtggctggggtgatcctctgaaggccagggtggcagcctaatgcttggggcagggtctgtggcccccctgagttttgggctctgcgtgtgtttgcggggtggggatgtggaggcgcgcagccccagggctcactgtgcgctgtggttcaggcttccaggccctggtgctgacagccctgttggtggggctggggatgtcagcggggctgcctctgggggcgctcccggaaatgctcctgcccttggcgtttgtcgccaccctcaccgctttcatcttcagcctctttctctacatgaaggcgcaggtagccccagtttcggccctggcacctggggggaactcaggtgagaggggtcctggggtggagacggaggcagattggggcgtctgcctgtacattcactctccaatattctccaggcaatccgatttacgacttttttctgggacgagagctcaaccctcgtatctgtttcttcgacttcaaatatttctgtgaactgcgacccggcctcatcggctgggtatgttgggcttgactgagctggcctcaggccagggggagggttagggtgggtgagcagcgcttgggcagggcagggccaaaactgtgcagatgcgagtcattaaccattcatattccacaaacatttgttcaatccacctgtgcctaggtactgggagacaaaaataaagttagaggcaaaaaagcatctttgctgcagagagcctacattctggtgggaaagacagaaaaaaataagtaaaatatatacag

SEQ ID NO: 1090 - DNA, 1280 bp, Homo sapiens
ctggtgtcccagccccacctccagaattgagacctgcctcctacctcactttgggtcccatacatagttgcttctaacaacttcaccaagaaaactctcttttctacttcttgggaggggtgagtgagagaaagtgggacaaggccacttttctgcagtgttagttactccagaaaaggtccaccatgtggaaacagatataatgagaaataatccttagtttgtgttaatcaaacccagtcagttatccaaccagtcaattcctcaatccaagcagcatgaaactgcactcctagttaggtttgtggattataaatgctcataaattccttatcccgtccctcatggaaaggtggggtttacttctccacccccttaattctggacttggcctatgacttgctttgaaccagtagaatatggtggaaatgaagctgtgcccaattctgggcttaccctttaaaacagaactggcagcttctgttttcttctcttggaattcagccaccatgctgtgaggaagcccaagcagtcctgtggggaggcccatgtagaggagaatcaaagctccattctcagccttttgggtaagatcaagtgtagtatctgttcttatcagtttaatatctgatatgtcctctattcgaggacacaatctatattaaatagatttttggaactaagagatggaataggagcttgccccacccactccacacatttacctagcattgcagtacctccaggaacagtgtacccctaaagggagataaagtttaaaaatgaaaaaaatagggaataaaaagctctagccctaccatccaattggctgggggaatttaaataaataaataaataaataaataaataaataaataaatagctctagccagcatcaacttgccagccattggagtgcaccatctttgaagggtcctccagctccaaggatggagctggaggcacaagaagagctgtctcaaccaggccttgcccaaattgcataatggtaagaaaataaatgattggtattgtcataagcctctaggtttgagagtggcttgtttcacagccctaatctaatttgactccctgttcttggccccagacccagggcctgccacagaataagaactcagggagtgttgaagaagtgagtcaacaaatgattgggctgagcgtggtggctcacgcctgtaatcccagcactttgggaggccgaggcaggtggatcatctgagtgaggtcaggagttcaagaccagcctggccaacaggatg

SEQ ID NO: 1091 - DNA, 1360 bp, Homo sapiens
catggttggggaagagttccaggcgatcgaattttcttatctggccagtgttccctgtcctttcctggaaatgagcctgggcctcagagccaaccctgaagcccgggccacctgaatcctgaaaggctggggtgggggtgtctggattctgggaaaggagcaggaggggaggtccaggcccttggaggcccctatgggagcagcactctggtttcccaggggtggaggaggtaagaaagtaacccctccatgaggttcctgaggtggctcctgagacgtggagttgggggctggacctggggtttgggtggggaagaagccagggagccatttctgcggccccagctgacctgcctgttctcccgcagtggttgcagctgaccatgtttgcatgaggcagggactcggtcccccttgccgtgctcccctccctcctcgtctgccaagcctcgcctcctaccacaccacaccaggccaccccagctgcaagtgccttccttggagcagagaggcagcctcgtcctcctgtcccctctcctcccagccaccatcgttcatctgctccgggcagaactgtgtggcccctgcctgtgccagccatgggctcgggatggactccctgggccccacccattgccaagccaggaaggcagctttcgcttgttcctgcctcgggacagccccgggtttccccagcatcctgatgtgtcccctctccccacttcagaggccacccactcagcaccaccggcctggccttgcctgcagactataaactataaccactagctcgacacagtctgcagtccaggcgtgtggagccgcctcccggctcggggaggccccggggctgggaacgcctgtgccttcctgcgccgaagccaacgccccctctgtccttccctggccctgctgccgaccaggagctgcccagcctgtgggcggtcggccttccctccttcgctccttttttatattagtgattttaaaggggactcttcagggacttgtgtactggttatgggggtgccagaggcactaggcttggggtggggaggtcccgtgttccatatagaggaaccccaaataataaaaggccccacatctgtctgtgatgtgtttctccccagcctactgcctggagggcacctgcaggccccggcccatgggggcagctcgtggcctcagctcacccctcccctccaacccctccatctccttccccttgaccttgaagcttgaacccctactggagtactgggtatctgggcaagaccacccctggccctgggaggttgggaaggaggggccctagctgcagggacagggccacacagctgaggtcccacatggctctgct

SEQ ID NO: 1092 - DNA, 1205 bp, Homo sapiens
accggcagagttcacaaacacatttgaagaggctttttctcaggattcttaaccttcccaaaggaagtcccatggatgggtttctagaagtctataaatgctctgaaattgtatttttctgtggaaagcataactttcatctgcttgttcgtgctcaaaaaagatcatgaatgaatgattgcatgattttatgccattgtgcttatactaaaggatatgtagcccatctcttgagctgttaaactgttttgactactttaaatcgtgcagctgtgagcatctctgtaaatttagtgtacacatgtatcccctggagtggcattgcctcggcagtgagcacttatggttttataactctcttcacagactcaaatgactccagaaagctacacttcctgttgtgagtatatgatatccatttccctacatagccactaacatcaggtttttacaattttatttatttcttgctactttaagaaatttttgtggtgaaatacatataatagaagttgactatctgaatcatttttaagtatacattcagtagtgttaagtatgtcgccattgttgtacaaccaatctccagaactttttcatcttgcaaaacaaactctgtacccattaaataacattaaacattccattccctccagcctcagcaaccccattctactttctgtttctgtgagtttgactattccaagcacttcatatcagttaaatcatgaagtatttgtctgtctgtgactggcttatttctctgagcacagtgtcctcgagatgcgtctatgttgtagcatatgtcagaatttccttcctttttaaaagatccaaataatattcttattttatatcttttttttatccattcatccattagtggacacttgggttgcttttggctattgtaaataatggtgctatgtacaaatatctatattattgtatttacaagtataatgctgtaatgtacacacatctttttgagatcctaccttcagttcttttgagtatatagccagaagtggtattactaaatcttacgatatttctatttttaatttattgaggaaccactgtagtttttcatagcaactgcaccattttacgttctcaccaagagtgcacaagggttccgaggttcccacatcctccccaacacttgttattttctgctttttttagattgcagccatcatagt

SEQ ID NO: 1093 - DNA, 1228 bp, Homo sapiens
ccaagaagtgaaattcctgggtcatagggcgtgagtccgacatttttctccattctgccctgttgccctccagagtgggtgtccagctttgcatacctaagtatgagagtatctgttgttcatatcctctacgacgctccatatatgaaacttaagtttctgctagttgccatctttgatctatcatgtatgcagtgacctactaagactgtaattggtacagtagattcttgtcatctgtgtgtgaatttagcattcatgggcttaatgctgacaaggcccccagggtccaagacatataatcatgtataattttgtcaaggtataattttttaaattgcttttgtcatgtgtctgctggtgatgcccaacccagtgctctgcacccaggtcacactgtggctttgtcctctgcttatgcctgcattgcagcaactgtcctgaagagaccaaaattatgcagatttaggtaagtccatggctaatgttattatattatgtgctattgtaatggatggggctgtggagtgtatgaatttataaatcactggtcttgtaattaaaattcaaacactatagaaaaaggccatgtagaagataaaagttcctctataatcccggacccctaagataactactaatgacaacttcatttatattccttcagacattttctggctgtggatgtactaaaatgtatcctattattctctgccctaaaatggaatcatacaaggtgtactgttatttttatggctctataacatgtcatattgtacgtgttggtatggtcattttaaccatttttctagtgatggctttgaggttatttgcagtttcctagccatctcaaagtgtgctgcggggatctcttttgcatccctctgggtgcagagctgaggcacccagaggcagtgtccagaggaggcagcatctgtaggtgtcttcacctgctctggctcttggcacatctggttggtgacactgttttgtgagatgggttgaaagcacgtgctgccaaaatagaataatgttggtcctctcctcatgtgccgtggaactggggtaaaactgcgtagtggctgcagctgcctgtccataccggaatcgagtataacacggtgcctggcttagcacaaaacagtagtgggtcctgcaggccccagagtctaattcctggtattctttcccctacacagattaaataaaccaaaaacaaactattcta

SEQ ID NO: 1094 - DNA, 1144 bp, Homo sapiens
ctgccactgtgtggctagctcttcccactgggaagttctgtgtacccggaatgtcggagtggagtcctgttctagtgtccagcacctgaccctgtgcccaacccctcaacagcctattcctgctgtccacagcctgctggaactttttacaaaatatgttgccatgctggaccctgggcactggacataagccccctggcagcctttttcatgtcacccaaaggggtaattgtcctactggtggtctgtaagatgagttagggtgacttgctaatagacattgtaaatcttaatatttatgtatgtattttattattaccggttttccatttatgatggtaatattgtttcttctaagaatatttatttttccttctaaatattgagataaaattcatgcttttgaaatgttctattcagtggcttttagtatatttgctatgttgtgcaaccatcgacactatccatttctagaactttttcgtcatcccaaacagacgctctgtattcataaaaaaataacttcctacctgtctctccccctagtctttggtaacctttgttatactggtaaactttgttgtgctctctgtctgtgtgaatttgcctattctaggggcctcatataagtgtaatcatacagtatttgtctttttgggtctgtctgatttcacttagcgggttttcagggttcattcatgttgcagcatataacagtactgcgttcctttttctggctgaataatattccactgtatggatagaccccattttgtttattcacacatcatttggacatttggattatttctggtttttggctattatgaacaatggtgctatgaacagttgcgtacaagtttttgtgtgaacatatgttttcaattctctcattatatacctaggagtagaattactgggtcatatggtaactgtatatttttgaggaactgccaaactattttcccacgtccatgcaccatttcacattcccaccagtaagtaagagggttccaatttctgcgcattcttgccaacactagttattatctgactttctggttataatcattctaatgagtgtgaagtagcctctggtgtcatttggatttgcatttctctgatgagtgatgctatcaagcac

SEQ ID NO: 1095 - DNA, 2199 bp, Homo sapiens
ttacgaattctacagtcacaaatatctttgggcaaatccccttctatacctcaaggcagcttttggtttgcaaccccactggccagagggaagggccagtcacttggctctctcactgccctgcgccccagatggttctagggctgctgttttcccttggccctgccaacaccactgtttttacttctgctcattggctgagtgcagtggttcctggaagccagtggcacgtttccccgcgtagctcgcttatcccacagcacacacccaagggttctgttgctaacacgctgaattaattctttgctcatcttacagagtgtgttttgactgcccccatttctgaggccttgtaaggccagagctttgttgcttcatcggcaggttgggacttagatggccgtgaatgtttcctctctgctgctgcagtaagtaagtgcccgcaccatagtgtgtttggaggctgaagttgaagcgaggctgtgaggggagatggacgtgtgaggagggatgatggggcttgagcaaagtgggggagggggcaaaggcagttggcccaacacattccccacccctttgagaggtctgaggcctgcagacctggctcggagcccacctggtagtcctcagactgtgtgtgtgtgtgtgtgtgtgtgtgtgtgtgtgtgtgtgtgtgtgtgtgtgtgtgtgtaaaagagagaagttgtggagaaatggggggctgattctgctcagattcatcaggatgagtagaaggcacccagctctcaccctggcctgacatgtgtgtccctgagcaggttacagtcctctctgagcctctgcttcccatctggaccctgctgggcagggcttctgagctccttagcactagcaggaggggctccaggggccctccctccatggcagccaggacaggactctcaaatgaggacagcagagctcgtggggggctcccacggacccgccgtgggcccaggggaggcagagcctgagccaacagcagtggtgctgtggaccgtggatcctgagggtggcctggggcaagtaccggctgagggtccaggtgggctttgtgtacctttgggtcctggggccctggtgacttggactccaggttagagtcaagtgacaggagaaaggctggtggggccctgtgcttccgacttcatttcgagtgatggcagttcccaggaaggaatccacagctgacggtggctgacagatcagagaatggaaggcgaggcaggcgggcgtctgcgtgacctcaggtgcttggggcccagcagacccagagaaccatttccactaggccagggtgccggaagtgtccacaggtcttagattccctgttcagatgaaaagatttgtgcctttaatgataaaagtgatctgcatagagtcaaaaattcaagccatgggtataaaatgcaagtaaaatccctgccctcacctatcccaccctactacacagagatgtcctctcgagtttcctagactcactctggaaatttctgtatacacacagaagcttgtgcctctgctcgtgaaggcagagggagggagagctgaagggccagcaccttctcacctgtgggccccctcagtgctcggtcccagagcatgcaggactgtgcctcgtgttcagtttgctggtctgacttcatgctccttgggcaggatatgcatgtgccatgctaggagacatgtggatgtgaagctgggggacaatgtcccctggctatgcctttacaagggaagtaaggaaggtaggaggtgagcctgggagggagggagggaggcgcggagccgccgcaggtgtttcttttactgagtgcagcccatggccgcactcaggttttgcttttcaccttcccatctgtgaaagagtgagcaggaaaaagcaaaaggcgctggtggtggcacgtccagcacggctgggccggggttcgagtccccgcagtgttgctgcttccttccagctccctcctccaggcctctcctcccaccccaccagggatatcttgtctcctagaggggtagcattgggtggggcaccccaggcctctcccagaagccctcctgccctgctatcccctccctcatcctctggggccctgggaatacagcaggggacgtggggccacaggcagctgataacttagccccctcagccactcctgtgggagcgggaggggg

SEQ ID NO: 1096 - DNA, 5405 bp, Homo sapiens
gagtggtaggatgaaacaatttggagaagatagaagtttgaagtggaaaactggaagacagaagtacgggaaggcgaagaaaagaatagagaagatagggaaattagaagataaaaacatacttttagaagaaaaaagataaatttaaacctgaaaagtaggaagcagaagaaaaaagacaagctaggaaacaaaaagctaagggcaaaatgtacaaacttagaagaaaattggaagatagaaacaagatagaaaatgaaaatattgtcaagagtttcagatagaaaatgaaaaacaagctaagacaagtattggagaagtatagaagatagaaaaatataaagccaaaaattggataaaatagcactgaaaaaatgaggaaattattggtaaccaatttattttaaaagcccatcaatttaatttctggtggtgcagaagttagaaggtaaagcttgagaagatgagggtgtttacgtagaccagaaccaatttagaagaatacttgaagctagaaggggaagttggttaaaaatcacatcaaaaagctactaaaaggactggtgtaatttaaaaaaaactaaggcagaaggcttttggaagagttagaagaatttggaaggccttaaatatagtagcttagtttgaaaaatgtgaaggactttcgtaacggaagtaattcaagatcaagagtaattaccaacttaatgtttttgcattggactttgagttaagattattttttaaatcctgaggactagcattaattgacagctgacccaggtgctacacagaagtggattcagtgaatctaggaagacagcagcagacaggattccaggaaccagtgtttgatgaagctaggactgaggagcaagcgagcaagcagcagttcgtggtgaagataggaaaagagtccaggagccagtgcgatttggtgaaggaagctaggaagaaggaaggagcgctaacgatttggtggtgaagctaggaaaaaggattccaggaaggagcgagtgcaatttggtgatgaaggtagcaggcggcttggcttggcaaccacacggaggaggcgagcaggcgttgtgcgtagaggatcctagaccagcatgccagtgtgccaaggccacagggaaagcgagtggttggtaaaaatccgtgaggtcggcaatatgttgtttttctggaacttacttatggtaaccttttatttattttctaatataatgggggagtttcgtactgaggtgtaaagggatttatatggggacgtaggccgatttccgggtgttgtaggtttctctttttcaggcttatactcatgaatcttgtctgaagcttttgagggcagactgccaagtcctggagaaatagtagatggcaagtttgtgggttttttttttttacacgaatttgaggaaaaccaaatgaatttgatagccaaattgagacaatttcagcaaatctgtaagcagtttgtatgtttagttggggtaatgaagtatttcagttttgtgaatagatgacctgtttttacttcctcaccctgaattcgttttgtaaatgtagagtttggatgtgtaactgaggcgggggggagttttcagtatttttttttgtgggggtgggggcaaaatatgttttcagttctttttcccttaggtctgtctagaatcctaaaggcaaatgactcaaggtgtaacagaaaacaagaaaatccaatatcaggataatcagaccaccacaggtttacagtttatagaaactagagcagttctcacgttgaggtctgtggaagagatgtccattggagaaatggctggtagttactcttttttccccccacccccttaatcagactttaaaagtgcttaaccccttaaacttgttattttttacttgaagcattttgggatggtcttaacagggaagagagagggtgggggagaaaatgtttttttctaagattttccacagatgctatagtactattgacaaactgggttagagaaggagtgtaccgctgtgctgttggcacgaacaccttcagggactggagctgcttttatccttggaagagtattcccagttgaagctgaaaagtacagcacagtgcagctttggttcatattcagtcatctcaggagaacttcagaagagcttgagtaggccaaatgttgaagttaagttttccaataatgtgacttcttaaaagttttattaaaggggaggggcaaatattggcaattagttggcagtggcctgttacggttgggattggtggggtgggtttaggtaattgtttagtttatgattgcagataaactcatgccagagaacttaaagtcttagaatggaaaaagtaaagaaatatcaacttccaagttggcaagtaactcccaatgatttagtttttttccccccagtttgaattgggaagctgggggaagttaaatatgagccactgggtgtaccagtgcattaatttgggcaaggaaagtgtcataatttgatactgtatctgttttccttcaaagtatagagcttttggggaaggaaagtattgaactgggggttggtctggcctactgggctgacattaactacaattatgggaaatgcaaaagttgtttggatatggtagtgtgtggttctcttttggaatttttttcaggtgatttaataataatttaaaactactatagaaactgcagagcaaaggaagtggcttaatgatcctgaagggatttcttctgatggtagcttttgtattatcaagtaagattctattttcagttgtgtgtaagcaagtttttttttagtgtaggagaaatacttttccattgtttaactgcaaaacaagatgttaaggtatgcttcaaaaattttgtaaattgtttattttaaacttatctgtttgtaaattgtaactgattaagaattgtgatagttcagcttgaatgtctcttagagggtgggcttttgttgatgagggaggggaaactttttttttttctatagacttttttcagataacatcttctgagtcataaccagcctggcagtatgatggcctagatgcagagaaaacagctccttggtgaattgataagtaaaggcagaaaagattatatgtcatacctccattggggaataagcataaccctgagattcttactactgatgagaacattatctgcatatgccaaaaaattttaagcaaatgaaagctaccaatttaaagttacggaatctaccattttaaagttaattgcttgtcaagctataaccacaaaaataatgaattgatgagaaatacaatgaagaggcaatgtccatctcaaaatactgcttttacaaaagcagaataaaagcgaaaagaaatgaaaatgttacactacattaatcctggaataaaagaagccgaaataaatgagagatgagttgggatcaagtggattgaggaggctgtgctgtgtgccaatgtttcgtttgcctcagacaggtatctcttcgttatcagaagagttgcttcatttcatctgggagcagaaaacagcaggcagctgttaacagataagtttaacttgcatctgcagtattgcatgttagggataagtgcttatttttaagagctgtggagttcttaaatatcaaccatggcactttctcctgaccccttccctaggggatttcaggattgagaaatttttccatcgagcctttttaaaattgtaggacttgttcctgtgggcttcagtgatgggatagtacacttcactcagaggcatttgcatctttaaataatttcttaaaagcctctaaagtgatcagtgccttgatgccaactaaggaaatttgtttagcattgaatctctgaaggctctatgaaaggaatagcatgatgtgctgttagaatcagatgttactgctaaaatttacatgttgtgatgtaaattgtgtagaaaaccattaaatcattcaaaataataaactatttttattagagaatgtatacttttagaaagctgtctccttatttaaataaaatagtgtttgtctgtagttcagtgttggggcaatcttgggggggattcttctctaatctttcagaaactttgtctgcgaacactctttaatggaccagatcaggatttgagcggaagaacgaatgtaactttaaggcaggaaagacaaattttattcttcataaagtgatgagcatataataattccaggcacatggcaatagaggccctctaaataaggaataaataacctcttagacaggtgggagattatgatcagagtaaaaggtaattacacattttatttccagaaagtcaggggtctataaattgacagtgattagagtaatactttttcacatttccaaagtttgcatgttaactttaaatgcttacaatcttagagtggtaggcaatgttttacactattgaccttatatagggaagggagggggtgcctgtggggttttaaagaattttcctttgcagaggcatttcatccttcatgaagccattcaggattttgaattgcatatgagtgcttggctcttccttctgttctagtgagtgtatgagaccttgcagtgagtttatcagcatactcaaaatttttttcctggaatttggagggatgggaggagggggtggggcttacttgttgtagctttttttttttttacagacttcacagagaatgcagttgtcttgacttcaggtctgtctgttctgttggcaagtaaatgcagtactgttctgatcccgctgctattagaatgcattgtgaaacgactggagtatgattaaaagttgtgttccccaatgcttggagtagtgattgttgaaggaaaaaatccagctgagtgataaaggctgagtgttgaggaaatttctgcagttttaagcagtcgtatttgtgattgaagctgagtacattttgctggtgtatttttaggtaaaatgctttttgttcatttctggtggtgggaggggactgaagcctttagtcttttccagatgcaaccttaaaatcagtgacaagaaacattccaaacaagcaacagtcttcaagaaattaaactggcaagtggaaatgtttaaacagttcagtgatctttagtgcattgtttatgtgtgggtttctctctcccctcccttggtcttaattcttacatgcaggaacactcagcagacacacgtatgcgaagggccagagaagccagacccagtaagaaaaaatagcctatttactttaaataaaccaaacattccattttaaatgtggggattgggaaccactagttctttcagatggtattcttcagactatagaaggagcttccagttgaattcaccagtggacaaaatgaggaaaacagg

SEQ ID NO: 1097 - DNA, 1289 bp, Homo sapiens
aaggcaccgaaggcttaaagtaggacaaccatggagccttcctgtggcaggagagacaacaaagcgctattatcctaaggtcaagagaagtgtcagcctcacctgatttttattagtaatgaggacttgcctcaactccctctttctggagtgaagcatccgaaggaatgcttgaagtacccctgggcttctcttaacatttaagcaagctgtttttatagcagctcttaataataaagcccaaatctcaagcggtgcttgaaggggagggaaagggggaaagcgggcaaccacttttccctagcttttccagaagcctgttaaaagcaaggtctccccacaagcaacttctctgccacatcgccaccccgtgccttttgatctagcacagacccttcacccctcacctcgatgcagccagtagcttggatccttgtgggcatgatccataatcggtttcaaggtaacgatggtgtcgaggtctttggtgggttgaactatgttagaaaaggccattaatttgcctgcaaattgttaacagaagggtattaaaaccacagctaagtagctctattataatacttatccagtgactaaaaccaacttaaaccagtaagtggagaaataacatgttcaagaactgtaatgctgggtgggaacatgtaacttgtagactggagaagataggcatttgagtggctgagagggcttttgggtgggaatgcaaaaattctctgctaagactttttcaggtgaacataacagacttggccaagctagcatcttagcggaagctgatctccaatgctcttcagtagggtcatgaaggtttttcttttcctgagaaaacaacacgtattgttttctcaggttttgctttttggcctttttctagcttaaaaaaaaaaaaagcaaaagatgctggtggttggcactcctggtttccaggacggggttcaaatccctgcggcgtctttgctttgactactaatctgtcttcaggactctttctgtatttctccttttctctgcaggtgctagttcttggagttttggggaggtgggaggtaacagcacaatatctttgaactatatacatccttgatgtataatttgtcaggagcttgacttgattgtatattcatatttacacgagaacctaatataactgccttgtctttttcaggtaatagcctgcagctggtgttttgagaagccctactgctgaaaacttaacaattttgtgtaataaaaatggagaagctctaaattgttgtggttcttttgtg

SEQ ID NO: 1098 - DNA, 1187 bp, Homo sapiens
cccttcacagatgggagaaatcaggcctggagaaaggaggggtggctgcagggcactgtcagttcctgctgtcctgtcacccatgggtgcctgacgtgcccatacccacctctctctcatgccactgcccagagaaggatgtccatgcagcctccagccctggcatgggaggagccgcagctagctgggcaggctgggccgtgaccggggtctcctcactcacctccaagctgatccgttcgcacccaaccactgccccaacagaaaccaacattccccaaagacccacgcctgaaggtgagtgtcctggcctagctgcatcagtggctgagagggctgagagctgcaggcacccaggaactcttactgtctgactcccccggggatggtgaaggggatataggagctgggtaggctccagtcaccctgtgggcttccttggtgccccttccccccagtagcccccttcccctagcagcctctgccctgtcccaagacccccctgaaagctcagtgagcctctgctccccaggagttcctgccccagcccccacccctgttcctgccacccctacaacctcaggccactgggagacgcaggaggaggacaaggacacagcagaggacagcagcactgctgacagatgggacgacgaagactggggcagcctggaggtgtgtggggctgagggagcctccccaggggaccccagctcaaatccacaggctgccattcagggagcttctgtggggcctggctggagttggcctgtcctcatcagcacagcatccctggcacgtaggcctcatggagtggccattgtaggccagagccagcagcaggccccattcaaccccagcggccccagggagcaggctaggcagatggtgcctggggcattccctgaacttcctcactcttacccacaccgtccccctttcccctcctccagtgcccacccagccatgggggtcagcaaggagaggccactcctgggtctagaaccagaccagttctgcttgggggatgggctcaggttgggctgagggaggactggggctgtcctcagaatggggcagagctgggggcccaatttccccatctggctgacagcagcagtttctggccctcaaggctgttggaaggggcatctagatctcattccccagccttaaagaggggtgag

SEQ ID NO: 1099 - DNA, 1173 bp, Homo sapiens
gttcataggtccatgcacctgtccaggaaatgctcacttttgtgtctgctgtcttgactgcagctgcgttcaaggagatctgcccagctgggaagggataccacattctcacctcccaccagacgctcaccattcagggcgagagtgacttttcccttttcctgcaccctgacgggccacccaagccccagcagcttccggagagccctagccaggctccaccacctgaggacacagaggaagagagaggtctagcctgaccccttctgatccctgacccatgccaagcccctaggcctgaccccttgacccgtgatccacagatctgacctcacagtctaacccccaattccttatccctgacccatccactgacctcccacctgaccctctgacccctgacccagatatttgaccctgagctataacctcctaagccttctacagcctgacctgtaacccaaggccattcaacctgatcatgtgactactatgcaaacacaccctaaccccagaatctaacccctgacccttgacctggagacatgattgttgaactcccagagaccctaactgcaaatactcagctgctgatcccagatctgactcccttctcccgccccaacacttcatggccccatcttcttcccttttaggggtgaccacggactcagtgagtatgagaacccagatgggaggggtgggcaggcgagggacaggagggctcatgctgctgtcacccgcagccggtgagtgaggagaggtcagtgcagcagagccacccaactgccaccacgactcctgcccggccctaccccggtgagctgggcactgtagggatgagtcctcaagggctaaatcactgggtgggcggggagttcacagtttaagtactcggggacagtcaagctggggtggggcgccgggccaagactgaagtggaaagggaggcttcagtcaatatcgtctctgaccagagtgcactgccgcccgcagagctgatctcccgtccctcgcccccgaccatgcgctggttcctgccggacttgcctccttcccgcagcgccgtagagatcgctcccactcaggtcacaggtaaggcccgcccagcaaagccacccctgcctaggccacgcccccactttagttttctctcctccctcccgcccccag

SEQ ID NO: 1100 - DNA, 1125 bp, Homo sapiens
ccacgccgccggcgccgccaacgcgggacccgcagccggcccgcgtcgtcctgtcaacctcgactcagcgctggccgcgctgcgcaaggagatggtgagtgggtgggcgccgggccagctgggcggggggctgacgcggaggaacgcaggggactgggacaggcggcctgggtctcagaggacttgcaggcaccagttgggttgcaagggttatggtaacaataattagtgatagttaccaattatggcagtagttaccatatattttcaaatgttttgctgacgttacttcatttcatccggctaaatggataaccccattttttgggtgagggtcatgactaaagttgcatagcttgcaggtggtgcctgatgtccacaaaaacttcgtttaggaaggtgcggggaagatgggctggggcccactattccagggggcggggctgggctggggtggcctggaccccaactccagcccaccctcagttgtctgcaggtggggctgcggcagttggacatgtccttgttgtgccagctgtggggcctgtacgagtcaatccaggactacaaacacctgtgccaagacctgagcttctgccaggacctgtcatcctccctccattcggacagctcctacccaccggatgcgggcctgtctgacgacgaggagcctcccgatgccagcctgcctcctgacccgccaccccttactgtgccccagacgcacaatgcccgtgaccagtggctgcaggatgccttccacatcagcctctgaagggctggggggcagggggcatgcacccatgcaaaaggctcagaaactccccctccggcaagccctcagacttcggagcctgcgccttcccccctaccgcctcacctcacaggagggccaggcatgtattcctcagaggcgaaactgccaaactctttctcctgtcttgggttggctggcactggggcgggcatctagggtacagcctctgctcatggcactgggcctccagttcttccacatgtgtgcacccccagcttggccaaccctcagccttgcggtggggcccgaagcatcttcccttccgcttggcgtctctgggattgggatgagtgcctggctcccatctc

SEQ ID NO: 1101 - DNA, 1322 bp, Homo sapiens
gaggggcgtgcttcggtagtgcagaactctcgctgctactaggggagtccacgcctccaccttttccccgcctcctgtaactcattggaagagctgtgcgccaattactttgccgttacccaatggctactcaactgtctctttggttccgcccagtcgtctaccctgggttggcaacgcctgggtctacgcatgcgcccaaacgcttttacgctcgaacttgctttagtcctggagtctgcgcacgcccaaagggcacccctcgcgtcctaccgcgccatcacctttctgcgcttgcgcattcatgccgtcaagttttccttttccgggtcccaattggaatcgttgggcgcatgcgccactgcaggctggcggttcgcggctccttcttccggcctcctccttaggccggcaccagcagaagccgggcgagcgcggagccccaagcaagtgacctgcgaccccgaaagtggaccccagatcctggggttctccctggtccggagactagggagctgtcgcctgcaccccgggagcacccaccccacgaccacctctggatgccgccgacgggtacccggcccgtgccccgcgcctgcctgccggctcggcccctcggagcaattctgggccaggagtggggacccggaccccgcccctgatgcagccccacccccgcgtccgggccttgcaccactgactgtcccggccggccccgccccctgctcgcaccctcgcgcggccgagcccccctcccccgctgggggaggccatggcgtgagcgtgaggccgggccccggggccctcaggcgccagacggggcatgggccgggggccgcccccatgagggtcccgggagggggggcgcgggcagcagcggcggggccatggggtcgcaggtgttgcagatcctgcgccagggggtgtgggcctcgctcaccggcggttggttcttcgacccgcaccagagcaccttctccaactgcttccacctctatgtgtggatcttcctgctcatctttcccttcttactgtacatggtgagacgccacggccacctgtaactccagccgggagagggagggcagcctggcagggattcagggcagtgccctgggctctgggacgtggagagagaggaatcactgcagagtttgggtctgtgtggaagaggggccaaagtcttcctttcttggatcgagtgaccttgaaccctacacttaatctcatccagctaagcagaatacagagccctttgtcgaggtctgtgtactggttgtgtggagaggtgatgaaattttcttgtgagtctgtgaatccca

SEQ ID NO: 1102 - DNA, 1407 bp, Homo sapiens
ccctcccaccaggccctggctgggggccgcggtcctccctgagtggctctggtgatgggcggcccccacctctgctgcagtggcctccccctcggctccctggaccaccccctgcatcgcctatccccacagagggtccccggacctcacggccccctggcccgggtctcctcagttctgagggccccagtggaaagtggagcctggggggccggaaggggctgggaggatctgacggggagccagcctcagggagccccaaaggaggtacccccaaatctcaggtaaggcacctgtgggagggttgggtcccagaaggctaaggcctgctcacccgccaacctctcccccctcccccaggcgcctctagacctcagcctcagcctcagcctcagcctcagccccgatgtcagcactgaggcctcaccccccagagcttcccaggacattccttgcttggacagcagtgcccctgagagtggcacacctatgggtgccctgggcgactggcctgcccctattgaggagcgtgagagcccggcagcccagcccctgctggaacaccagtactgagctacctggcgcccactggaccacctcctaggattcagtaacggacctgctctgctgcctctctgctggaccacagaactgagtggctttggcctacatgtctgaaccctgacctttggctgccttggccagagtaccaaaactgagtgacccagacctctgaccttgacccctgatctctctcatccccagtccagggcctgggctccccagatggaggcagtcagcctcccagccaggccctaagagccaaaccatgggctggtcccacttggagcctgtggccaggaccacctcagcccctgggcctgcactgcctgcaggtgtggcccccttggcctggacctggggcctgaattgtgggaagggtggtttctttctttccttttttttcttttcttttttttttttttttttgtgcttcggagacatcagaattaataacactatttttgattttggttggcagtttctttttctacctgggaatgggtacatgatagtacaggcggctaagttgggatggacaagcacgcagaggggtgaaggatgtggggctgaagtctagtagagatcaagggcagaccaaggtggggttcaggtagaaccgggtcctcttcaccgcatggctgctcccttttcaagcctttatctgaagggtattgtctgccatttcccaccatatggtcagacttccaggtctggtggctcctacatttatcaggcttgttcttggccaaagcctttctctgcacctcagctgctccagggcgtaaagagatgacacctatctaaggtgtttttagaataaatgagagcgcgctagtggaatgg

SEQ ID NO: 1103 - DNA, 1142 bp, Homo sapiens
gtggatgtcttccttggaggggggagccatattttattcttttattgtcagtatctgtatctctctctctttttggaggtgcttaagcagaagcattaacttctctggaaaggggggagctggggaaactcaaacttttcccctgtcctgatggtcagctcccttctctgtagggaactctggggtcccccatccccatcctccagcttctggtactctcctagagacagaagcaggctggaggtaaggcctttgagcccacaaagccttatcaagtgtcttccatcatggattcattacagcttaatcaaaataacgccccagataccagcccctgtatggcactggcattgtccctgtgcctaacaccagcgtttgaggggctggccttcctgccctacagaggtctctgccggctctttccttgctcaaccatggctgaaggaaaccagtgcaacagcactggctctctccaggatccagaaggggtttggtctgggacttccttgctctccctcttctcaagtgccttaatagtagggtaagttgttaagagtgggggagagcaggctggcagctctccagtcaggaggcatagtttttactgaacaatcaaagcacttggactcttgctctttctactctgaactaataaatctgttgccaagctggctagagatccgctttttttcagcaaacactgagcacacattttgctagtcacatcaggccagacattggtggtagagagctgggtgaatgcgtgcactgtcctctgagagcttgcagtctgagaatgcccttggaaaccccgagttaccgtccagtggatgaaaacgggcagctaaggcaagagtcctagcacactgagagcctagtagagcccgctggctgtggggatggagcagtttcaggagtcttccaagaggccccattagctccaggtcttagatcagctgagagtggatgtcaaagagggactagccagcgtcagaggtaagagaaacgatgttcgaaagatgtgatggggccaaattccttgggtggcccagggagtgtgtgcttctcttggggaatgtgtggtgccaggtaaagatctacccggcccaccgatgctttgatactctgttctgggaggaacg

SEQ ID NO: 1104 - DNA, 1238 bp, Homo sapiens
tgtgccccaccacgcccagctaatttttttgtattttttttttttttttttttttgagacggagtctcgctctgtcgcccaggctggagtgcagtggcgggatctcggctcactgcaagctccgcctcccgggttcacgccattctcccgcctcagcctcccaagtagctgggactacaggcgcccgccactacgcccggctaattttttgtatttttagtagagacggggtttcaccgttttagccgggatggtctcgatctcctgacctcgtgatccgcccgcctcggcctcccaaagtgctgggattacaggcatttttttgtatttttagtagagacgatgtttcaccatgttggccaggctggtcttgaactcctgacctcaggtgatccactcgcctcggcctcccaaagtgctgggattatagcatgagccaccgcacaccggctggaaaataagtaactaaaaaaattttttttgtgaaccatgatcacaccactgcactctagcctgggtgacacagtgagaccctgtcccaaaaaaaaaaaaaaaaattatcaagctgaataagcaatatataaaaggataatacttcatgaacaaggccttcttccaggaatgcaaggtggtttaacatttgcaaatcaatcaatgaaattcagcatataaacagataacaaaggccgggcgcggtggctcacgcctgtaatcccagcactttgggaggccgaggtgggcggatcacctgaggtcaggagttcgagaccagcctcaacatggagaaaccccgtctctactaaaaatacaaaattagccgggcatggtagtgcatgcctgtaatcccagctactcaggaggctgaggtaggagaattgcttgaacctgggaggcggaggttgtggtgagccaagatcgcgccagtgcactccagcctgggcaacaagagtgaaactctgtctccaaaaaaataaataaataaataaacagataacaagaacatccatatgattatctcaatcaaaggaaaaagattgataaaaatcaacactctcatcaaattagggatagcggggagctccattaagcttcattaagatacccttgattaaaaaaaatatctaaaatcactttggggttaaatttaaatgcagtccctctgagattaggaacatgtcatcatatcatcacttccacattgtactggaggtcttggcaagtataataaggcagtaaaa

SEQ ID NO: 1105 - DNA, 1335 bp, Homo sapiens
ccttctgctctggccttggctgcagggcagggtgaatggcacgcagagggggtctgcccccttgtcttcgctgcctgcttgttccttccatctgctttgattggctccttcccagccacagaaactacccccaccccagtgcttcctgctcacagatgctcccctttcttctttatagggatcaagcatgaattgcaagcaaactgctacgaggaggtcaaggaccgctgcaccctggcagagaagctggggggcagtgccgtcatctccctggagggcaagcctttgtgagccccttctggccccctgcctggagcatctggcagccccacacctgcccttgggggttgcaggctgcccccttcctgccagaccggaggggctggggggatcccagcagggggagggcaatcccttcaccccagttgccaaacagaccccccaccccctggattttccttctccctccatcccttgacggttctggccttcccaaactgcttttgatcttttgattcctcttgggctgaagcagaccaagttccccccaggcaccccagttgtgggggagcctgtattttttttaacaacatccccattccccacctggtcctcccccttcccatgctgccaacttctaaccgcaatagtgactctgtgcttgtctgtttagttctgtgtataaatggaatgttgtggagatgacccctccctgtgccggctggttcctctcccttttcccctggtcacggctactcatggaagcaggaccagtaagggaccttcgattaaaaaaaaaaaagacaataataaaaaggctcattaatgggatgtgtttttcaaggttgggacacaggagacttcaggattgggggtgcactgggataatggtgctatctctctcctctgtactccacacccaaccagcccctgcacacccttatctggctccaatgactggctgagacgcctttctgatggtcaccattattctgttggtgctgtgattgacactggactggctgtttaaggagtgggtgctggctacaggggtcttccagcggaagtgatttatgcctgaactgggtgctctgtagccttgcctggatggacagtgaggtccatctgatattctgttctgtccctttctaggtgtgggctgataggcaagtcagaggtagctcaaaggttctgtttggtctgctgtcttccctggatggctgactcaagtttatgagggtcaggttcagtggctgctgtgagtcaggccaagttgagcctttgacctcctctagatgtggctggagtgcattcagggtggggccagccaggtgg

SEQ ID NO: 1106 - DNA, 1187 bp, Homo sapiens
acgtttggactcagggttccgaggaaccaggagcgatccttagtgggccgagacttccgaatttgatcaaaggtaaagagggactggagagcggtccatctgacttctgtgggggatgggcaggagtcaggggcggacgcctgaatcttgtttctcagaagagccgagaggcctaggctcaagcttggggcgatccggtacttggaggttcgaagctcctagtttcgggttgagaccgatgtggagggcgatgacgcgcgggttccttgacatcgaggatcagtaacacccggagtgggtggggaacgaggggggcggcccctgagctcaggccccgcccctttccggggacgtttcaccggattggctgtccttccataacgacatgcggccccgccccggcgcgcgccccgccgcgtgcccagcccgggtagctgctgcagcctacgctgcctcggccactgcctgccgcgtgcggagccggagcccgagcctgagtggcgccgggcccgacgtggggctcctgggccgcggcggcgggcgggcgatgctccagaggcctgaccagccatggaggccgaggcaggcggcctggaggagctgacggacgaggagatggcggcgctaggcaaggaagagctagtgcggcgcctgcggcgggaggaggcggcgcgcctggcggcactggtgcagcgcggccgcctcatgcaggaggtgaatcggcagctgcagggccacctgggcgagatccgcgagctcaagcagctcaaccggcgtctgcaggcagagaaccgtgagctgcgcgacctctgctgcttcctggactcggagcgccagcgcgggcggcgcgccgcacgccagtggcagctcttcgggacccaagcatcccgggccgtgcgcgaggacctgggcggctgttggcagaagctggccgagctggagggccgccaggaggagctgctgcgggagaacctagcgcttaaggagctctgcctggcgctgggcgaagaatggggcccccgcggcggccccagcggcgccgggggatcaggagccgggccagcacccgagcttgccttgcccccgtgcgggccccgcgacctaggcgatggaagctccagcactggcagcgtgggcagtccggatcagttgcccctggcctgttcccccgatgattgaaggcactg

SEQ ID NO: 1107 - DNA, 1341 bp, Homo sapiens
tgcagcctggatcgagaggagccggcagctgcagaaggagaaggacctggcagagaagagggtgagcacctgggcagcatggggtggtcgcctagtgcttctggtggcctgacggcactgaggcgggggccaaccccagagaggtgagacggggcttggagaagggaagggccgtggtcggtagcatctactttggattctcagcagctttcctgcaaggcctgccctttttgcactccgcttggtagagccctgagtgttttctggtgatgctgagtggcctgaagtcctaggtcacccctccctgtcccgtaggccaagttactggaggagatggaccaagagtttggtgtcagcactctggtggaggaggagttcgggcagaggcggcaggtgaggctgcagcaggggtggtacaggggacactggtggccttgctaccggaatcccgaggttgggtgcgtggagggaggttcctgactcgccgattcttcccttaggacctgtacagtgcccgggacctgcagggcctcaccgtggagcatgccattgattccttccgagaaggggagacaatgattcttaccctcaaggacaaaggtaatgcgagctgggtgccctgggtgggggcacagcctctgctgagttgcggacaagtgtgaatggccactgctctgtgctgcccccaggcgtgctgcaggaggaggaggacgtgctggtgaacgtgaacctggtggataaggagcgggcagagaaaaatgtggagctgcggaagaagaagcctgactacctgccctatgccgaggacgagagcgtggacgacctggcgcaggcacggcctgggcaggctgggtggcgggggctgaggtggagaatgtcgggaatgggggctctgaggaggtggtggctcagtggcttttcaggagccagcctgggtcccaacctgtacctcttgccttgcagcaaaaacctcgctctatcctgtccaagtatgacgaagagcttgaaggggagcggccacattccttccgcttggagcagggcggcacggctgatggcctgcgggagcgggagctggaggagatccgggccaagctgcggctgcaggctcagtccctgagcacagtggggccccggctggcctccgaatacctcacgcctgaggagatggtgagccctcccgtgccttatactcggggtcaagattctccctccctctggggctcctgccctgcccgcaggcactgagaagacagggcgagtatttgtgttcacaaagcgcttggcctcgcgggtgagcactaaatggcaaccgggggaggcaccaggtgtggatgggtc

SEQ ID NO: 1108 - DNA, 1218 bp, Homo sapiens
atgaaaccttatagtttacagaacctggcccagccctcagattgcctctgatgctcagaagaggtctgtgttcccatcgcacaggtaaggagctgggctcaggatggtgaggtgacttgccgagggtccttcagctagtccggtggcagaggcagaaagcctggatggctcattccacctgctttgttttttctaccaaatgttgttgcttaacagggccaatccctgaagataaggagaagcttaaatcagccgtgggccgggaagagtccctgtctgaggagcagccgggctctttagctcaccagggactcatgatgtccccagctctggacgagctgtggggaagctacataccacccagacaagttaccagggcccacctgactgccatatatccagtgatcttatttcagcacattgacctctcgtggctttggacactgctctcttctctctccttgaaaagtggaccatcccccgctcctcagtctcctgcagcactcgattctctattgtcagtgtctatttgctggtctgtccagtgctgcctcccatcaccctgtgtttggtgcttccccactgccctggactctcctccttactcttgtgcatggctgcggccactctgtggtttgcttctgccttgtgttctgtgattcctgcatctaacagccgtggctgtggcttccctcctctgtccatgtctacactggcactttgtgtctgtattaatcctgatcttcatgatcttctctagtaaactaaatggtgaggtttgtgttttctagatgaggaaacttgcttggagaggtgttaagtaacttgccaccggtctcacgggaagggcaaagccagttttggagggctcttggcttttgagcacaccctttcccaccctcaagcagcctctgcagaactcagatgtccagcgctggcctcactgtctctccccaaaccagcgcctctatccccatttttaatatttttatttattttaagacatggggtctcactctgtcacccagactgcagtgcagtggtgtgatcatagctcattgtaacctcaacctcctgggcttaagggatcctcctgcttcagtctcctaagtcactgggactatagacacacaccaccatgccccagctgcatccccatctttgtgacacaatccttgtcagcctgaccagaaaactcttccctcccccatccagtca

SEQ ID NO: 1109 - DNA, 1228 bp, Homo sapiens
tcggggctcggggcgcgcagcaacgaccacccggccacagactacgccagcggccgcaagcccggatttaccgcagcctgccgagcgcagccgaggcgagccgaggccagccgagccccgagcgccgccccgcccgccgcccgccgcccgccgcccgccgcccgccaccgcccccagcccccggcgcgccggctcgccccctacgagggaggaggagccacggccccgccgctcggccgcgcgccgtgcagacgcccgcccgcccgggccccgccggcttcccgggacgcactcctctccctccccgccggcgcgcgcaccctggaccgggcgcgccctgaacgcgcggcgcgctcggccggactcggagggaaaccgcggcagagctcggctgcagcgtggtaaaggatggcgcgggctcagcagaaaggaaatcaaaacgctcccttccttccgcggcttcttctttccctgtgtccgaagaggtctgcgttgcgacttacgtggtagtgcttggaaggtgcggagtagatgagagataagtgaatgtggacaaacctgtcacgtaggacgaggtggccgagtggttaaggcgatggactgctaatccattgtgctttgcacgcgtgggttcgaatcccatcctcgtcggccctgttttatagaggttgggggggaagcatctacattttcacatcctgcctatttggagcagcaagctggaggtgcgaggggtgaggcatctaaattttcacatcctgcctgtggagcagcaagctgaagaaaactgaactgggggtgagagtggaattcgatcccaagtctctctggtctttatccaccacgcatctcctgcctgctcctacttcaggtgtctgtagctctgggcagaggccaaaggtgttttctttccttctagaaagagggcccaggggttggtggcacggaaaagactagaaccgggattctggccagtgtgaagttgggggccaacgtatgatctgcaggaatcagggaagccccccattggaggcatcgccctccccgtccgaagtagtggtacttgtcctactctccagcacttctcctagggcggagaccttgtgtccacatgccctgctccccaacacacacaatctctttttttttttttttttttttttttgaggcggattctcgctctgtcgcccaggctggagcgcagtggcgcgatctcggctcactgcaa

SEQ ID NO: 1110 - DNA, 1357 bp, Homo sapiens
ttatacatgcccttctgcaccttctttccaaagttagtttcttccctagttggaattggatgtcctcaggtcttaaaacttgtgcagttgatgctacttctatctagactttgaatgatttttaactcggaccttggcagtaactcctagatagaaaatactgttaattttttttttttaaacctcagggagctaattggaacctttccatttttcctatcctctgctgacagcttgtgatgtggaattaccttctctgaggaatgctaatgttaacatcatcaagagcaaggaatgtctctttgcctacttttatgaaacaagatttgctattaatttaagaccttagtctgaggttgtttagcctccccagttactctctggccttcaagctcttttcattgttagagattactgtgatactgggggagaagggtacaagtaaacttaaaaggagtgtcaagttatcagactttgtaaagatgttgaagttttaaatgggaaagcccttttgagctttgctgtaaagccgctgtattgtgctctctttcaggtgggatgtgtgtgggctgaaattccgagctgcggttgtgcatgagaatacacccttcgtggtaccccatctccgggacgttctcggctctgtgcgttcagtccctcaggaaccgtggaccttaatttaccttgctaagttcagaccttctcttcctttcctttcctttcctctcctgcccattttcctgttcttctgtccttcaatacttctgtagcttcccattcatgttctcttctcccagcaggcctcattgtgtgcagaaactgtggtgggggctgtgctgtctcctccctgcctcctgcctcctgcggctgttggatttgggaatgaccttggtgagagtctcactgctccagggtctctttttggtccaaaggctagacctatagagttggatcactttttttctttccggtgaaataaatggtttttcaacttagggtatgtgtgctttgcgagacttcttgcttgggcttgtttgggggttcatttgtaccttgaaggggagggtataaagttttaagacactcagctttgggtgaacgtcactgtagttattttgtttattgtaagtaggacttgtaggtgccagaggaaggaggttatacagaagcccaggcaggcagccttattccaatgaagacttttcccactggtccacctttgttataaaaccaactacttttagtttacagatgtaggtcttctcttctagagaaacagtcaccaccttcccttaagactaccattccaatcacccagtcagtgtatctagcttaacttaatttccagggaaaagga

SEQ ID NO: 1111 - DNA, 1357 bp, Homo sapiens; identical to SEQ ID NO: 1110

SEQ ID NO: 1112 - DNA, 1147 bp, Homo sapiens
ggaccatagttagggtatccttgtctgaagcctaagggtcccaagcaccttgaaacgcctttgctgggggtggagggagtctgtcaaatacagggtcagtgggaagcagctgcacctactccttaaccacagggaagaaacctgtcccggcccccatgcagcggggagaggtgggttctgagtttggagtggaggactcgctccatcaggcagggaccacatcccctaacatcacggcatggtctgtccatctgcttcctctaccagatgctccgagacaaattccgagagttctcccgggacacaagcaccatcggtcaggagcgcgtagatagcgccaatgcgctggccaatgggctcattgctgggggccatgctgcacgggccaccgtggccgagtggaaggacagtctcaacgaggcctgggctgacctgcttgagctgctggacacacggggtcaggtgctggccgcggcgtacgagctgcagcgcttcctgcacggggcacgccaagccctggcgcgggtgcagcacaagcagcagcagcttccggacgggactggccgcgacctcaacgctgccgaggccctgcagcgccgacactgtgcctacgagcatgacattcaggccctcagcccccaggtctgacccaagcatgaggaggtgggggaggcttagaggaggccatgggggaaatgccggggagagttcccaggagctagggtagagctcagaaatgctgggaggacggcactctttcgagggccatttcgagatgaggaaattgctccaagaaaacatctctgtttggccaggcgcggtggctctcgcctgtaatcccagcactttgggaggccgaggagggcggatcatctgagattgggagttcgagaccagcctgaccaacatggagaaaccccttctctactaaaaatacaaaattagccaggcatggtggcgcatgcctgtaatcctagctactcaggaggctgaggcaggagaatcacttgaacccaggaggcggaggttgcagtgagctgagatccctccactgcactccagcctgggcaacaagagcgaaactccgtctcaaaaagaaagaaaacatctctggcaggggacatctagccactgcattcacactttt

SEQ ID NO: 1113 - DNA, 1132 bp, Homo sapiens
aggagaaggggaaaaaaagatgagctttttggtgcccttttcatttgaatgggtaagttgtcattttgctctaaaaggagatggagagatgtcagccttggaggactgggcaggcccagggtttggggtaagtgatgcaagttatggatgaacttctgggaggcctgacccaaatggtcctctcttgcagacgtgaatgtggaccagccagatgagaagtcaatcattacctatgtggctacttactaccattacttctccaagatgaaggccctggccgtggaaggcaagagaattggcaaggtactgtccatgggcagtaggcataaaggccagaggaggcccggctgaggggtcttactgccctagtgcaagggcagggtggagctgcaggactgggccagggaccctgtggctgggactgtcacgtccctgtcttctgcctcccaggtgctggaccatgccatggaggcagagcgcctggtggagaaatacgagtccctggcctcggagctgctgcagtggatcgagcaaacgatcgtgaccctcaatgaccggcagttggccaactcccttagcggggtccagaaccagctgcagtccttcaactcctaccgcaccgtggagaagccgcccaagtaggtgtccctggggccccacccttccctgagctgtgctcccacgagaggaagcctaaattagcacagccttcagggagggaaatttggcagtacataaatgcagtggagatttcccacaccagaagcatccaaacaacatagttgatacaaaataaaattttttaatgattagtcgtttttaaaaatcatgctgtgggccgggcatggtggctcacgcctgtaatcccagcactttgggaggccaaggcgggcgcatcaccgagaccagtctggccaacatggtgaaaccccatctctactgaggtcgggagtttgagaccagcctggccaacatggtgaaaccccgtctccactaaaattacaaaaaaattagctgggcatggtggcacacgcctgtcatcccagctactcgggaggctgaggcaggagaaccacctgaacccgggagacagaggttgcagtgagccaagatcacgccactgcactccaac

SEQ ID NO: 1114 - DNA, 1209 bp, Homo sapiens
ggggtctcactatgttgcccaggctaaaactattttttaaacatacatgcttcttagtgtcttctcttttaaaaggtaatgaaataataatcccagattcaagctttaacttgaaactgactttacaaccactttgataagtaactgatttctagtacacagttcaaagactaggtcctacccaaactttaaaaaatccaattgactattacctaggtgtcctcctaggtcaggatcctgtttctacctgttaactgtgattttgaacagtggacaaatgggttggaataaagatagaccatttttttaaatgtggtaattttgtcatttatagcctcaaggcccctatcatgccacctatttctcttgctgatcacatggcagagtgaaatgttcttactgcattttttcttcatattggtagatttggagttaaatgggttggagtctgggaatggggatgaggaagcagtggatcgagaaccccgacgcttgagcagcaggcgttctgtcctcactagccctgtagcgaatggagtcaacctggattatgatggactgggcaaaacctgccgaagtcttccaagtctgaagaaaactttggctggggactcatcttctgactgtagccggggctcccacaatggacaagtgtgggatccccagtgtgctccccgaaaggacaggcaagtgcatctgacccattttgagcttgaaggccttcgctgccttgtagataagttggagtctctgccactgcacaagaaatgtgtccccacagggatagaagatgaagatgctctcattgctgatgtaaaggtaagggtttgatgtgttacatgacagctactgatccagctatggcagtcagcttccagattcagagggagaaaatataggaattttgggtgatctctggttcagtcagagagaagttaatatgcatgtgtgtttgttattgctgctcagtgttttcattactagaatgaggttatgtccctgttttgaaaatactaacatttatgtgttcattgaagacttataaatttagtcttaaacataggtttcaggctgaccccaaaaataaagtgacccaaagaaaatatttatataagaaatgttacattaaacttaagttaccttgagataaaactcaggacaaaagtgactgataggagtctcatcctaagcagattgagagaaatgaaa

SEQ ID NO: 1115 - DNA, 1233 bp, Homo sapiens
tattccttatagcccctacttaatgctttgcatatcacaggccacagcttattttgactatgtgtggagacagccctgataccctctcctttctatcttgttatgcagggggcagggtctgcaggtgcccttggccatgcctaggccatgcctaggcagatgaggagcccggacccctcagggtggggcatgtgccctctaacttgggccagatgactcagggccattcagcagagctggcttgcctcacccacaagcaagttagtagctcctgcacctacactctgacctctcccttttctagtgattcttgcacttgctggcagttctgtgtctgcatcgcacagatatgcctgtggcccttattatttcaggtacattgatcttttcttcccaagtagattagaagctccataagggcaggagccaaattaggttttaggcttcttttggcttttctacaccacaggcaggtaattagatcttgaaaatatttgtcaactgattgacattgccatcatttcttactttcttcacttaaggcattatctccaggaggcccttataaaatatccatgtaggatgtgaggatgatctggctgtgacatctgtcaccccattgatcaccagggttgattcggctgatctggctgtctaggcgggtgtccctgtcctccctcacagctcctcgtgcatccctcccgaagctgtgtgctctgttgaggacgaccatccctgatagaggaggatcagtcttccgtcaagggtatatgagtagcctcgctcccatgctagaacttccaaacaagctctcaagatccataaaatatccatgtattacctgggagctattcattcattgacttacccagtggttcctaactaaagtgtcatgacatgctgctagagcctaagtaatctgtaatgactacagctgctgctgctacagccaagcatctgccctttgttgttcctgttatcctttccagcagtcttagatgggtatttaattatccccactttactgatggggaaactggtcactcaaaatttgtgagtctgagatttgagcttagggcatcccttgaatagcatctatcccattctctcacaatttgaatttttctcttttcctgaatatgctatcttacattggagagagaggagtagcatttacagctgaggattgtgacttgttcacagtctgtttccctcctgaagagaggaagggtg

SEQ ID NO: 1116 - DNA, 1203 bp, Homo sapiens
tgggggagggactggttggctgtcacccaggacagggacacagacaattcataggggaagctggctggagagagccctggactggaagcccagagtcctgagtttgagtctgggtctgtgtctgatctgtgtgacctggggcaagtttctgtctatatctggacttgtgtttctgtctgtagcttggggaaagggggaaggaggaggtatgggttctgtgatttggatctgggattcctgagccagaggttcaaaggggaaggatgttctgccccagtagtgggtgcaaaccctcggaggctgggggtaagagacgtacagaggcctccccggacccttcccaccttagggttccacctggcacctgcagaggggtgctactggctgagtccccctcccaatccctaccaccagaccctcccggcctccctccagaattcagccctcagccccctgtcctctgtcccagcattccgccagccctcaccctgcccccttaccctggctctgctgagctgcccccaatgaatccatagcggtcggcctggcgatatgggccaggcccgctgagctctgagtcggaccccaaggagctggagtcatcctgcagctcgggaggctgcaccaggtcctcccccagggcctgggccatggtgcccggggccttcgatgccacaggcagagaaagtggggagaaccagtgtgaggggccactcccggccagcctggggcctggctgcggggtcagaggggggaggtttcagggtatctcaccaagccccctatgtctcctcttttatgggggcaggggctaggccctgccctgacagaaaagccaggcctctgtccggagacccagccccaagccctgcccctgtccccaccagcccagctcacctcccgcagcacctcacctcctcctctcacttcctcctcctcctcacacagctttggcaaccgctgggggcccctcccaagggtggggggtgtcaccccttcctctctgaggctcttcctgcctgccccagtgcccctgagctgtgggctcctcccaccttccccatggccccagtgactgcaggcttgagttcctgtgctggtgtggagggcccaggactgttagacgcaggggccgggccacctccagttcttttgtttgtttcttttgagacagagtctcgctctgttgcccaggctggagtg

SEQ ID NO: 1117 - DNA, 1103 bp, Homo sapiens
caaccccggggtcctccgaggctcaggagcctccctcgctcggcccagtccggctccgtcccaccgcggaggcgctctcccggcgccccccgcgcctcgctcccctctcccccttccctgcgaccgccggggcgccccctcgacgccccgcccccttcgcccaggccccgctcacggaggccgcagcgctctgggttgggggcggcgccgcagccaatggggaggcggtgtggcgagggcggcggcggttatgatgcgccgggccggcggacggcggccaatcagtggcgagcgcgagggcgggctgtgacgcggccggcgctcctcgtgcggcggcggcagaggagcgagtgcagcggccagcagcacatccccgctccacagtcgccgcagtcgccgcagccgccgccgccgccccgcgcgcccaaccgccgcggccccctgccccgccggcctgccagtgagagagcggcgagggggcgcccggccggactctgagcctagtcctctcgcgctgcggccgcccgcgcctcctcggccgcctgtcgggcatgaaaaccaaattctgcaccgggggcgaggcggagccctcgccgctcgggctgctgctgagctgcggtagcggcagcgcggccccggcgcccggcgtggggcagcagcgcgacgccgccagcgacctcgagtccaagcagctgggcggccaacagccgccgctcgcgctgccccctccgccgccgctgccgctgccgctgccgctgccccagcccccgccgccgcagccgcccgcagacgagcagccggagccccggacgcggcgcagggcctatctgtggtgcaaggagttcctgcccggcgcctggcggggcctccgcgaggacgagttccacatcagtgtcatcaggtcggtggcgccgggtctgggggccgcgggacagtcaggtgacgcggggcggggccggggcggggtccgggcagggggcgtgggccgggggggtcgggggccgggggagccggggccggggcggaggccggggaccggggaccgcagccggcgaaagccctccttctcccagccctgggtaatccaagggaagcgggttcgc

SEQ ID NO: 1118 - DNA, 1296 bp, Homo sapiens
gggatgtggcttctctgcagaacaggacagggcccctgtagcctctggaggacgatgtgggaggttttgggcatggcaggaagggtcacccatatctgggggaacagacgtaacagttggtaaacaaacaggtgctgtcaccgaatgtgggaagaaggctgtttgctgcgctgcaggagcctctgaatgatgcgggccggggctgcccaggcaacttcctgacaacgccttaggggtgggaggaaggaactggaggtcttgggcatgggcagggcagtaccaggagtgctctgggcatagtgctccatcccagggctgtgtatcttgctggcttagccagtggccctcacggtttgcttctgccccacagcctcgccgctcctgctatttgccaaccgccgggacgtacggctggtggacgccggcggagtcaagctggagtccaccatcgtggtcagcggcctggaggatgcggccgcagtggacttccagttttccaagggagccgtgtactggacagacgtgagcgaggaggccatcaagcagacctacctgaaccagacgggggccgccgtgcagaacgtggtcatctccggcctggtctctcccgacggcctcgcctgcgactgggtgggcaagaagctgtactggacggactcagagaccaaccgcatcgaggtggccaacctcaatggcacatcccggaaggtgctcttctggcaggaccttgaccagccgagggccatcgccttggaccccgctcacgggtaaaccctgctgcgactccacctgggtccagggggcggggagtgtcaccatctctctctcgaatttgcatgagcccaagttgtttttcagaaaaagggtgtgactctgaaaatgaacccgtgggggggttggctcaggcctgtaaccccagcactcggtgtgactctgaaaatgaacccgtgggggtgttggctcaggcctgtaaccccagcactcggtgtcactcttaaaatgaacccgtgggggggttggctcaggcctgtaaccccagcactcggtgcgactctgaaaatgaactcgtgggggggttggttcaggcctgtaaccccagcactcggtgtcactcttaaaatgaacccgtgggggggttggctcaggcctgtaaccccagcactcggtgcgactctgaaaatgaacccgtgggggtgttggctcaggcctgtaatcccagcactctgggaggccaaggcgggcagatcacctgagtccaggaattcaagaccacactgggcaacatggtgagacccc

SEQ ID NO: 1119 - DNA, 1173 bp, Homo sapiens
cccagccgatagctcatttctttataccactaaataatattccatcctgagtgttttgaattgccttttagaggttcatttacagcattttcatggtagcaaaaaaatcagaaataacctgaagttctttaaaaaacttacagcagagtacactaggcaatcatcaaaagaacaaggaatctttctatccacaagaagggaaggtgcccagaatttactgttaactgagaacaagttggaaatagtatattttgattgcccagcttaaggcaggaatacctgaaaccatacctgttggttatttccgatgggtgagattttagggcaagttcactgtctgttgtttcatgtctgcatctatgcagacaaaaacaaaaaacagatctgtgttagctgcttctcttgccctgcccccgtcacaggtacatgtactggacagactggggtgagacgccccggattgagcgggcagggatggatggcagcacccggaagatcattgtggactcggacatttactggcccaatggactgaccatcgacctggaggagcagaagctctactgggctgacgccaagctcagcttcatccaccgtgccaacctggacggctcgttccggtaggtacccacgcagtcctggggcacccctttcccctttgtccccagggcttttgaaggcgttccttcttaactcaggcctacagactcttctctgaaactctggggccctgaggaatgcaggacttctcagaacttggaacagcgtcagggtctgtgtggcatttgccaccagcccttgaatatttctatagcaaatgtggcacgttcattctaagtagggcagaaaagactatctgtagcccacacccatgcacagtttttttttttttaactttgtttttttgagacagagtctcactctttcacccaggctggagtgcaatgtcataatctcagctcactgcagcccccacctcccaggctcaagcgatcctcccgcctcagcctcccgagtagctgggactacaggagtgcgccaccacacctggctaatttttgtatttttggtagagacggggtctcacatgttgctcaggctggtctcaaactcctaagctcaagggatccttcccctcggctcccagagtgctgggattacaggcgtgagcca

SEQ ID NO: 1120 - DNA, 1284 bp, Homo sapiens
ggaagacttcaggatggcaggacaacagaaagaggtccaggttttagagcaagggcaggtcaaacttagaaaattctggaatgaggatgtgcatttcctcttctggatctgctaaaagaagagggaaggaggggctgctgggggaggagcccagagccgagtttacatccggatcccgcaaggcctcccctgccctgaggtcttgttttgtgatgtgcttgtgtccatcctggtttctgccgtgtccccaacatccggccaagcttaggtggatgttccagcacacactcaccctgtctgtgcatctgtttttgtgtccgtaagtgggtatttactcgccttacgagtgagccactgtgggaattcagggaggtggcgcagtgaccacccctggagggatatgtgtgtggcaggggtcgagggtctcgcccttccctgcttcctgcgcgtggctttctccaggacggggagggctgagctgaagaggtggggacagttgcgtccccccgccacccactgtcctgcggtgagagcagactcactgagcctgcccttctcccttgtgccttccagctacatctactggaccgagtggggcggcaagccgaggatcgtgcgggccttcatggacgggaccaactgcatgacgctggtggacaaggtgggccgggccaacgacctcaccattgactacgctgaccagcgcctctactggaccgacctggacaccaacatgatcgagtcgtccaacatgctgggtgagggccgggctggggccttctggtcatggagggcggggcagccgggcgttggccacctcccagcctcgccgcacataccctgtggcctgcaagttccccaacctggcaggagctgtggccacacccacgactgcccagcagcctcaccctctgctgtgggagttgtccccgtccacccctgggtgcctttgctgcagttatgtcgggagaggctctggtgacagctgtttcctgtgcacctgctgggcactaggtcccagctaatccctgtgccaggactctaatttcaccctaacacacatggtggttttcattgctggggaagctgaggcctgagcacatgacttgccttaggtcacatagctggtgagttcaggatcccccagagataccagggccagcactcgatccccacccagccctgaaccccaccatgtgctgggattgtgctgggagtgtccacacgcccgggaccccagggctggtgctctcatctcctttttccagatcatgagaatgaggc

SEQ ID NO: 1121 - DNA, 1209 bp, Homo sapiens
attcagaagtgtaaaaatattgcacattgacaaataccaagaatttttgcgtatgtttatattgtattgttctaaataatgggtagcctgtgaaataagatcttgccacccatgtaataatagtagtaatactatagttaaaatggctgtaagaatagttttataaaagtgaatacacagatctattgtatttgaaacataactttgacaattattagtgtgaccaaagtattaggcggttttcatacatttttcaccttgtacaaaattatgaattcatttttcctccaggccgacaaggagttgtagaatgaaaatgccctctaagtgttattttggttgttctaacttacaaaagtgattttgaataagaaatatttggtgttctttttataaccagtttttgattggtaattgttttctgtattgtttaaaacggatcaaaaatgtaagtctattggtagagattaagtaaagtatttattgctacatcatagttgataaattgatgttatcgtaaagccatatgttctgttcaagtcttgtttgcttgaaatgattattcctacaagtgaaacactagactatttggagtgtatatggcttgtgttttgggattttttttttttttttttggcttttgtttttgtttgtttttttgtttcatttggtagttcatctgccttttaacccattcaccaaaatttaccttgttaacaagcatcaccaatgaacatttcagagcaatctgcatatttaacagacctaaaataaatcctattaggcaagtcagttgaaaatgctcgtgctgctaatggaattagagtgcgttcattttacaggctagtattttaaaagtagaaatcaaaatctggcaccgaagcatgctaattgtttactgtaccttgtgaggttttcactcataaatttaaaccagtgtatttttttagaactggtttgtgtatatatatagtgattatggatactaattcaatgtaatttataattttctatgtcaatacaaaaatacatcacagccttctcaaacagctcaagcaatatattgtatattgccatatcgtctggtgaaagggttaaattacttcacctcttgcacttttagatgcaaatcagtttttcatttctgtaatagaaaattattcacgtatttttacatcatttgtttttcctgaccagtatttaaaacca

SEQ ID NO: 1122 - DNA, 1230 bp, Homo sapiens
gtgttatcgggctgcactttaggtggcgatggggagagggaagaggagtgaggggaggggagcgggggaaggagactgccagagaaggtcttggaaaaggcggtgttcattagaaatctcaaaaccgagtcaccaagttccctctgttggagcccagtggagcctctgggagaaaagctggggtgacttttcctacaaggggcagagggactctgctagatttttgtttttcatttgtttttaattttgtaacatggaaactctttccttaggatataccagctctcattactcagctaggaattatacctctttaaagcctgaatttaaaagtctgacagttttaaatgcttactaactgtgggagttaaatcattacgaagtgaggaatacagagtgttgtccctgattctgggtttaatctggtaagaatctttacagaggacgaccacacgccgcttcctgtagcatgtgtcgtggttgtaattctctcatgtgcatattaagaagttgctgctcagatgtggctcttccctttgcagaggccggtgccctcgaccgcctcctggatctccccgccgcagcctcctcagaagacatcgagcggtcctgagagcctcctgggcatgtttgtctgtgtgctgtaacctgaagtcaaaccttaagataatggataatcttcggccaatttatgcagagtcagccattcctgttctctttgccttgatgttgtgttgttatcatttaagattttttttttttggtaattattttgagtggcaaaataaagaatagcaattacttgcaattgtctttttcttccacacctctgtctcatcaccagcgccacccatgggttttaaaagataaagcttgatcataatcgtggattagacatgaattttaaacccaaattctaccgtcaagagcatctgagacaccacctgttattgcatgtccaggggacataaatttatctccatattaagctgagtcaaatgtaattatgaaggtaagtctgttactgagatgaacaaaaacacaaaacagacaaaacccctgccctcgtggagctgatattttagggagatgggaatgaaaaagactacaacaaccttaaacagatgggtgagttgcgtggtactcatggaggtggtcagtgctgagaacagacgtgttggccaggtgggagggccaggagcaaggcaggagaggagagatgggcgggca

SEQ ID NO: 1123 - DNA, 1183 bp, Homo sapiens
ggggtgtgcagggtgggcgggcaagcatctggtgtcttgtggctccagagaccaggtgggaggtggaggcatttggtcctgagtgtcctgacaggtgatggcagctcccacatctcgctcaggttcagaggaggcagcatgggccgagggacagtttttggcttagtcttgctcttataaaggcttccgggtcatggcacctgggaaggggccctcgctgcaggccccttctaaggaccccctcttcccacctctccccaccctctctctctcaggactgcctccgggcctgccaggagcagatcgaagccctgctggagtcaagcctgcgccaggcccagcagaacatggaccccaaggccgccgaggaggaggaagaggaggaggaggaggtggacctggcttgcacacccaccgacgtgcgggacgtggacatctgagggcgccaggcaggcgggcgccaccgccacccgcagcgagggcggagccggccccaggtgctcccctgacagtccctcctctccggagcattttgataccagaagggaaagcttcattctccttgttgttggttgttttttcctttgctctttcccccttccatctctgacttaagcaaaagaaaaagattacccaaaaactgtctttaaaagagagagagagaaaaaaaaaatagtatttgcataaccctgagcggtgggggaggagggttgtgctacagatgatagaggattttataccccaataatcaactcgtttttatattaatgtacttgtttctctgttgtaagaataggcattaacacaaaggaggcgtctcgggagaggattaggttccatcctttacgtgtttaaaaaaaagcataaaaacattttaaaaacatagaaaaattcagcaaaccatttttaaagtagaagagggttttaggtagaaaaacatattcttgtgcttttcctgataaagcacagctgtagtggggttctaggcatctctgtactttgcttgctcatatgcatgtagtcactttataagtcattgtatgttattatattccgtaggtagatgtgtaacctcttcaccttattcatggctgaagtcacctcttggttacagtagcgtagcgtgcccgtgtgcatgtcctttgcgcctgtgaccaccaccccaacaaaccatccagtgaca

SEQ ID NO: 1124 - DNA, 1179 bp, Homo sapiens
caggcacggtttggaaatattcacatcgcttctgtgtatctctttcacattgtttgctgctattggaggatcagttttttgttttacaatgtcatatactgccatgtactagttttagttttctcttagaacattgtattacagatgccttttttgtagttttttttttttttatgtgatcaattttgacttaatgtgattactgctctattccaaaaaggttgctgtttcacaatacctcatgcttcacttagccatggtggacccagcgggcaggttctgcctgctttggcgggcagacacgcgggcgcgatcccacacaggctggcgggggccggccccgaggccgcgtgcgtgagaaccgcgccggtgtccccagagaccaggctgtgtccctcttctcttccctgcgcctgtgatgctgggcacttcatctgatcgggggcgtagcatcatagtagtttttacagctgtgttattctttgcgtgtagctatggaagttgcataattattattattattattataacaagtgtgtcttacgtgccaccacggcgttgtacctgtaggactctcattcgggatgattggaatagcttctggaatttgttcaagttttgggtatgtttaatctgttatgtactagtgttctgtttgttattgttttgttaattacaccataatgctaatttaaagagactccaaatctcaatgaagccagctcacagtgctgtgtgccccggtcacctagcaagctgccgaaccaaaagaatttgcaccccgctgcgggcccacgtggttggggccctgccctggcagggtcatcctgtgctcggaggccatctcgggcacaggcccaccccgccccacccctccagaacacggctcacgcttacctcaaccatcctggctgcggcgtctgtctgaaccacgcgggggccttgagggacgctttgtctgtcgtgatggggcaagggcacaagtcctggatgttgtgtgtatcgagaggccaaaggctggtggcaagtgcacggggcacagcggagtctgtcctgtgacgcgcaagtctgagggtctgggcggcgggcggctgggtctgtgcatttctggttgcaccgcggcgcttcccagcaccaacatgtaaccggcatgtttccagcagaagacaaaaagacaaa

SEQ ID NO: 1125 - DNA, 1148 bp, Homo sapiens
aaaaattagccaggcatggtggcgggtgcctatagtcccagctactcgggaggctgaggcaggagaatggcgtgaacctgggaggcggagcttgcagtgagccgagaccccgccactgcactccagcctgggcaacagagcaagactctgtctcaaaaaaaaaaaagcctgcaccaaggacccgggcctcccaggagtcgtgtcgccttccttggctccccagatgggtgtgttaatgtaaggtttccctgcactgaccaggatgtggcctcccccagccctgctctgggaggaagtgaagcgccgcagtgttgttggtgtctaatgctttgtgtttgaaccctgttccagtcagctgtcggccacgaatatcagtcgaaactttccaagcactgctcgcaggtggactcggtccgtggcttcggaggcaagtttggtgtccagatggacagagttgatcaggtgagtgatgtggcactgggactggggcaggttggggcaaggggggcgttccccgtagatctgagccctgttgggccacttgtagtagcaggcaggtgccctccagctctgggggactgcagagaggggcatctgcctcccaggatgctctgagagcctgggctctcagagagaggaagcaggatgcggcgggcttgctgtagcagtccctgcggtcgctcttcactacgtgcctcagtactggatggccctgtgtctgtcccaatgtgccagcagggaccgtttccacccgtgtttctcacatgtgtgttactgtgacagagtgacatcagagcctataccgggggggcaggatgcgctcgtgtccaggacccaggctttgcgtccaggtgttgttgcagtcatcctaggcccgagcctctttgattctcttcggctcgggtctgttggctcttttgtttaatagaggagcgatcaggagcctggagggagcagggagctgatgctggtcgcagattgtggctttgtgacatattagccacggttctgaatttatgtgtctgtgaaaggaggatgatcatacctatctcacgggtgtttgctcagatgcccatcgcagtgcctggctggtgggagtgcacccctggtggccactgctattctcattactaatactaatgttctca

SEQ ID NO: 1126 - DNA, 1140 bp, Homo sapiens
tgaaaacggcacatccagaaacacagctgctaaataggaactcgcagcttgagtgttatggcgctccagccccagcggcgttgcttatcgtggtggccacaccccgcacgtctgtgttgcccgtgtgagcctgtgctgtctcatggtgcgggtggaagccgcatgcgtgggagcttccatggggtcctgtctggcttagtcacgatgctgaggtcatagactaggttatttcctgccactctccaaggagggcctcttcatggatgttatctaaagtattaccaaagatccggaagggaagagtagattgagtgaatcatatgcgtttaactgtattgaaaacatactttccacctgtgacctgcactacctgttaatgatgggttctggcctttcattgtgcatgtagactatgtgaaagggtttggaggaaaatttggtgtgcagacagacagacaagacaaatgtgcccttggctgggatcaccaggagaaattgcagctgcatgaatcccaaaaaggtacattcactctgcctgtatgcgagatggttttagaagtttgtttttgttccttgcggggtcagttggtatgtgttgtgtctgcgtgtgcctgctgcacattgttttgtcttcactgtttgaagttgtcctgtgtgcccccccaatcccccagttccctccagctagtgtagtcacaaaccctccctgctgacacggggtggtaccccagagagctgggtttacctggaagtgggttgcacgggccaagcctgcagcagggggctgggtttacccaggagtggggacatgggtcaagcctgcagcggggggctgggtttacccgggagtgggggcatgtgtcaggcctgcagcggggggctgggtttacccgggagtggggacatgggccaagcctgcagtgctcctcatccaggcttcttgtctataaagtgggccacggtttttggcaggagatacttacttttgaaccgaaagtgttttcttgttggaatgggtgccccttccctggaaaaaggagcctgagggggctgaaagcctctcagtgtgacccagccctgagagaagcaggagcggggctaatggggctgcagcgccctccgaatctgcagggtctctcc

SEQ ID NO: 1127 - DNA, 1545 bp, Homo sapiens
gttttgggttttttctgtttttttttttttttttttttttttgaaggtggggaggggaatatacacattgcttttatatttaatacttttgctgatgcttttgaaaatgtttatgccacagaatttgctaatatattgtaatcacattccttaggaggactttggtaattggttttatgcattgatggttttttttttcttttttgccaaattgactgtcacgcggcagcttcagggagctcgcattctcttgtgttcgtgttgccctcgtgcccatcaagtgcagtcgggacctcccaggacaagcacgaggcctcaggtcggccctgtggcgggtaggcaggaaggactgtcccagacgaggggcttcctctagagtctcactgctggggaggagaggactgggcctgatggaagttaacccggagctaagtcacccagagcacaggagctgccatgtcagatgggaaatctgcctatgtcataccgtgacagcccgcaggatcaggtgacttctagcagagaccctggtttttttcctgtgcccactccggcttgtcctcatctctacccatcccctgatgcccaggtcaccgggagggctgctgggagcctctcctgtccccgccgggcagtgtcactgagtccttgaaatcctcccctgccccgcgggtctctggattgggacgcacagtgcagttgaggtctgcgtcgggcttggcttttcacaaaggctgatgtcttaactgtcacccatatggtccctgggccaccgggcagcctggggcggtgtgtgtgccatgtcacagcatggcctctcggccttgggaaggaaggcagtgcctgctctgctgtgagccgccaggaaccctcctcctgtcaatgggggtgtagtatttttgccaaaatatcatgttcaatttcagtagtttgatcagttgaaggctagaagtgtgaagtgcagatgagtgtgtgttcttccccaaggtccccccacagctccaggacaccgctgtcctggcatttgtggccactcactttgtaggaaactcatctccttcctgaggagccgggaggctggaccagtcccgtcgtgcagtcaggtgggcggtgtgtctttccagaaggtcacgtggaaatgtctcgggacttgggtcccggagtgcccgtgaagcgtgtttttgctcctgaggtgcattttctcatcatccttgctttaccacaatgagcaatgaggtcgggttttatatgcaacttattgtatctgaattcctgtagcacacctcataggtatgatttttttaaattaaagaattcagaataaacattttttgatccacttgcgtgatttgctttggtctgtggtcactccgttctgcagtggaagctgcgtcgacactctcggtgtcctgcgccccggacctgggctggcggaggctctcctgccgtccagtgcgtctcacgcgttctgttctggctttagaccgaaccgtacgttcccttttcagtgttcattcaaaggtgctgcttatgaactgaaatgtg

SEQ ID NO: 1128 - DNA, 1157 bp, Homo sapiens
ctcaagcctgagggaccatctctgcgttattctcagtcgcatggagggcctttgtcatcttcacctcttcagcaggtgcaactcctgagccagatataaatttccaggaaatcagtgtcctgtttgtgtcacttggtgtttcccagaagatgacgggaggtgtcaggggaaggatggaagtggcagcccggcctctgtgtccgtgggagggaagcacccagctagcgtggacacaggggagacacctctcggccccgcctcaactgcgattagacaggctgagccgccgtccccataaatctaacaaagctaccactctgttctccaaagcagttcacatggggtgacctagcaagctccgttctgcccagacttcctgctgaggcccctctgtcactcactggttggtttgttagctaggacattgtctttatcctgggcatttcccccccaccccccacagcactgcgattctggatttaaatttgaatcgaacggaaaatcaaagttttaagacccatgggcatttttaggcgagaaaatttatctcaaaggcagcctaattgccagtagctaggcaggatggtttgaggtcagggcgcagcgcagcaagtattgggttggctttgtctggtttccttttaaagagaccctgcgggcaaaggcttcaccaactggaaaagcctgtgaaatgcggcctccctcaggggaatgccagtgaccccagcccctgtccttctgaccttacccatcctggtacccagtcccccgtagccttctctccagacccaggaactcccaggaaagagcctgaaccttggtcacccagaagagtcatccccagtgggattgcctagtgcaacccttgcccagagagattggcccttttgtgctagcacagctgcaagctggggcaggggcttgcctgcccgctggactgcccacagcccagggatctcgggtgtgctttgtagaactgcacccattttagacattgtgtgtccgtgcccgcaatgctggacaccgtaacaagccacatactgaaaactggctgttcatttgagccgtggaaagatatttattgcccctctcaagtcgggcaggcagctctcctccaagcagcttcaggctcctcccagctcccagctcctccatcc

SEQ ID NO: 1129 - DNA, 1185 bp, Homo sapiens
aagttcccctgtcctaagagagctcacatgccaagtgccttagagtaaggctctgcacctgggtgttccctgaggattggttcccttcctcctacgggagattgtgcatgcaaagagggtgtgacactttgtgtctggtctcaaagaaggcaaagatagggcaggagctggtcagggaaaggccactacggatgtggactgaagggcatgtgggcttcaggtttagtagactgtagtcgggcagagagtatttggggtggtgtggttttcttccgcttcctaagaaagtgcaggagtctgaagcacctgtggagccccagtggctggtgcagataagcggacttgggtagagcggccagaccagctttcctgagtggcctttcttctcaggctgtccaggctcagggaggcgagagccagcaggaggcccagcgcctccaggcccagctgaatgaactgcaagcccagttgagccagaaggagcaggcagctgagcactataagctgcaggtaaggagcccagccccagcccatgccaccttcctcctgcccttcaacctctaccccacccacccaccctctctgcccacagatggagaaagccaaaacacattatgatgccaagaagcagcagaaccaagagctgcaggagcagctgcggagcctggagcagctgcagaaggaaaacaaagagctgcgagctgaagctgaacggctgggccatgagctacagcaggctgggctgaagaccaaggaggctgaacagacctgccgccaccttactgcccaggtgcgcagcctggaggcacaggtaagaatttggctggcagactcacctcactcctattccactggacccctgtgccctctcctcctaggccactgctgccttaggcttttcttcactctccccctggccctctccttctcaggttgcccatgcagaccagcagcttcgagacctgggcaaattccaggtggcaactgatgctttaaagagccgtgagccccaggctaagccccagctggacttgagtattgacagcctggatctgagctgcgaggaggggaccccactcagtatcaccaggtcaggaggcagccttcctccctatgtctgtttatggagtgcctgctgtttatcaggctgtatcctagtgagataaataagatgtgatctaaatt

SEQ ID NO: 1130 - DNA, 1177 bp, Homo sapiens
gagtgtctgggtgaactgaagctgagcccagccccttcctctctgctccccagcatgacggcctggtgtggccctcagagccctcacgcgtgtcccgggcagtgcctgaggtccggctgggtagtgtgtcactgatcccccttcgaggtagtgaaaatgaaatgcgccggagtgtggctgccttcaccgcggaccctctgtctgtgagtggctctccatgcctttgggcagggggctgggggcctggctgggtgcctgccttctactccacagtagatgattgccctgattgccctccccgattgccctccggccccctccctccagccttggtgggggccctcataggcctctttggttcacaccattcaaaggagccccttctgcctggccctggaagctgggagtcccctctgcctggccctgggagctgggagcctggctgattggagtgctccccggctggcagtggagagtggctgcagcagctgcagcagcttcagcggggcgccagcccctctgggccttcacaaaatacctgtgggtctcttgccttcctgcagcttctgcgcaacgtctgagcacaggagcccatccttggctctaggattccgccgctggaagccttctgttcagacaccccttatgctccaaggcctgatgtgagccagcggggggtgcatgggaaactgcaccccacaacccacatcctccatcctgactgcagcatggggttccccggcaggggtgggaggcagcaggggtcagcctgggcaggaacctctcccaactctgtccaggtgttcagacctcttggcccaacctgctcaccccaccgggttcactgtccttgtggggctggagagatgggcataagtcaggaacttgggaggaccaccaccctttcagaggcgtgaggccctggggccctgccggaagggagccccctgctcctcccaacaaactccagaacagcagaaagcgggtgctgtagaggagcactcagctcacggggagggagctcttggctgagcttctacagggctgagagctgcgctttggggacttcagccttccttccagtctgggctgagtggggggtccagactacctgatgccccttccccaatttggggactttttgataatataaatatatctgtatattttaccctat

SEQ ID NO: 1131 - DNA, 1216 bp, Homo sapiens
gattacctgaggtcgggagttcaagaccagcctggccaacatggtgaaaccctgtctctactaaaaatacaaaaattagctgagtgtgatggtgggtgcctgtaatcccagctactcgggaggctaaggcaggagaatcacttgaacctggaaggcagaggttgcagtgagccgatatcatgccactgcactccagcctgggccacacagtgagattccgtctcaaaaaaaaaaaaaaaaaaaaaagaatggagaatggagcctagggcccagggagggcaagtagggctgaggagtgaagttttgaaagggagccagtcaggatgctgggggctgagccgctggaggggggtgtggagaagacctgccccctagccaccccctgacccggcggggcggcgggcccacaggccatgaagaagatgtacaaggcgtgcctcaagtaccccgagtggaaacagaagcacctgcctcacttcaagccgtggctgcacccggagcagagcccgttgccgagcctggcgctgtcggagctgtcggtgcagcatgcggactcactggagaacatcgacgagagcgcggtggccgagagcagagaggagcggatgggcggcgcgggcggcgagggcagcgacgacgacacctcgctcacctgagcgccgcaccgcttcagggacggagacaggaccgggcgagccctggggcggcggccgctcctgcactttctcccctcccccacccggcacctggtggcaccgggccaggcccaggcgggtgctgcagcctggctggacagagccccaataaacgatcccacagcctcagccggctcatcactgtgcctgcttcccacctgcctcatggccgctgccgcggtcccctgcgtctgcccttaattttgttaaggttgttgatcatccggccgttgatccttccagcatctcctcatttcccattgtgtagcggggaggagacggggtttatcactgccccccttctgtccatactctgttccattctctgcccgtatctatccagctgtccttgttgagcggtcattttggcattcacgccaggctatttgctttctttttcactgctttaaggcagcggtccccaacctttttggcaccagggactggttttgtgcaagacaaattttccatggatcaggattggggaaggattggttttgggatgattcaagtgcatcaca

SEQ ID NO: 1132 - DNA, 1202 bp, Homo sapiens
ctgagccagagcccctggagaaggaagcttgtgagaagtggaagaggcccttcaggtgaggacccaggtgacagtctcagagctctgagctgagccccaccccagaggctgccagggtcttcctcttggaccttggagccagctcttgggttgggagggggcttgaggagaggccagaaagctcagatctcccagggctagtctgacctccattgtctggagccacttggggtcagttccatctcacccccccaacccctaccctcaaccctttccctccttcttgggatcagagctctgggggtggggagtcaggcttctgaatagctgtcaccaggagagaacctgtgggcaaagcccagagcccagtcatgccaggcatgtgtgcgcagccataggtgtgcaagcatgtgcatccgcagggacatgaggccacaggtgtgtacaagcttgactgagcccgtctgtatgtgtgaatatataagcatgtgtagatgtgtgctcacacttgtgggacctgattggggcttcagaccttgggtgcctgtccgcagggtctcctccatccttcttgatttgcctgtcattgaggctgcccgctctgggcgccattccccagcctaacacctcttctcagtctttccttgcaggtccctggtgtccaggccttggggcagtgaagaaaccgtggggaggggcatgagatgccagtccccaaagtccttgggagcccttgtgggccaagtcattgtaggacacaccctctcctgggcattgctgaggtcacccagtgagcctaggctcccccctcctcccatccccagcctgggggaaccttcagcgtctctcctccctgtaggccccggctcagcttcccaggaacttttgttggtgggtactagtagggtaaggcagttcttcccatcatgagggagaccttgggagactttcattaccaaatccattgctgccccgaccttcctgggactgatctgggtcaccctggtctcctgatcttggagaagtcaagttcttatcccagacttgagaggttacaagcctccaggtctctggcaaagtgtggagatgatggacagccatttgtacacacaccagccagtcccttagcatatctctcttggttttgtctcaggtctgcctcagccacctccctgacgctgtcccactgtgtggatgtggtg

SEQ ID NO: 1133 - DNA, 1394 bp, Homo sapiens
tgacttggccaaggtcatacagagtcaggacagtgccaggactggaattcaggtcttctgaccccagagaccagtgagatgctgggagagaggatcacccaccttcctaataactgctcatggctttcctggacttctgtctctcaaacttgggctagtaggcgtggcctagccagggcattacattgtgagttctaagtatgatgtgtgtgtgtgcacacatgtctggaacactggggatgggtgggttacatggtcttcctgttcctccccagacttcactcccaaccagacatcaccagaaagtcctgtcccctgccttctagagcctggacctggctttgggggtgtccccatggctttgaagagtgtatggagttagcagcacagcctaggggtagcagggaaaattgagagtcccaggtgaccttcatcatacttgagaggccccctcccctttgcagttgctctagaggcatttccccaaatccacctgcatgttatggtggggagcagacagggagtgaccttgagctggtccctactctctctgggcctcggtctccctgttcttcccagagaccccttttggctctgaccactgttgccacttggccaagaactggaactggggatcagggtgtccctcggtcctctctgcaatgactggagctgtgcttcttggggctgatgaaaatagctgtcgtggtctctaggggctgagccggagttatttccatcctcaacaaagaggtggaaatagcttagggcctgggagggggagcaagaggagaagggttaacttctccttatcccagccttaaaggaggcccccagcctcagcctgtgccctggccaagccaaacctttctgggaacttgggcctctggggatgacagtggggccaggctgggtttccacttgtgaccacagttgggactggtgtgatagctgctggagggagggccctatgtctagccaaggaggggagatattgagggccagtcagcacctgcccctactcatagggtcaggcccaatctcatttcacagaaggagagattgaggttctgagaattcagggacttaccctaggactcctagaaccttcaccttccagacgcggtacctgccttctgtcctgagtttgtcattctgtgtccacactttccctggcggctggaggttggccagcactggaagcaggcccaagacacaccttctggacgtcggcctgcctcatattccagctctggccttgccatccctgcccaggctctggttctagcttctgtgcttccacgtcggctctcccgcacactgccagagtgacctccataaaataacttgcttttcgcctacaaagtgtagttcaaactcctcacctggcaatg

SEQ ID NO: 1134 - DNA, 1206 bp, Homo sapiens
ttcatgccagccaagtgcagtggctcatgcctgtaatctcagcactttgggaggccaaggcaggaggatcactttgagaccagcttgggcaacatagcaagaccctgtctgcaaaaaataaaaataaaaaattagccgggcgtggtggtgctactcgggaggctgaggcgggaggattgcttgagtccatgattttcatgctgcagtgagctgtgatcgccccactgcactccagcctgggcaacaagtgagaccctgcctaaaaaaacccatgcagatgagtgtgcgcatgcaaacactcacatacccacacgcacctcctcccgccactgagtcagtcaccccctgaggcactagattcatggccaggccacagggaggcagatcccacgtccctgtgcccagacatgtgtcctgtgtgccatctcttcaccccctgaccccagcgtgaggggagggtggggctgggtgtctggccgtcctgaggaggccttgttcaggacaatgcttcgatggccagaagggaaaacaggagggcagtgggttgacctttgcatccccagcatggcggggagtgggctcccctgggcacattggctctcctgcagcccccactgactcgggccctgggcccctgtctctctgtgtttgtgtcactctgcttttgtcctgcctccatcgtctgtgatgctcagagtgggggcggcgggcccgacgtggcgtggaggtggcagcaggggccagcagcggtggtgagacacggcagcctgggaacggcacccgggcaggtggcccagaggagacagccgcccagtacgcggtcatcgccatcgtccctgtcttctgcctcatggggctgttgggcatcctggtgtgcaacctcctcaagcggaagggctaccactgcacggcgcacaaggaggtcgggcccggccctggaggtggaggcagtggtgaggcccagctggggtccaggtgggaaggacgggggcacgagcccagccccagctccacttgggggctgccagcggaatcctgcctggcctctggggtctgagagggagaggcttgggaggtgatagctgcagactgacaacatgggaggaaaggtaaggggacgaaggtgtggccgtgggggcagagcagaggtggcacagctggtcaagtggcttcagtggatcctaccctgggtgaagccttgcccag

SEQ ID NO: 1135 - DNA, 1214 bp, Homo sapiens
ttttgaattcttctacttctacctgaccccctctcctcactggcctggggtcaagaagtttgagtctgggagctggattgcctgcaaatagtgaaagcctgaaacataatggtttgccatgttttgaaaaaaaatgcatatttaatttcttcctcatgagataggacagttgctgttctttcttacctggcaatgaccctaaaatgtatatcctctttcctgaatatttagcagagacacacacacctgtccagagcgtttttggtatgcaaagtactttgacattggttgccaaagtcctccattttatagatgaaaaaactaaggctcaggaggcttgagacttgctaaaaggtcacacagcttggaagtgattcttcaaatcctctgctctttctgctgccacctgctgggtctcttggcaagcatggagggaggggctaactgtactttatagagctgggaagcccagtctctgagctgagcagatttgtatgaactgctttgggccaggacctgtaatgagccctggggagggacccagaggcacatctaactggcagcacaaggaggatgagaatttgcaactaaaggcctcacttggacaaaacactttggggtcacaatgcccaggaccgaagacatgttcaaggacagcacgaggcatctttctattgggagacccatgtccttggtaagcctgcacacctggcttcctaatccctgagagcctgcccactgtccagatccagtgagttggtacaaaacgtacagactgaagtccctgggcttgcttttcccatgggtgaggaccagaaccagactctgagcatccttacccctggccacccgaattgttccaagtttgaggtaccccgttcccagagatctgggggtccttctttggagggcttgctttgttctgatggccttcagaaaggaatcacatgaagtataaaaggacaggccccttggtcaccaagttttggctcctcatacagataggactcatccaggttcccagcgaggcactgactaagcgaggctcagagcttccatatcaaattcctcagctttgttctgtgcccagagggggtgggccccattctgggccctgtgaactttgtcttatatatcaccatctgtatcagaattcctcctcaattgcagttaagtgaaaatacgtggaagtctgcttttccatcctgtattct

SEQ ID NO: 1136 - DNA, 1191 bp, Homo sapiens
tcctgacctcgtgatccgcctgccttggcctcccaaggtgctgggactataggcatgagccattgcacctggcctgggctgagttttaatagagtgtcttctatcattgttgttgccccttgctccctgcccgttgtgttgtctctactctactttagcccactctcatgtagctttcctttactctttgcccatagctgggtcagtggagctgtgtacacagtagacacaatgagactcagaaagaacttgatttatgacggatccctggaatctcacttggaatgaatgcagatcacattggtaaatggagaagacgggaccttatgattgcttttctgactcagtctagagttcttttttctgcttcaaagtttcctctttattaacctttggtcagttttaatttgtagataatataaaatgaatgctataaaaccaaattgtatcaaatgcttgtgtatttgatttttacaactgaaatataagacttgacttaactatttgatggtagaaagattgagactttaagaaatgtgggtttttaattaccctattaagccattagtagtttctggcaggcaattttttttttccccaggctggagtgcaatggcaccatctcgactcactgcaagctccgcctcctgggttcatgccaatctcctgcctcagcctcccgagtagctgggactacaggtgtgtgcctccacgcctggctaattttttttgtatttttagtagagatggggtttcactgtgttagccgggatggtatcgatctcctgacctcgtgatccacccaccttggcctcccaaagtgctgggattacaggcatgagtcacggtgcccggcctctggcaggcaattttaattaggattccccaaaatattttgctgattagagtctttgtagcaagcaaaaataatcacttatgcatctatgcattattttagtcaacatggatatcagcctctatgttaggttggttttgatgatacacggagatgagtaaggtgtagttgctgtcttcaaggagctccagatgcaatagagacaaggtataaacaaataagttggctgggtgcggtggctcatgcctgtaatcccagcactttgggaggccgaggtgggcggatcacaaggtcaggagtttgagaccatcctggccaacgtggtgaaacctcgt

SEQ ID NO: 1137 - DNA, 1167 bp, Homo sapiens
tgacgccagtggaaacctaacctgccccgtcgccgccgtgcgggaggagccggtagagctgtccaaaccaggaaggcgatggcgatggcggtggcgcgcacgcatgcacgcacgcacgcacgccagcggccggcggggccgcaggctcgcgcccgggctcgccccgcgccgctccagaggctcgcgcactcagcaggttgggctgcggcggcggcggcagctgtggaagctcaggcgctgcgcgtgagaggtcccagatacgtctgcggttccggctccgccaccctcagcttctcttccccaggtctgggagccgagtgcggaaggagggaacggccctagctttgggaagccagaggacacccctggctcctgccgacaccgccctccttcccttcccagccgcgggcctcgctcggtgctaggctactctgccgggaggcggcggcggctgccagtctgtggagagtcctgctgccctccagccgggctcctccaccgggccttgcaggggccgagagagctcggtgcccgcccttccgctcgcctttttcgtcagctggctggagcagcatcggtccgggaggtctctaggctgaggcggcggccgctcctctagttccacaatgtccacgggcggagacttcgggaatccgctgaggaaattcaagctggtgttcctgggggagcaaagcggtgagtgcgtggctcccctactcctggcagctggccgcagcgtccccgcaccgcccccggtgcggcccttccgtccgcggaggctccctgcccgcctcgcgtccgcgctcgttgccaccgcagcccttcccgatgtgccccccggtgccactggctcttcgccagtggccgagtttttaccctgttccccgggttcttcaatcctcgactccccggctccgttccccgcagtccggccatctccggtcgatctgccctccctccccagacctcaccccgcccagcctcttgtccatccctttcttcctccggtctcggtcattgcccgtaccccggccccctttcttgagccccacccttattccttgctcttttcccagttcctcagctctgtgaggcccactcagggaagccccactcccgagagcgggccctcttcaaccttggccaaggagggtgggatctgggcgt

SEQ ID NO: 1138 - DNA, 1155 bp, Homo sapiens
ctcctggcctcaagtgatctgcccaccttggcctcccaatgtgctgggattacaggtgtgagcctctgcgccccatcctcttgtttgttttttgagacagggtcttgctcggttgcccaggctggagtgcagtggggtgattaatggctcattgcagcctcgacctccctgactcaagcaatcctcccacctcagcctcctgagtagctggggctgactacaggcatgcacactgtgcctggctaatttttgtattttgtagagacagggtttttgccatgttacccagtctggtcttgaactcctgggctcaagtgatccacccacctcggcctccaaaagaagtcctggattacaggcatgagacattgtgcccagcctctctgtctctttaaaatcatgaaaactcgtagctacttaagtaattctcctgccttctggaatgatgggtgaagatcttgactgccttgcctgctcctccttggcagatgacctcccttgccacttcacttctgcctttggggcaggcttctgcaccactgtcatcgcctcccctgtagacgtggtcaagacgagatacatgaactctgccctgggccagtacagtagcgctggccactgtgcccttaccatgctccagaaggaggggccccgagccttctacaaagggtgagcctctggtcctccccacccagttcaggcctcttggctatgcatgtctattgtgggtgggagagaaccacctggaagtgagtagcagccaagtgtgactatttctgatcctggtcctggcatttcaccagcattcacctatccccttaattccttcctcccagaattgctaccatcactgtttattaggtgttaaatggagactcaaagggaattcatgcttatagccaagcagctgtgagctcagttcattgagtcctcccagcctcctttgggacagagcaactgggttggattgaataccaggcccagtgagggaagtgggaggtggaggtgcccccatgacctgtgatttttctcctctaggttcatgccctcctttctccgcttgggttcctggaacgtggtgatgttcgtcacctatgagcagctgaaacgagccctcatggctgcctgcacttcccgagaggctcccttctgagc

SEQ ID NO: 1139 - DNA, 1181 bp, Homo sapiens
ccacgatgccgagccctgccttggatggggaccatcagcgatgaccacaatgacctctcccttaccaggcagctccaggcagtgttcctgcaccgcctttcccagggcttgggggctttttctagtgggctttgagctgctcaatctggcctctgcagggccggctcccagcccttccaacctcctcacagcccgacctgggacctagccaattcccggagagtctctgtcccatcgtgaccccctcacaactctcccactcaccaaagtctgatgactgtgctagggggtgcttatatagagtactgagtgttacaaaagcagaagtctggatgagaaccaatttgtgatattaagcaggtggggtgggggtggggagtgtacctaggttcattttccgccctgcttttcccctttccagtgtgtgcacttaaccagtccctgggccctgttccccatccccctccaaggcatggattgggtgggcttgtgtgtcttggggcaggtggccctttctaaactctctgcctttgctcacccacaggacacatagtatgaccattaggtgtttcgtctcccacccattttctatggaaaaccaaggggatcgggccatgatagccactggcagctttgaagaacgggacacctttagagaagcttgatcttggaggcctcaccgtgagaccttacaaagccgggtaagagtccagtccaaggaagaggtctcttgctgcctcctaaccctgtggtctaggggcaggagtcagcagggcattaacaaaaataattaccatccccacccccgacagtgaagtggctctttccagttcacagagcactctcacacctccccgctctcattctggcccttcagctgactcggacaagccaaggatcttggtccccattttataaaggagaaaactgaggcccacgtgtaacagtgattggccccaagtcatcccgggagccagcagaagagctaggacaggaacctattgttctaacttcatattgatgctagcttttgactatccctgaaaccgagattggtaatcagcccggctctgaaactggttatttgctggggactgtaaaataggattaactatttctagtcctgcattttaattgctgttagtagggccatcttacccaccctctgaaggacctgactt

SEQ ID NO: 1140 - DNA, 1247 bp, Homo sapiens
ggaaatgccatcagaggcaggaagacccctaaacagtcctgtcttccacacactgcattcaccctcttaaaggcatttttgtgcatgactgctgctgctcagcaccctttgagagctccctgtgggcagaggagtggggtcactggagtgtggctccccactgtcttcagaataaagctctgacccctcagcctcgtgttccaaattgggacctggctacatctccagtctcctttctcagtgcccccaaaactaccctccacccctgttcaatcccaaacacctgtgctttcctgcagctttgactttgcttaacctgtcccctccttggaaatatactttctcccctccctctcccccattttcaaatagctatatgttgttatttctctatgactgtgccccaccctgccccagtaggggtgctctttgtctcctgtgaactccttccgtactctctagtcctctgctaaagcactgactgccttctacactggttaagatcttgggtttttgatgtgaagacaatctggctgtgacatctgtcacctcaatgatcacagggttgatttggccggtctggctggctaggcgggtgtccccttcctccctcaccactccagtgcatccctcctgaagctgcatgcttggtcaaagaggatgaccttcctgatacaggaggaccatccctctgtcaagggtatatgaggagctatgctcccctactagaacctccaaacaagctctaaagatcttgggtcttggagatttataaatctagtttgtggccctgactccagtactgtgtgaccttgaaaaagttccttaacctctctgagcttccatttcctccttgtattttcaaggaaatttggggacataaggaagggaaagtatttggagcagtgtctgggcagtgcagagtaacagataagagtgcaggctccttcttgaaaggggaaatgggtgaaaaaaaaaaaaaggagtgcaggctctgaactacagtgcatgggtttgaaaccacactccgcgttcactcactggcagtatgatcttgggtagcattactaaactcttctttgcctcagtttcctcaactgtacaatttggataataatagtgtggcagacagaccctagtatggcacccataatgttcacaccctgtattatccccagtttttgagtgtgaacaagacctgtgatttgcttctgaccgctggaacacggcaaaggtgaagagatttt

SEQ ID NO: 1141 - DNA, 1192 bp, Homo sapiens
taccagccaaggggggcagtttcaggaagggacatggggagagaggatgaggaggtaggattgacaagaggctgctccttttggcagttagttaccacggtgggcctggtttcagtcacaaagctacccccatccttaggagagagctcaggccctcatatcaaatgaacactaaggcaggtttctgagtaactcacatattccccactcactttctcctcagttatcaaggcattacaggataagtacgtgtatcaaagtttaacatcgttcagaattgccagtaaagcccctcagttcccacctctttcagttcagtaagaggaaactgcaaggacttttcgagagtgcggctgatgaccgcataataaagaataactaataaatattaatgaagtatcccctctggccaatcaggtctgaggagaaccctctttgggctcacagaagcctcgcccctcatgaatatgtagatagcactgcccaccgcgcgtactgccccgccctccactcttctccctcgcaaccgactctcccttcaaacgggaaacaagatggcggctgcaggtccgagtactcgggcctcttccgcggcggcagcagccgctctgagtcggcggggccggcggggccgctgtgacgagacggcggcagctaagactggggccccaggcccggcttctggaccttcgctgttggtgttgtcgccgccgttgctgcagccgccgctgccgccgcggccggaggaatcgggctgcgccgggtgcctggagccccccggagaagcagcggccctgccgtgcggccactcgctttgccgaggctgcgcccaacgcgccgccgacgcggcgggcccgggttgccctcgctgccgcgcccgcggcccaggctgggcccgccgtcgggcccgcgacgacggccaggccgactcagaggtgctgggcgagtgcgcccgccgcagccaacccgagcgctgccgcccgcgccgggacgggggcgcggctgccgcggggcccaggccagagcaggagccgcgtgccgcgcctgcggagccaggtggagcttccccacttccccttagggtctggagcgaggccgagcgcgccccggcccggcctggtgagggggtggagagtcccgggccctactcgggcgggtgtggagagttctcgtgggattagaacccgggctc

SEQ ID NO: 1142 - DNA, 1278 bp, Homo sapiens
gtaactggcattagccccatttttagatgatgaaactgcagtgcagatgttctggttctctcaactaccaagtggcataacccatggattttctaaaggtttcccaaatagatcacaacctaagggtgtgccaggggagcctaggggaagctaggctgggcattgaacactgatagtgcagaatccacatgcaaacaagatcgacagggtggataaacatatatgtgcattatccccatcccccacagtttagagccttctgcttttctgggggtttcagcctatgagacaaactataatcaggcttcattattacttttcaaatggccaagggttatctgcaatgttgatctaaaatcctaaaaaatcaccctgaagtcaggcaaggaacaatacttaaactccatactatggaaacaaggtatctagctggatgcagctggtaaattcagtcccatggacctttgggggtttattttccttagcagctgacaccatgtgtcttttgcatccctggtggtgcttggtgcttctgcccatctgggctcattgagaatagggatgaagatatgattttagggaatttctgatgggctggcatgccccatgtagtatgagttactatataaagtcatgtgactggcattttaacagaccttccagagcttatatatcccaatatatgttgtttcctttgagtagccccagcaggatactgcttagtttttccagtgccattggtgaaagcatttctggaactgtcttcaaagactagaaacactgactcccaaaatgctagaactggaagggaccttaatggttatctattccagcctcctcctaaggtcctcctcagcttctagacctagaagccaaagtccagaacagtgacccattgatcaaggcagatagtataactccttttaagtgttctcagatttgccttttctcagggcaaatcttcagtgttttgtggttatttgtggttgagagagagagagaatgtaatgtctgagactagccagcagctatttgaagcctctgggaaagaaggtggcttatcaagtgggtttgtagtaatgagtgctgctgtaaagcagagccattttcttgtgcagctcatagttcccaaacagttcccaaacagaaattccagagatgtcttaaacattgtggtcatcattgagataggtggaatctctttggtgactacgttggtggggaacatcactcacctgaatgtatgcattctgtgttctctgtgtgtgtgcacatatg

SEQ ID NO: 1143 - DNA, 1239 bp, Homo sapiens
ctggggctctgaggattgggcaccctcccctcatctaagaatatatttcatacccctgcccccccttcacccacccccgcctctggctcaggcccttcccttcctcggctcaggcatggggctcagctcctagtctgtccctcccatcccagggacaagcacagcccatctagccttagtgtggagccaactctcagcctttcccaccagggcgctgacctcccgatactcagtgctggtccccagtctcagactctcagctcttcaccccgatctgactttcgtcctcctgcccaagcctttggctcttgaccccccccccatacccaatgctggcactcagcacccacccctgccattcactagtcaaggtccagtgaggaatccgtccctgggatgtcctcatccccttttcgtcccaggacgagctcttcagtcctgccggataggtgcaggtgccatgcacccctagtgcatactggcagatccttgtagggaaggagagagtcttgggtgtgtgaaagggatagtggggcatcgtggcctcagagaggggcaggaagtggggtctgaagggctggaagttgctgcccttcgatttctctatgctctctcccacccctgtggctcttcgcccttggggattccttgccaccaccgctaccaccaccacctcaccccgtgtatcttctgaaagagaagtaggtctttcctcctgcctcaggcacaagccctcctggttcagggtcagaagctcagcaccttgccttctccatgatcccaaagcacaattggtgagtgggggagaggaccccctctccctgactccccaccctctagatcaggcagaatggctggcctgtgctgcgtctgcacacaggaagtcaccttcctttaatatattggcttgaggcctgcctgccctccccatacccagaaaatctggatctcccttgagcagttttctataaagtctgcaataatctcagatactctactcttgttagtggtgccgtatcattcctgctgaccttggagtactgatgggggtgggaggggactcttgggagggcattttggacttctttttggtggggcagtgacccttgatgcgttctcccagactgtgggaggagaaatgggttctgattgcacatagcaggattaaggttagatacatggagggacttcccattgggatgacattgttccccaagccagcctgctttctatcatcgg

SEQ ID NO: 1144 - DNA, 1346 bp, Homo sapiens
agcaccccttgccccttggccagaggtgccctgctgcacggccatacgctgcagcctcgagggacacacaggccaaagtgtttccttcagcctcttcctggagaggaagccgcaggtcatgtttccaagcttctggtcaactccaggcaccacctcccagcccccaaacatggccgagccagtgcttctctgcagggcccctttcctttctggagtcagcctgcccaggtgataccttgaagtgaaactaggggtgggggagcctcactaggccccaggcaccatcccacagtactggcggtttctctgccaagtgtttggggcctgcactggccaagccatccgtcactgggactttgcagtgtgccctgtgggtggcgtgtggacaccggtccgggcaggaaggaaaagcatgccccggtgaaaacccaccgagcagagagccagcgggacctcctcagcattccacccaggggaagagttcagtccccatgaagataaggactgagttatttggctgcacctctcctcagcctcaaagctcagacctgctagagtgggttcacctggctgttggttctgtgggagagttcctgacaagctggttcctacatggtgcagtgaaaggaactctgtcctggaagtccccaatgccgcctctcagtcctgcctgtcaccaaccacctggggggcttgggcaagctactcaacctctggggctcaatttccctaactgtaaaatgggattgtaatcccttccctgcctgacgcaggaattgttatgaggcccagatgagatgaaagtcagcggtcagggctctgtaagttgaaaatggctggatgtgtgtggccctgccactgcagggatggcccaaggtcacacagaaagtttgctgcaggaggagccctccccaccagtcttcatcgcttgccctgcttctcacttaggcagatgtcaaccagaatgagatacagccaatttggctttgatgacccagctgagagggaaatttagatacaattcaggaatatcatgcccaaaaatagtggtcccagcaaccaggacacagagggaagacctggatattgtcagtgattggtggagggggacatcttggaccctcctaggcctggtgtcacatctcccatctctcagaccccacagaggccaaggggccttggctctgacccaggttaaagagagccaccagcccccaggctcagggagctgaaaccacccatccgcagaaatctaagggcaaggagaaatagaaattgtctgttccttcccttcaaagtgtaaggcctcttccaggagcaactggagccaccacagcttctcagtg

SEQ ID NO: 1145 - DNA, 1081 bp, Homo sapiens
agagtatttcaagggaccacaaagtgggtaattgtggagtgtaaatgtggttctcagttttggttatacatgagaatcacccagggagcatttttaaatagatattcctggactttgcacatttaattggcctagagtagggcctagatgtcagggtttcttttgttttttattttagccttctgaggtgattccagtatgcagccagggttggaaagtacatatttaggagcttgacatacttgatgaatattaccctaaggttcggaatgataggtgtggaagagaattggtattcttggggccggactctggtcaaattattctccattaaaggaacattgaaaaccaagtctttgttttgttttttaaacttggtggaggtccttggcaataacacagtggctctcttctgttcttttaaagggcctgctatggtgtgctgcggttcatcatggagagtggggccaaaggctgcgaggttgtggtgtctgggaaactccgaggacagagggctaaatccatgaagtttgtggatggcctgatgatccacagcggagaccctgttaactactacgttgacactgctgtgcgccacgtgttgctcagacagggtgagcagctgagagtgcttggcaaagggcatttgtggacagatttggttttccacagacatcttaagtatttgggggagtttatcatggaagtagctgggcatgttcatattccttggtgtatcgattgccacgttgatctgtaagaatcgatttgctgagatctgtcagatccaagagttggtttgtccttgttttagccatctgtgtacccttcagtgatgacacgatgacgagtcagaaaggtcacgtcctgctcttggtccttgtcagtgccatgttctgtggtgctgtgcacgagttcctttggcagaagtgtcctatttattgatcgatttagaggcatttgtctgagaagggtccagacccaggggtgcttgagtaaactgcttgctctctttggtcttgtgtgatgggggcctttgagaccccagctgtgtgctaacaactgtggtgtcctctaggtg

SEQ ID NO: 1146 - DNA, 1081 bp, Homo sapiens; identical to SEQ ID NO: 1145

SEQ ID NO: 1147 - DNA, 1162 bp, Homo sapiens
gttcctgcttttactcgtgtatatgaaatagttttcccttatcctcccttatttgctcaaaatttttggctcagtgcaacctctgcctcccatgttcaagcaattctcctgtctcagcctcccgagtagctgggattataggcacctgccaccaagcccagctaatttttgtgtttttagtagagacggggtttcaccttgttggccaggctggtctcagactcctgacctcaggtgagccactgtgcttggctgctcaagattttctaggcacttttgctattctgtcctttagcagcccctgtaaaacactaacaagcctcctgtggtcaacacttggggtttttttgtttataggtgttgtctctccaggtgccttgtattttttttttttatatgaaaaaggacaaacccttatgtatgcattttattaatgttgctgcaaaccctaagtgggagtgtgtatccatttggtaaatcaggaacttaataactctggtaaagtttcttacttttgtgctttatttggtttcagggtctccttggcagctgtattctggagtctggatgttgctctctaaagacctttaataaaattttgtacaaagacacaaggtctgactagactgttcagtattcagactgaggggcatgttggcctctggagcattacatatcttcttggttttaaccatacttgtggtatttgcaagggccagaacagtaagacccaagcagagccaaccagagaaataatatttgtgtgatagagaaggctgatagcaagcaaggcagcaccttgattcgttgtcctgtagttcaggattgtaggtttagaagagggatatgtttgagtttttcctatgcataaggcgatccacgttgcacatagaaagtgaatataaatggccattatattttgtgtcatgctgtgctctaagtgttctttacatatgtactcgttaatcaacctctctaaagtgtaaaggaaatttgcttgcaccactgaaggcacataaggctcagaagtaaatttgcctaagcagtataaagctatcattagaatccacattcctaagttgtgttctcttaggggatcatggaaccagtcattggtactacaggctattatgttctggagaactgtgaagaacatttaaat

SEQ ID NO: 1148 - DNA, 1123 bp, Homo sapiens
aggcgtccctcgcctcgctcccactaatccttctgtgtagccctcgtccgcggcctgcgcaccctcccctccggccctggactgacacatcgcttttggggtcgatgcactgtgtccaacattcggcctgaattgattaagcacttgctgtatgccgagcctgaggcagccactgtccgggcgctggaggggggaagcatggatcagggattccaaggcgggggcgggtcccgccggtggttgagggttcgcggggacaggagttgaggggcagggaggaaagggtttctgggtagcatgggggcgccgtacgttcttaggagcaaagtcgggagacattagcaggcctgaatccctgcgtgtccagggagaacgcgtggatttctatgcacagaagccacgcccccacccaactctttcccgcaagcgctggcccacacgcttgccgctgtcatcgcctctagtaaattcgaggagaccttgctcagcagatggctcgttggtctaggggtatgattctcggtttgggtccgagaggtcccgggttcaaatcccggacgagcccctcttttcttaatttttttaactgtttagcacgcgtaacttggcgttctacagtcgtaatgaacacgaaatgggacctggcacattcgaagaggtcggatcgtcgattgaaaacgagcaagcggtttttgcaccctggctgctatctaaagaattcttccagctcgataagttctgtatttagagaacggagatgcaggaaaaggaaggagatgcggaaaaaggaagggaaagaaaatgagggctcgtccgggatttgaacccgggacctctcgcaccctaagcgagaatcatacccctagaccaacgagccgtcgctcgtaagagttttcgtttcgctttgtaagtagaataggaggcaccctagagcctgcgccttcccgtcccggccgcacaggacccaccaatggcgtgtgcgcttagggctcgcctcggattaccaatccggtatccgcacagtgggaccccgagactggctctgtcgccggcgagccctggatctggacgcagcgagaacgcaatcagtccgcgctgcagaggggaaatgtgcctttctgca

SEQ ID NO: 1149 - DNA, 1241 bp, Homo sapiens
tatacaatcaaattactgtatttaaaagtcacgtgaaattcttttctctgtagtcaagcattataggttaatttatttctgtttttttttttgtttttgttttttgttttttttggattgtcattttgaaaatttttgctaaattttatttataattatataacatatttatgtagttccaaaatcaaatccacaaaatcaggtatgttctgagaagtctgtttatctatgactccaacagtctgttctgtcctccctgataggtaatctttttaatttttatttctcctttcattttttagcatataagcaaatatgtatttattatattttacttttttcttagataaatgtaatatgttatacaaactgttgtgcactttaatgtttggaaggagtaatttttaatttggtggttataagtctggtgctggtaatacagaaagaggtaatagctgaaatgtggtttgtgtgtatagaaggaaatagtttatcttagatgactgcttcttcatagttgattcatcttcctttttcctccagattttgtacttaacagactagaagctgtaattagcttttattgttatctctcaaatccattctcaaatgggctattatttcttagattgattccactttttattctgcctgtttcttagattaattgttgctactgttttttttcttttactttggtgagaaaaatttgctctcatcttgttctttttatgttattttatggatttcatgaattatttacccaatgttgtgacactcttctgctgaccttttattttccctccttgacccatcttcaacctaacaagttacttccaattacgttgtttccacaaatactcctgctgtctgcactttatatactttctttaggctggccctgaatgcagtttctgttttccattcccatttcacaaaataccttccctgtgaaatccccccttatcagttcaacatggttcccatttagtatctaaaagcatttaaaagttatttaaaacctaacaatattagtaggtcagatagtttaggagaacaatagagaacaaagcgctaccagtaatcccaccactataccacaatagcactttctattttctatattattacctttttacccatgtgaataatttttttttttttttttttttgagactgagtctcgctctgttgcccacgctggagtgcagtggtgcgatcttggctcactgcaatctctg

SEQ ID NO: 1150 - DNA, 1127 bp, Homo sapiens
ggttccgttttctaaagctaataagtcagccttcttaatgattgataaatttagaaatataactgaactttgcaaattaaacatcaaatggaatttttaaaaaatgagaatccaccaaaaagggataattttacatagttgatctactgaaaatttcataccatgacatcaccacagtcttaaaacttgtactgttacgtagcaacttccatttctgcaagttgcaaaattaataatataaatatagagacgttctttgccgagagtcgtcggggtttcctgcttcaacagtgcttggacggaacccggtgctcgtcccccaccccagccggccgcccatagccagccctccctcacctcttcacggcaccctcagaccgccccaaggcccctgccgccgccccagcgccacgcagccactgccaccgccgccacctctccttagtcgccgccatgaggaccacgtccacctcacaggtgcgccagaactaccaccaggactcagaggccgccatcaaccgccagatcaacctagagctctgtgcctcctacgtttacctgtccatgtcttactgctttgaccgtgatgatgtggctttgaagaactttgccaaatactttcttcaccaatctcatgaggagagggagcatgctgagaaactgatgaagctgcagaaccaacgaggtggccgaatcttccttcaggatatcaaaaaaccagactgtgatgactgggagagcgggctgaatgtgatggagtgtgcattacatttggaaaaaaatgtgaatcagtcactactggaactgcacaaattggccactgacaaaaatgacccccatttgtgtgacttcattgagacacattacctgaatgagcaggtgaaagccatcaaagaattggatgaccatgtgaccaacttgcacaagatgggagcactcgaatctggcttggcagaatatctctttgacaagcacaccctgggagacagtgataatgaaagctaagcctcggctaatttccccgtagccgtggggtgacttccctggtcaccaaggcagtgcatgcatgttggggtttcctttaccttttctataagttgtaccaaaacatccacctaagttctttg

SEQ ID NO: 1151 - DNA, 1412 bp, Homo sapiens
tgtgttcagcaggtgcagtggctcatgcctataatcccagcattttgcggggctgaggcgggaggattgcttgaagacaggagtttaagacgagactgggcaaaaaagtaagaccccccaatctccacacaaaaaaaattaaaattagccaggtgtagtggtgtgtatctctagttccagctactcaggaggctgaggcaggaggatcccttggacacagaagtttgaggtcacagtgagctgaccatgccactgcactccagcccaggcaacagacagagaccttgtctcaaaaaaaagaaaaaaaaaattcccagcattctcagcaaaactgtccttggtgaaaggccttcactcctctgtgaaatggttgctggaagccttctttcatttgtctactccaaaagtggagcttagaaacctgtggcccaagtaggtcagaggaaggaaatggccagtatgaatgatcatcaggtagaatacagtaacctagattaggcttacaagagttaataatcgcgaaggcccgcggcgggtgttgatgccatgtgatttctgcccagtgctctgaatgtcaaagtgaagaaattcaatgaagcacgggtaaacggcgggagtaactatgactctcttaaggtagccaaatgccttgtcatctaattagtgacgcacatgaatggatgaacgagattcccactgtccctacctactatccagcgaaaccacagccaagggaatgggcttggcggaatcagcagggaaagaagaccctgttgagcttgactctagtctggcagggtgaagagacacgagaggtgtagaataggtgggaggcgcccggcgagggggcggggcagggtccgcaggccttgctaagaaactcactcaaaaccgctcaactacatggaaactgaacaacctgctcctgaatgactactgggtacataacgaaatgaaggcagacataaagatattctttgaaaccaacgagaacaaagacacaacataccagaatctctgggacacattcaaagcagtgtgtagagggaaatttatagcactaaatgcccacaagagaaagcaggaaagatccaaaattgacaccctaacatcacaattaaaagaactagaaaagcaagagcaaacacattcaaaagctagcagaaggcaagaaataactaaaatcagagcagaactgaaggaaatagagacacaaaaaacccttcaaaaaattaatgaatccaccaccaaaaatcctcaataaaatactggcaaaccaaatccagcagcacatcagaaagcttatccaccatgatcaagtgggcttcatccctgggatgcaaggctggttcaacatacgaaaatcaataaatgtaatccatcatataaacagaaccaaagacaaaaaccac

SEQ ID NO: 1152 - DNA, 1396 bp, Homo sapiens
cttttttttttcttttttttttttgtttgtttgttcatttattgagacaggatctcactctcgcccaggccagaatgcagtggcatgaacatggctcactgtggcctccacctcctggactcaaacgatcctcctgcctcagcctcccaagtagctggacctataggcacaggccatcacacctagctattttaaaggattttttgtagagataaattttcaccatgtttcccaggctggtcttgaactcctaagtttaagcagtcctcccaggaagtgctaggattacagacctgagccactgtgcccagcctcaatgtaacatttttaatgaaactgttattatcacctattagagaaatatgtagcagcaaatatgtgtcagtctgtggacaagacagaggcacacaaaactttattttccgtaagagctcactgaatatttaaatacttaaaattaatcatgtgaattctatttgcattctcttaatcttgaattgcagagcttttactcaagtgtttacctttggtccgaccttccgagctgaaaattctcagagccggaggcacctggcagagttttatatgatagaagcagagatttcttttgttgacagccttcaagatcttatgcaggtaggtacacaagttttaaaataccaggtatctgtgacattaaaatgtttctgtatatatttttacctcggacgtttatgtgttacaggtattcataaagtgaaaagaaggggtaactacttaataaacacttattgaatgcctttactgtaatagtttaaaatacaagagtcagacagatttaagtttatatcccagctctgccattagctttgctatgaagttccctgactttcatgatctttaggttcctcaactctaaaatgagaataattgtgcttactcctaaggttatgtgaggggtaaatgaaattgtatatataatataatgcatatagcatggggtctggaacacaagcaggttcactaaatagtagctctgatttgctaggaaaatataccaaacatctttataattatataaatgtctgtaatacttacataaacccctatgtagctatattagaaagcatccacaggagctatcagctcagttgagcaggggacaaggctggagagatggtcatggtcaggcaacagatcatgaaagaccttgtatttcagtgccatagtaaggagtttgaactttacccaaaatttaaggagcaagagttctaaattggaaaatgaaggtcagagctatattttaggcacatctttttagcagcaatatgaacaatgatttagaggtagataaaagtagagaggccttgttaggaggctgtagacataatccagacagtgcacacaagtggaattg

SEQ ID NO: 1153 - DNA, 1225 bp, Homo sapiens
gctctgtcacccaggctggagtgcactggcgcgatcttggctcactgcaacctccgcctcgtgggttcaagcgattctcctgcctcagcctccccagtaactgggactacaaacgagcgccaacactcccggctaatttttgtattttcggtagagacagggtttcaccatgttggccaggctggtctcaaactcccgacctcaagtgatccgtccttctcggcctcccaaagtgctgagatttctgtgcccaacctggaaattactgttgatttagaatcaccaaagaggagatgccttctgggcagcgcagtgagatgaaaccagaaagaagggcgcaccccacatcctgagaaaggcaccaagatatgtgccctgttatttattgttgggccagagggcagggctctgggaggaaatacctggaattgccaatattgggaggattgattatatgaattaggctcatcaacatgaaggaatgttaggcatccattcgaaatgttgtgcattattacgaaaacaaaagatagaataccaaagtgtgtatcctattgtgattggaacatataaaattaagtatgcatattggtgaactaaaagaagttgatttgttgaggcaggattgtgagtacatgttttactttcatttagtctgtgtgtgtatgtgtaatgaaaacgtaaaatgttttacgctcacattggaaatatttctcttccttagggatggattcgttctgtccgatcccagaaggaagtcttgttcctgcatgtaaatgatgggtcatctttggaaagccttcaggttgttgcagattcaggccttgacagtaggtgagttttgttttttaaaagaattctttgatttttgtttttcacctctagtgcttctcacttccctactccagtgtttacgttggacccctgagtaatcttttgaaacagatctgctttaatagctttgaggatcaactccgaatatttggaatcaagatccttcaagctcaggcctttcctcctctatttgacattgtcacatgctgatatcccctacttatgcttcacttcagtctttcttaattacctgcggctcccttaagctgttctgctctttcctaatagcatttgtacatgttgctgcctctgcccaatacagcctcttctcctcttgtctttcatagttcctgcttagttaggcatcatctgatgttcccatcccatgatt

SEQ ID NO: 1154 - DNA, 1197 bp, Homo sapiens
gcacattatatttttcatgtataatatatcttaaaaatagttctatccatctaaatataaataggtgtatatatgtgtataataccttggaaattggtgtattacttttcatacttgcatatgttttaaaagacatttgactttttcatcgattcataataattgtacatatttatggagaacatgtgatattttgaaacatgcatgcaatatgtgatgatcaaatcagggtatttaggataattcatcacgtcatttatcatttatttgtgttgagaacatttcagatcttctagctattttgaaatataaactcaatgggctgagtgcagtggctcacacctataatcccagcactttgggaggctgaggagggtggatcacttgaggccaagagttcaagaccagcctggccaacatggcaaaaccccatctctactaaaaataaaaaaattagctaggcgtggtggtgggtgcctgtagtcccagctactcaggaggctgaggcaggagaattgctcgagggaggcagagaatgcagtgagctgagatcatgcctctgcactccagtctgggcaactgagtgagactctgtctcaaaaaacagaaaagaaaagaaatctacacgaaattatggtttactgtagccaccctactgtgctatgaagcactggaatttattacttctatctaaccgtatgtttgtatccattaaccagcctctcttcaccccaacctccaatgcttcccagactctagtaactattgttctactttctgcctccatgagatcatttttttggctcctacatatgaatgagaacatgagacatttgtttttctgggcctggtttattttacttaacataatgatctccagttccatccacattgctgctaaatgacaggatttcattcttttttatgactgaatagtattccattgtgtatatataccacattttctttacctgttcatctgtggatggagagataagttgatttcatgttttggctattgtgaatagtgctgcaatacacatgggggtgcaggcattcctttgatatgctgatttctttttctttggagaaatacccagtagtgggattgctggatcatatggtaattctatttttagttttgttgttgagaaacctccatactgttgtcaaagcaaactaaatatggtctgagaa

SEQ ID NO: 1155 - DNA, 1388 bp, Homo sapiens
catatatgtgtaggcatatgaatattttgcaccttcatggtacccatttcgtgatgtaactctcaggattatacatgagtcatgtttagcttcaaatactgtataatgactaatggatctcaacatgctggcctgacacctggccatagttgttatatagctagttcccatcacgatcatctagggtgcctttttaaaatgtagattctaagtcacacccctcacctacagaaatagaatctcctcaggtggattcaggaatctgtatttttagaattgattcagacagagttaaacaactagtgattgcaaacttctgaattaagcaaaaacagtagaaaacaggtggttggggcctcttggccagctgggttagacattctagatacacttaaagagtgtcactactcagagtatgtcccctgagtggtggcggcagcagcacctgggagcttgttagaaatgctgaatctcgctccgccagaccgccgccgcgccgccatcatggacaccagccgtgtgcagcctatcaagctggccagggtcaccaaggtcctgggcaggaccggttctcagggacagtgcacgcaggtgcgcgtggaattcatggacgacacgagccgatccatcatccgcaatgtaaaaggccccgtgcgcgagggcgacgtgctcacccttttggagtcagagcgagaagcccggaggttgcgctgagcttggctgctcgctgggtcttggatgtcgggttcgaccacttggccgatgggaatggtctgtcacaatctgctccttttttttgtccgccacacgtaactgagatgctcctttaaataaagcgtttgtgtttcaaaaaaaaaaaaaaaaaaaaaaaaaaaaaaaaaaagaaatgccgactctcaagccccaccccagacctactggatctggacctgcattttaacaaggactccagctgctttgtaggcacgttgaagattgaaaagcactagaacatgcttaacaacaaatcacaaggggatccaaccctggggtcaggtgggttgcaaattgctcattggccatttgttagacagttgacacatacgtacaactcagttggtactagaccaggcgcttatatacattatcttacttaatcatcctaaaaaccctacatggtaggccctgttatcctcattttttaggtgagaaatccaaggctcacagagttatagtaactcaccaaaggccattcagcttttaataagcagagctgggatttgaacctgaaattgtctctccaaagcacacgctcattccactgcagcatattgcttaaaatgaagagcaaatcaaaggcgcagccaaatttaggaaaactcatatgggcaattagctgaaaaatggag

SEQ ID NO: 1156 - DNA, 1208 bp, Homo sapiens
ggagtattcaacctaaaagaaaaggatgctaattaataagtaacgcaaaaacaactaaaagcataaaactcaatggtaaaagaaagcagacaatcaaatccagaatactctaactgcaatggtgatatgtaaatcacttataactttagtatgaaggttaaaagacaatctattaagaataataggccaggcgtggtggctcacacctataatcccagaactttgggatgccaaggcaggtagatcacttgaggtcaggagttcaagaccagcctggccaacatggtgaaaccctgtctctactaaaaatacaaaaattagccaggcatggtggagggcacctgtaatcccagctactcaggaggctgaggcaggagaatcacttgaacccaggatgcagaggttgcagtgagccaaaaaaaaaaaaaaaagaataataatagctacaatactttattaaggtatatacaatataaaaagatgcaaattggcccgggtcttccaggagtcgggttgcttgggaatgcagcccaaagcgggtggtaaactccatttaaggctaaataccggcacgagaccgatagtcaacaagtaccgtaagggaaagttgaaaagaactttgaagagagagtacaagagggcgtgaaaccgttaagaggtaaatgggtcaggtccgcgcagtccgcccggaggattcaacccggtggcggatctttcccgccccccgttcctcccgacccctccacccgccctccctctcccaccgcccctcctcctcctccctaggcattaccattcaggacataggcatgggcaaagacttcatgtctaaaacaccaaaagcaatggcaacaaaagccaaaattgacaaatgggatctaattaaactaaagagcttctgcacagcaaaagaaactaccatcagagtgaacaggcaacctacaaaatgggagaaaatattcgcaacctactcatctgacaaagggctaatatccagaatctacaatgaactcaaacaaatttacaagaaaaaaacaaacaaccccatcaaaaagtgggcgaaggacatcaacagacacttctcaaaagaagacatttatgcagccaaaaaacacatgaaaaaatgctcaccatcactggccatcagagaaatgcaaatcaaaaccacaatgagataccacctcacgccagttagaatggctatcatt

SEQ ID NO: 1157 - DNA, 1178 bp, Homo sapiens
aaatgttttattttgttatttggttatgaaaatggaatccttgttcttgcacaactgtaaatgttttgttgctagataatacgatttgagacctgaattggtctttggtttccagtgcatcacagcatattttgtaaaatcatctactactgcacttgagcatgaatgggtagtagccaaactcacaaattggagtgatgaacctgcttatacctaagggcaggagcaagcccctcacaatgcagctgcatgggtttttagtgcctactgaattatatatatatatacatatatatatatatatataaaccaaaagtagttggaaagattatttgaaatgactaatttgtgctatctttatgaaatatgttaaatgtagcttttttgaaacagaagccttgaattgaaatttaactaatacttgaacattttgtatatatttctttgtatataattttgtgcagtaccaatgacaaaaatatggtgtcataataaaaccaggtttgttgatcttttagttatgggctcaaagaatttattcatctctaacatgatattggaaaataatggatgaaaataggaaaaatgattgttaatgctgactgtgggtcttaaaaggttctggaaagcagtaagttcatttttctaaaaactataacattctgttggagtattttcttccttacgtcaatacttttcctgcattatttgaaattgtgggctggggagaaacagtagtcaaagctttctgaattgagatactttgaaattccaagtgtagatttttagaatgtcattttataaatggcagtttttggaattacttgataagaacttttgaaaatggaaggattagtatggcctatttttaaagctgctttgttaggttccttatgttttattaactgtcttttctcagtttccatttcatttttttttttctagttttggtgacttagtgattttgtcattttttacatcaacttcatggtcttgtttttacatggtaattgcatgtacttaggatctatctaataggggctttaaataaatttggtcatatttatgtgtaagcacattttactgtaaatgtttgggtttctgaatttaaacagatctgtttatttcagtatgtagtaaacaatatcttaaagtgtccgattcactacttgttaatt

SEQ ID NO: 1158 - DNA, 1115 bp, Homo sapiens
gcgccttggcgcggggggtcgactagccaagtgaggcgggaggcgactcggacctttccctgcatttcgtttcggccagtgccgggggctacccgccctggggcctgggatccttggggcccgtgaggcccactcttagcggccggggcctaccgcggcccgccgctggccctcatgaggcatagcctgaccaagctgctggcagcctcgggcagcaactccccaacccgcagtgagagcccggagccggctgcaacttgttcgctgccctctgacctgacccgggctgcagcgggggaggaggagacggcggcggccggatctcccggccgcaagcagcagtttggcgacgaaggagagttggaagccgggagggggagccgcggcggcgtggccgtgcgcgcgccctcccccgaggagatggaggaggaggcgatcgccagcctcccgggggaagagacggaggatatggactttctgtctgggctggaactggcggatctcctggaccccaggcaaccggactggcacctggaccccgggcttagctcgccggggcctctctcctcgtctggcggaggctcggatagcggcggcctgtggagaggggacgatgacgatgaggccgcggctgctgaaatgcagcgcttctctgacctgctgcaaaggctgttaaacggtatcggaggctgcagcagcagcagtgacagtggcagcgccgaaaagaggcggagaaagtccccaggaggaggcggcggtggcggcagcggtaacgacaacaaccaggcggcgacaaagagtccccggaaggcggcggcggccgctgcccgccttaatcgactgaagaagaaggagtacgtgatggggctggagagtcgagtccggggtctggcagccgagaaccaggagctgcgggccgagaatcgggagctgggcaaacgcgtacaggcactgcaggaggagagtcgctacctacgggcagtcttagccaacgagactggactggctcgcttgctgagccggctgagcggcgtgggactgcggctgaccacctcgctcttcagagactcgcccgccggtgaccacgactacgctctgccggtgggaaagcagaa

SEQ ID NO: 1159 - DNA, 1220 bp, Homo sapiens
gaagccagggggaagcaggttactgtttttgcatttctatcttcaaggaagaattaggttatgaatagttccgtgaatagtcaggaagcgctgtcctccaagttcaagattaaggaaacgtggcatgcacagctaaagcaagaggtgacgtcttgtatcttcccccgtttcctgggacattggtggtgtagcccattccacagactttcgctccctagcagcgggtcggagatcgaaggaacgggccaattgcggctgaaacgtctttggaaggaggaagggggtgagggagcatccctttgagtttcgcctcttctcgaggcggtggtgggaagggagacatacttaatactgccctcttaatccaacggaccttacatcgtgtagactgccgggagggcggcgggaaaagggcaagacgggagttggggaagggaaggagccaggaagccgcgcgggagggcgcgcgcgcgcgcccctttttcagcagtgtggcggggtcgcacgcacgcccgcctcggcggctgggcgcgatttgcgacagtggggggggcggtggaggtggcggcggcagcggcaactttgcggcaagctcgggccgggcttgcttgacggcggtgtggcggaggccccgccccaggcggcaggaacctggagggaggcggaggaatatgtccgagagggaagtgtcgactgcgccggcgggaacagacatgcctgcggccaagaagcagaagctgagcagtgacgagaacagcaatccagacctctctggagacgagaatgtaagtgcagcttctggcagttacgagactgcggagtgaaagttttaaattcttttaaaacggggggcgcggggacgagcgggctgctgtggggggagggagaggtgtcactcaggaaaacgcgggcgtgcgggagaaaattgaaattgcctacggggattttgatgtggggccgagagcaagcaggaactaggcaaaggagagtggttctagtgattgcgtgggtctgagaagtctgccctgaaatcagtttgcatgtgatggggagtgttttggcctttggggggatttaaggggagagtgcgggtctgagattctagtagtttaaaaggcacgttagagacttttctaagaaagttggaaggacggggcagagttagggaccctgttaaaggagcgtaagggttgtcactctaagacccttgtggaattttc

SEQ ID NO: 1160 - DNA, 1159 bp, Homo sapiens
ctggctctgggaaatatctcatatagttctcttaatggctctatgagataggtaatattatcctcatttgataaataaaggaaactgagaagccagagggtttgcatagccagcaggtttggatccagggaatgcctgaatgaatgtggccggctgttactgaaaggagtgttacccattagttgttactgtagccgccttaatgagagttagtgagagacttaactaaggcaggggcagtaggttggagaggaatttgaaagataaattgcatctgtaataatttaagggaataatttaatatgtggggtaagggaaacaaagttgaggatgacgcctgtcaaacataagtggataggtggttgttgatgctattaacctaggaaaatagaggagagagaacaagttcatggggctaggggagacagataatgagtttgattttgaatatgtttattttgaggtagtgtggtacatttaaatagagtatggatggagaagggaaacttctattcataataactgaagtgaccaactaggaatttcatacaaaaattccaaatttgaatttcaggaagatacttggaaaattctactcatggactcctggctttggtgccgctctgccagcatcttatgtggccattctcattgaaagaaaaagcaggtaaaatttcatatatttatttaacggaactgattacctgtcccctaccccaactataatttttttttttttaattatcacttacagggatgagaaatatttctagatatattttttcggttctgcagatatttaattgaaaattaattttatattaatgtttatatgtattttatatttattgtctataaaaatataaaagtggacattatagagcagtaatagcctctgtttactaaaagattagagagttctataatgtgacctaactaaaatatggctatgcaaattctaggccaggcagctcattcctgtaatcccagcaccttgggaggctgaggcgggtggctcacttgagccttggaatttgagaccagcctggccagcattggaaaaccctgtctctacgaaaaaaaatacaaagaatattagctggatgtgatgatgtactcttgtagtccctgctactcaggaagctgaggtgggaggatc

SEQ ID NO: 1161 - DNA, 1180 bp, Homo sapiens
ctccttctagtaatcattttcacatagtagaatacttcactcagctgaaaatgagtggccaagaaaaaaatacaagaaaaggaataagaagtgattattttctttagggctgcactttgaatgtgatgagtaataaggttaccttcattgtggaggtgatgtttacaattgcctccagccctttactattggtgctgaagccaccattggtgccagctctataatttcttcttcttgtggaattaacaaagaaaggagtgtcaaggactgagatgaccctcagattggggggctgtcttagattctagggctttgtagtactatgtttctgtttaaagtagtggcctcaggtgactttgtaatagccctgtagttgcaaaaagggtaactacaaagaaatgaaactgactctagtgtgtgtgacttctggaaacagaagtggggcagtaagttggccatgatatagctagtgtcataggactacagcagagtagtgagtgaatggccttaagcttacagctgtggtgaataagaatgtgtgctattttacacacagaagaaaatgattgacttttggttggaggaaagaatttatatctggtcttttggaaattattctgttgctgttttatgtgggctctctctctctccctctctctctctctctgtctgtctctcttgctgctccctctccctgccaccttgtccattctctgcttgctggtgttactttatgttaactagtctccttggacttcattgcaaccttttaagccagccgttcaagtgagaggctctggagtgatcataacggtgataacaatggagtaaacatttccagagacactgattttttttttatatgctctgtttttcttaggcaggatgatgtagaagataattgcacagatatggaaggagatgtttctctgtatgtgaagcctttaaatccagaacaattaatttcttctcttcttaaaaccccgtaacatcacttgactctggaatttcctattttcttttactttctccattttttttccatctgtccctcctacgaatatgttttacatgaaataatgtattgggttttatcttttgtcccagcagacctgaaaatcccagtatattaccacagacacacataccatctggtcaccaacagggacatcagggccaa

SEQ ID NO: 1162 - DNA, 1207 bp, Homo sapiens
ttcagaaagaataggctgtaaaatgtttctttatcagacttaaagtcggttgatgttaatgccagagaggtataatgaggcatgtctgacccccacttcccatcatggcctgaaccagtctttcaggttaaattttaagggtgccctggctgacgaggaagtccattcagatggttaggggaccttagaattttacttttggcttacatttggtttacatgtatgtgtctttctaggttggaattgtggcttattcacttttgtatcaatactgctatgcatatttatgttcgtatgtatatgtacaggtatatgtctccagaagtatggtagtttgagatacttaaatgcttgttaaaaaacacaaaaacacgtttgttgcttcaacaaggctctctcttttgattctttacacataaactctaaggtagacagaacaagggtaacacattcctttgaaaagataaccaacaacaaaagtgacagcgaaatagaagaagtgatttgtttaatgtcttcaggccacaaagagacacaggcagaaccagaactcaaatctctgcattgggccattctccgtgaccacttcttattacagtggcttgtcctctggttatttccattgtccttccagacaactgtggtcatgggaaactgaatctgggcatggccatagaacctgaaaggtatataatttctcactagcaaagagtctagtccatctgggagacatttgcatcacactagcaccagggaactttttaccaaagtgaagcatgggttttctccattatgagccagtaggtgtcacaatttacccaagatgagcacaaccaggtctgtatggcagcctctgacatgtccaaggtattctacctgaagggctgatgtggactgtcctctcatccttcattgattatctggtcaactggcagatggttgaccccctccacccatcctgagaggtatggcaggtggggacaaattatttcaaagctttggtcaattcaatttctttctttttttttttttcgtagctcccgtatttatttatttatttatttattgctttttttttttccttttttttaaattatactttaaattttagggtacatgtgcggacaaaaaaccaaacaccgcatgttctcactcataggtgggaattgaaccatgagaacacatggacacaggaaggggaattcaa

SEQ ID NO: 1163 - DNA, 1174 bp, Homo sapiens
agtaacaaatttcaccaggaataaataaataacccatatatccttgtatctactttacttagtttatttttatcttaaaggtatgttgaattttgtcaattgttatttctgcatttaatgaaataatcttatggcttttcttattcagtccagtaatagtatagaaatttactggttgattgatttcaaatagtaaacaaaacttgaattttttttttttttcttttttgagttggagtctcactctgtcattctggcttgagtgcagtattgccatctgggctcactgcaacctctgcttcctggttctcctgccttagcctcctgagtagctgggattacagggatgcaccaccatgcctggctaatttttgtatttttagtagagatagggtttcaccatgttggccaggctgatctccaactcgtgacctcaggtgatccactggcctcagcctcccaaagtgctgggattacaggtgtgagccactacgccaggccccaaaccttgaattctatagtaatcccttatttgttcatgatatattttcctttcttaaaatacatttctgatttgacttgctcatttttttaaattattaatattaatctttttttaagagtatcttgttttgctgctagaacaatgctggcctcaaaaaataaatgagatgtgttatctgatatactaatttcagagtttcaggataaatatgaagaaaaactctagctcttcacggtcaaatgattaagaaaacaaaggtaaagggaaaatcttgaagtcaatcaaagagaaaagaaacaatttctaccaggaagcagatatgaaatagcagacttggcttctgaaacgaggccagacagaagacaataaagttgcttatttgacatatggaaagcaaacacagaaacagcaactcaccacctacaatgatgccctgtgaaaacatcttgcaaataagaaagcaatgtgcttctcagacgacaaaaactgagataaattattgccagccaatttgcatgaaaagagatgttacagcaagatctggcaaactgagcatgatatcagatgaacttctgaaggaaaacacacagacacactcatgtacatgcatagacacactcatgcacatgcatagacacacaaaggcatttggacacagtaataatgtgg

SEQ ID NO: 1164 - DNA, 1197 bp, Homo sapiens
gcatatccatgattatttccttttttccatagctacctacacaatttcataaactcatgacccagtgtaatcctgagtccttgaaatgtttctaaaagtgattcaccctttcagtgaaataggaatagataggacttccatttccaggatttttcttagccagaagtgtcccctggaggcttgggcagaattacagatatcttgagattaaaggaaaaaaaggagccacattggctgcttccatctgcttcagagcaaaacttgctattcctgtgtgttaggtaatcccaagtggtttttacattctggtatctcaaaggtatgattaaaggattagtgtggaaggaaaacagcagacattagtgcagcagagttgaaaaaagccaatactttggtactatcgtgggatttcatcagcagcaaaatgaggacaggagaattagaccataagtgattttgttaaaacactaggggaatccaatcaaggtgctttagctattaagatccctgattacaggggttatatctgttccaatttgctttgtgaggtgcccacataggcaatagagacaaggaccatgtttttaagaagtactaagacgctgttactttggaaaaactactgaatactcagtgcatatctaatgagcagttttagttttaaatttctagaaagaatgcttggcaatagttgaattaacatttgccaggtatctaactgagaatataagttaggagccataggtattagtgaaacatggagaatagatggttttcattcaggaatgtgtcatagttgtgacaaacaccaacaactaagaagttagtagcaaaataagaactcataaaaatgtgtgtaattaatattaaaaaatactactctagccttatttatatgtcaggctctgatataagcactttccatgcaaaatcgcatttaatcctcataaccaccttatgaaaatgttatagatgagaaaaaaaagacttagaaagattaataacttgctcaaacatccaaactagtagatgtcagagccgggatttgaaatcagctttgattaattcaagtgaagttcaaatttcatctaatttcagagccattctcataagagctctttatgattgcctactgagaagaagaaattatgagagctaagacagaaactaaattttgttgagtgtctatcctgtgcc

SEQ ID NO: 1165 - DNA, 1228 bp, Homo sapiens
ccttattagccagattgtgtcctctatcactgcttccctgagatttgatggagccctgaatgttgacctgacagaattccagaccaacctggtaccctactcccacatccacttccctctggcgacatatgcccctgtcatttctgctgagaaagcctaccatgaacagctttctgtagcagagatcaccaatgcttcctttgagccagccaaccagatggtgaaatgtgaccctcgccatggtaaatacatggcttgctgcctattgtgccatggtgatgtggttcccaaagatgccaatgctgccattgccaccatcaagaccaagcgtagcatccagtttgtagattggtgccccactggcttcaaggttggcatcaactaccagtctcccactgtggtgcctggtggagacctggccatggtacagagtgcatgctgagcaacaccacagccattgctgaggcctgggctcgcctggaccacaagtttgacctgatgtatgccaagcgtgcctttgttcactggtacgtgggtgaggggatggaggaaggcgagttttcagaggcccgtgaagacatggctgcccttgagaaggattatgaggaggttggtgtggattctgttgaaggagagggtgaggaagaaagagaggaatactaatccattccttttggccctgcagcatgtcgtgctcccagaatttcagcttcagcttagctgacagacattaaagctttctggttagattttcatttggtgatcatgtcttttccatgtgtacctgtaatgtttttccatcatgtctcaaagtacagtcattaacataaaaaaaaaagtttatgttatattttagatcatttgttggcatttcaacaatgttcacagcatcttcactaagagtcgattttgtctcaagaaaccacttttttttcccatccagaggaagaagcttctcatccattcaagtttcattatgagattgcagcaattcagtcacatcttcaggctccacttctaattgtagttcacttgctatttccacatctgcagttacttcctctaataatgtcttgaatactcaaagtcatcaacttcttcaaactcctgttatggttgacattttgaccttctctcataaatcactaatgctcttaatgacatcttagaatggttaattatttcccaaagtttttcaacttgttttgtcaagatccatcagaagatt

SEQ ID NO: 1166 - DNA, 1242 bp, Homo sapiens
tccacaatgtctttgagcttctggttgtgtaatgctggggtttaaagtcaccatttgtgggtttggcatcaattaatatttagccagctggctaagagataggaaaagaatatgatatttctttccttatgtaataatgaaaagcaataattacaagtaggtaataatacacaaaggccataattagtctcttctagtgtttagaatgcacttgagaatcgtagagtcatttggagcgtgtttggaccaattagtatgtactgtagtacccttctggcaaacaaataactgaattgctactatttaacaatcttatgagcccacactactgcattttgggagtggcaaatgtgtttggaaatggaagcagttctttttaagcactgtatcagagagattgtcttgtacgtttgcctgttgcaaacaggctggtttgtaaaagatgtatgttttggtgtttgaaatgtttataaaattgtatataaatggtttcaattttccaggcttttgtagatactatatttgatgcctatcaggatgctttaatttggggggtcgaatataattgtaagtcatccacgctgttggtctgcaaacttttgaggtaactacacacacacacacacacacaaggattttagatttgaaaatgatgttttttactcatttcaaaatgtactgtaacctttctttggttcttactgttttcatttaactttctctgttttcaagaaaaattgtctttattgacatttgtaaaaaagaatgtgttttgcccagttattaagtattttatttttatgcaatttcagaatcacaatgaggtatgccatttcttcatatacatgcacattcacctcaacttgcacacacatcacacaccaaaccttatgcaaaggggaaagctaacacttagagtggattttgtcccttaaggaaatggattgttcctgcatatattgctggtggcagtattcagtcttgtgttctttttctaaaaaaaaagaaaagaaaagaaaaaaaaaacaaaagcaaacaaaaaaaaagacagccaaaaaaaagaaacaacaacaacaaaaaaaaacacaacagtgtacaggtttgtaactgccaaaatttgatggttaaaacaagttttcaagtaaaaagaaaaaaatgaaactagcaattgtgttgactctttttaagtgtttccttttctttgtctttagttcattgctcgcatggtatttagaggtgtat

SEQ ID NO: 1167 - DNA, 1169 bp, Homo sapiens
aattagaacaagatcattttcaggtagcgagacaaaatcactttccacaaagacaggtggaaacaacagaaacattacgcgcttcagatattttaaccaatcaagctttagaatcacaagaacatctaaggcaattctctcagactgaaacacaacagagagactataaattggtccccaaagattctgagacactttcaagggctttgtcacatgacaggcagctaatatcacaggatgctagaaaaatatctgaaacatttggggcaacaacttttcaaagtttagaatcccaacaattgttctcagagaatagtgaaaatatatcttaccatttaactgaaccttcttcatttgtaccactggtacctcagcattcttttagttctctgcctgttaaagttgagtcaggaaaaattcaagaacccttttcagccatgagcaaaagtacagtttccacaagccattctataatcagccaaatgcatgataggcctttgctgccgtcagagaatatcacagcccagcaaggtaatatgaaggccctccaagaacagttagacctacagaagaaagttcttcaggcaactcaggaagctcaggaacagttgcttttgtgcaaacagaaagaagtggaacagcaaacgggcctctcggtattccttcccttggtaactccagattcatctgctttattgccttctgccaaagcagatttggggagaatccaggaatcttcaccaaccaagaataatattgcagtttcctcagaccatcatgtgatctcacaacttcaggataagcgtttgagtctttcacagcctatcctatcacagcaaaataattttaaatttctccaagagcagttgaatattcagaaggatagccttcaggctaggcgagaagcccaggaagtattgtatgtacataaacagagtgaattggatagaagagtatgttccgaacaggctgagccctctttcccatttcaggtagctcagcatacatttacttcactaccatctgctgatacaaaatctggaaaaatacaggagcaacattcatctaagagcgagaaaggacttgtttcatgccaatctgacatccccatatctcaggatgggtctttgagtttcctacagcagttcctacctctacatgatagtttg

SEQ ID NO: 1168 - DNA, 1238 bp, Homo sapiens
cttttacatagacaaagagatttgggggacagtaagtctgggctggtgagctcttcatcctcaccagtggttgttcagcattcagttgcttcacaagcttctgctaaagctgagcctaggagaattcaggagctttatttatctgagaaggagaatgtaggtccctcctgtcatttgataatcccaacatttcaggataagtctcttagttttccacagcatagcctggcacagcaagaaaatttgacaatactccaagaacagtcacaaatacaaagggtaatacttggtgctaaagaaggaactcaggaatttgtacacacagaaagtgaattggagaaaagaatttcttctgaacagactggcacctcctcatccctttcccaggtggatgaatctgagagattccaggaatgtatatcaatcaagagtgacagtaccattcccttaagccatcctaagatcccaagatgtcaggaaagacttttgagagtttcacaacatatgctacctctacaagataatttggaggaacaccaagcatggctagacactgagaaagaagcctttcatttcagccagaaaacccaagaaaatacatcttctgaacaaactggttcatcttcattcataccccagttggtacagctttcatttacttcgttagcttcagctgagtctggcacaatcctggaacctctttttacagagagtgaaagtaaaattttttcaagccaccttcagatcccacaattgcaggataggcttttgaggatatcgcaacttatccagcctcaacaagataatttgaaggcacttcaagaacagttagctacacagagagaagccatcattctagctagacaagaagctcgggaagaattacttttacatcagagtgaatgggagggaagaatatctcccgagcaggttgacacctcttccttacccctagtaccacagcattcattcgcctcattacctcttaatgaatctgaaagaaaccaagaaccatgttcaattaacagtgataatatagtatcctcaggtcactcagagataccaacattgcctgatgggctgttgggtttatcacatcttgttttacctcaacaagataatttgattgcacttgaagaacacttgcatgcacagacagatttccttccttctattgagaaaacccagaaagaattggttttgtcaaaaccatgtaaatttgaggaaaaggtatcttc

SEQ ID NO: 1169 - DNA, 1354 bp, Homo sapiens
tatattgtgctgactagtgaatgtttttaacaaatacggtgaattttttctttgatctaagacaagacaactttaagaagcaaaatgagaaagtagattgtaggaaagcagggaatggtgtcctgtggtgctaagaatttgatttgtcttatcccaactatatttttctcccatcttgaactccaaaatccatttttcagttaagctgaaggaatctgttgttgaaaatcatgcagtgttaagttatgctgtggaggaagaacatgcatatttgggtccaactgtgaagccagatgataaggttagtaatgtcttaatgttcactcgatttttagagctgtttggcttcgtattctcttttgtttagtttacagaagctatgttataacattaaagtcagtgctttctgagatctgcttttagtgaagtggatcaatgatgaaactagccaaatctgagcatcagaagtctttccagtctacctgatgcatgatctctacagttctgagaagcaaaactataaaacaatgtaaaacaataagggcatatgtctggtgtgtgtgtgtgtgtgtgtgtgtgtgtgtgtgtgtacgcacatgtgtttataaagataacagctgtaggaatgaatgagattgagggtgggggggtgcgtatgtatgtctatgaaagcctaatcatttctgggcaatgatgaaaaggttttactactgatctttgtaactatgatggtttctacacttgacctgagctcagaagtgacaactgctggggttggtgatttggggttttcttacatactacttgctacattgtggtatgatattccccttaatttctaggctaaaacactgtcttatgaaccattatcttcagcaactgtttccactgggagccttttaagttatgaaaacacagatttgagccttacagatccaggtaataaggtcaaaatgtttataaataagttgaaagaccggcaccagttgagttgcaatacagtgatggaaggaagcattgggttttcatgatacaccatggggaactatttctctaaatctcacaagtaaagtatggccaggcgtggtgcctcacgcctgtaatcccagcaccttgaggtgggaggatcgcttgagcccaaaagtttgagaccatcctgggcaacgtggtagaaccctatctctacaaaaaaatacaaaagttagccaggtgtggtggtaagtgcctgtagtcccagctactcaggaggctgaggtgaggggatcgcttgagcctgggaggtcaaggctgcaatgagccacaatcacgccactgcactccagcctgagcaacatagtgaaaccctgtctcaaaa

SEQ ID NO: 1170 - DNA, 1354 bp, Homo sapiens; identical to SEQ ID NO: 1169

SEQ ID NO: 1171 - DNA, 4146 bp, Homo sapiens
gagccaagaattaaaatttgctgaaatcttcgaattgggaaaacaacatcctctgttgcaatactgaagttcataacaacagttagactttaaacttaaatcttaagtttaaatctttttcctttggttcatgtaaaggagctacttgatgttactttttatttatcattcctctggctcctaagcacaacgtgattgtgaaattattgtttttgtgattaacgtagtaggaagtttctgcagttggcaatattgtaagagcatattgcagtttctgctcataatttctttcctatggagtgttagactttgttatttatgtgtataaatactagctggacacagtggtgcctgtggtccccagctactctggaggctaaggcaggagaaacacttgagcccagcggtttgaggctacagtgagatgtgatcctgccacatctcactgtagcctcgaacccctgggctcaagtgattcagcaagaatcacacgatttttaaaagacatggcagatcctgtgtctttaaaaaaaaatcaaaaccttgtaaatagtggttgaggtctatcccgatggggcttttcctgtagcctgcacatcgttggaaacgcctcatagagtaactctgtggttttactttactcacaggactattgttagatctgtgggaaggaattacaagacagttgctaaaagtttgaaaaagacggttgctaaacgttatgaaaaaccagataatctacttttttaccttaggtattggcatactccacacatctgtaccattcttgagtgatcgcttaggtaagttttaattggtgacagtataatcttttgggaaataatgattacagttcagatgatgaatttaactgttcaactgctgaatgataacgggcatgaactaaaacttaattctgacagagctggatatggctgtataataaactggatcttaaatttatacttgggttttagttttaataactggaaatgtatcctttctaaatctttaattggtactttctataggaatgaatgtgatttgaactcattcatgttgagaggtaagtaaaatatttaacttataataatcaaggactcaaaagatgaaaaatagaaattacaccatcccagtatttcaggtataacacagaattagtaagatactggcaaaaatattacaatgtatatatttgtatagagaaggaaaatgaagagactgcatgtctatacctaccaaacgaaactacctgtgttctttgcatcattattcaactggcagttacacatatttcatcctaaagtcacgtaaacctgtgtggatatgttgaatcaatagggatatgaattacataaaaagaattttgtgtaactggcagtttgagcaacaatgagcttgacgtttgttgtctgatctgttaagttacatgtatatattccatctttaagttttatagagagactgggcaaagattaggcaaagactagagttgtagcttaaaatgtagttaatgtagcttccttattacagtgacaattaggaaaaaagctcaaattattgtacttgttaaaggaatttgagaggtttgtgaaagcatttctcagcaatattgcaaatttgggaatacgagttgtacagttcagtcataattgcactgcatggtatctgcactcagcagtttacacctgctagggtgttcaaaggtcagtgctatagaaattcagtatctggcatcgttggttttcttggctttgtgcttgttaaacctggtatttctactgatacagtatttgtgtaggtttctcagagtgttcagtttgatatactctaaaatagtaagcaatgcttttttttccagggtgtcaaattgagaaccaggtagatccccaccacctacagtaaaaaggtaagattctctgtttctattgattctgcttgtttccctctatcagtagcactgccagcataacaagaacttcgtacaaatacactactaagctttaaagacttttacaatgcctcattctagagaatgggcactgttgatcatggtgtccaaaaatagttaatgtggctaaattgagacaggttatgcttccatcacagtatgcatattgcagtggtgacaatgagacctgtaacattttgctatgtttatgagtaaaaatgtaggagaaaaatgttgacttttcaatattagaaataacatttaataaggaattttcagctcttataggaccactttttttatgtgctgtatattgactgaaacattgtaatgtggtatacattactgtgtcttggatcaggtgtcaaaatgtaactgtactttgtacaattcaacttctaggaccctaaagtaaattggttgaagaaattagatcccaaagattcttggtaagttaattcattacttaaaaggccatgcaggttattttgttgaatactagcttttctccaaatgttattttaggttatttatttatctagcaatgctattgcaacatctatcaccacttaggagtaaaaaaaaggactaggcttacgttattatgtgtttaaacttcattattaacgatgttatgatgatgggcgaaatgttcaactgctctgaaggggctgaatgaaaatggcctttctgaacatccatttacattaaatattgcattgtatttcagaagattataaaagctcaaaggtaaaagttaccagaaacatgatcatagagcaaattcggatatgaatgggcatgggatcattgatttttaaaaatacctattagtttaaatagctattttaagcatagaattttcaataccttacttggggtgccgggtttcaggatactttggaacctaagcaacctcattcttgaaagatagatttatgtacttaatagtaaatataaatttgaaatacacatttttccacaggtgaattttgaagtcttcatcagtatatccatattaaaacgagatgacagaagccaaagtaattatggcaagtaatggtttttatcttaactataagttatttgctcaagggtgtaatggtcattaccaaggcttttagaatgcagtttctcatttgctgtggacatgaccataaaaaaatttcccagtaggttttctatctgctactttgctagcaatcagcttattgggaacagttgattaactgtaatagaaatgcaatacaaataaaatgtgaaccacatgtgatttttctttaaaatcagtgagatttgaaaattctcctagatctcttgaatcatgcaaatttgctttgcctttatattgtaacccttgtgggttgctaataaccaagcagtttgtagtagagttaactcaggctcgttctagggactcattcatgttcactcactgtacactcatctctggaaatgtaaaatttacttttatactattgttatgtagggctgacaggacaactggatcagtttcattaaaaaggtatgtatgcattagaaaagacatttgtatgggtcatttcaaagagggcttatgaggctgtgaaacccagagctcttaacgctgtgaccaaagatggaagttctctataggaagccatagcactcctaatgtttggtgctatgttttcctgaggagatataaaacgtaataatccaggattgttgccatgtgagagttttaaaggttaatcaaaatttctcttcttcagggcaaacttgaagataaatcttttgactccagctctttagaggatctaaagtgaccttgatggacagtggaagaaatcacaacatggaattcctcgaataacaatttattgactttaaataattttgtctaatgctacatatacacaattaaaaaacctttacactatttctagaaagtcagcatgtatttttggctcgaagtttctctagtgttttctgtggaaggaataaaaatttgagtttcagttgtgtacttcatgcttgaaaaattaagtccttctccctcagttatactcaccttatggaattcttttgcccttgctctgttttgggcataagcttcttgttttgttttttcttccttttgttgtttcacttcagctagttgattgtataacctgtaaagaatttatatagaattagagacaaacactgcaaaa

SEQ ID NO: 1172 - DNA, 4146 bp, Homo sapiens; identical to SEQ ID NO: 1171

SEQ ID NO: 1173 - DNA, 4146 bp, Homo sapiens; identical to SEQ ID NO: 1171

SEQ ID NO: 1174 - DNA, 4146 bp, Homo sapiens; identical to SEQ ID NO: 1171

SEQ ID NO: 1175 - DNA, 4146 bp, Homo sapiens; identical to SEQ ID NO: 1171

SEQ ID NO: 1176 - DNA, 4146 bp, Homo sapiens; identical to SEQ ID NO: 1171

SEQ ID NO: 1177 - DNA, 4146 bp, Homo sapiens; identical to SEQ ID NO: 1171

SEQ ID NO: 1178 - DNA, 4146 bp, Homo sapiens; identical to SEQ ID NO: 1171

SEQ ID NO: 1179 - DNA, 1130 bp, Homo sapiens
tgtcagatgcttagtattgtaataacctcatttccctttccaaatttagagtatctttaatactattttttttagacagagtctcgatctgtcacccaggctgtagtgcaatggccgcagtcttggcttactgcaacctccatctcccgggttcaagcgattctgcctcagcctccttagtagctgggattacaggcgttagccagcacacccagctagtttttgtttttttagtagagacaggctttcaccatggtctcgaactcctgacctcaggcgatccgcctgccttggcctcccaaaatgctgggattataggtgtgagccatggcacctggcctaatactacttttaactaccattttcactttttattagttcaagaaaaggcatacacatttattcaacatgtatacctggggagaaccagtcattaccccgatgttcattattttgatcaccacgatagagctgactactctgctatgtagtgcattttgggactgcacttatgtatgtttttgtttaacgtggacaaagacttacagataggtgcaaaaaataaatcctcttttgcaacccagaactcattgttcagtatgagttttgatacatataagaagggatattatgatacctgagacagttgattgatgggagtattgatagccataaaggttggttccaggccaggtgcaatgggtcaagcctgcaatccccacaccaaggtgggagtattgcttgaaaccaggagttcaagaccagcctaggcaagaaagtaagaaacacatctccacaaaaatttaaaaattagctgggtactggggcatgtgcctgtagttggagttactcagaaaggggggaggctgaggcagagttggaggctgcactgagctttgatggcaccactgtactccagcctgagtaacaaagacagaccctgtctcttaagaaaaaaaggttgattccaggcctgtagaatagataaacagcatgggatatgagggaaatcctcagcagtattaattttgcattccaatttcatgttgatgatatacacaatggctttttgttttaaaggcttttatcttgagaacatggtgtctggagttaaaggtatgtctcaattt

SEQ ID NO: 1180 - DNA, 1381 bp, Homo sapiens
ttgtagagacggagtttcaccacgttgcccaggttggtcttgagctcctgggctcaagcgatccgcccgcctcgacctcccaaagtgctgtgttacacaggcctgagccacccagaccaacctgtttttcttttttcttttagctcacaagaaggaatctttttctttttttttttttttttttttggtatgttgtatactctctaccatggggatgaagacacaagaattatgatagttcattgaaaaaggttgagaattcagaacttgtcagtttccaccaataatggcaaagatacaatatgacaaagttcagttgcttaaatgaatctaggaatgaagaatctaggaattataatggagaggtgattaggagtttaaaatggtttattgattggagatccttttcctggtttatatagggcacactttgctttaggaattccccctttgatcttggaaaacggcttttaattgtacattaatactgtattggtaattgtacgttaaaatatgtggctaatgataaaactacattttttacttatattgaaagatgcttttgttggaagggacggtacttttttggaatcttgttgcgttgaatacatttagagggtaacaactgaaagaacctgtgaatagaatttctggatttctttttaaagaaactgatctgaaatggataagaagcttaaccttggtaaatgatttcgcctgaaatcattggcatagtctgaccacgttcaacactgtagtagatactgtcaatatttagggaagctttgtcatatttactaaatttcataatttcagaaaactgtttaaaacaaagagcaattgatggataaatcaggaatagattctcttgaccatgtgacatctgatgctgtggaacttgcaaatcgaaggtgagtggattcaatcatgtttattgtatctgaattatgagaaactattgtatataatgagtgacagtaaagataattttcaggaattgggaaagaaggaaaactagatttcactgaccttccaagtttatctagttacatagattgatataatagcattgcaaatactttaaattcaaaatgtgaatatattatgggacacattcgtcgagaaaaaatgtattctttgggtcatattagcatctcttccagactacatcctccggttcggtaggctgtgtttgttttactcagacactcttagcagtgaaccgaaccatacagccttttggagctcatacattgtcttgaaagatacagtttttttgtaagctgagcatagtggtgcatgccattagtcctagctagctacttgggaggctgaggcaggagcatccctggagtttccaggagtttgaggttgcagtgag

SEQ ID NO: 1181 - DNA, 1181 bp, Homo sapiens
catagagaagttttaccagtctaaggatgaaacagagagaggaaaaggatagcagttggagtatgtaggatgctcagtgttctggtgataccagtgatgaccttgataatcttttgtcaccacctagggcatccatcagaaaaacccctacatgcaagaaccatcccagaaagcaaaagtcattcaacattttggtctcaggatctcttcacactcaaaaagtatcgatgactccaaggggctcttctttatgtggttttaatctatttaataatttttaatattgacctattaaaaattaaaactgatacttttaaagatattattaattcatttaaaaataagtaaatccatacatgtcattatagatagcacatgtttaagaaaataaccatgatttccaaacaaaacaattagtgaaaaggttagcattttgtatttttataaatctctttaatgtctggcttaaatatatgatatgtggattcttatatctgcttctacattcaatttgttgtgtgtggaacaatagtaaataaatatttggctaggcatggtggttcacgcctgtaatcccagcactttggagactgaagtgggcagatcacttgtggtcaggagttcgagaccaggctggccaacatggtgaaaccccaattctactaaaaatacaaaaatcatccaggtacggtggcacacacctgtaatctcacctactcaggaggctgaggcaggagaatcacttgaacctgggaggaaaaggttgcaatgagccaagattgtgccactgcattccagccggggcaacagaacaagattcagtctcagtaaaacaaaaaaaatagtaaataaatatttggtctttgtccccccagttcctggcacacagctcctaaaactcttggaatctctgaagtgataagtgccttttacatgttaatgagaagacttgtagctgggggaccctggagagttttaggatggggactcatcaccagaaagatcaaggataattagagggttggaactttcagtaccacactccaacccctggaaaggggacaggggctggagattgagttaatcaccaatggccaatgatttattgaatcatatctatgtgaggaaatcttcataaaaacccctaaatgaaggggtttggagagcttcaggggtggtga

SEQ ID NO: 1182 - DNA, 1197 bp, Homo sapiens
agtaagagaatgttcaaaaggggattaaagctaccaaaagtcttctctgaacccatcccccatttcccataccaaataaattagtttctccagctaggtaatcccatagcatcccagtacatcatcaacataacactgaccagactttttaatacttgctggctaattgttgggcttccttgatggactgtgagttccatgagtgcagggtccatatttgtcttgttccctactgcattcccaggggctaggataggtttagcccatggtaagtgctcaatatttgtcaaatgacagatggtaggagggagtgggcacccccagttgctttgccttcatcttctgcacccttggcctggcttccagcataagatttgggaagagcatccaagggagccaaaatcaagttatggaagacctagacccagctttgcctccaagtcacccaataagacctatggtctgacttctatatgatctggtcatttacggtctgactggggcagagggtaaggaagagatgactggaacacagcttctcatgagcaagttataaatgtgtggtatattgattacctaagcccatcaggcagagcctaggatagctggagctcacaggtttgtcacctccagccagaagtggcttcaagtatttatcccaggaggccaggtaaatattctcatgcataacataatatagagagaaataagttgggaagcactgtattggatgaatacagatatggtccccggcctacagcactactagtcctcgcttaggaggaactgggcatttggaggctgaaaaggactctctaacagcaaagctaacctgagaaaattgagctgcccagaaaaaaaacattagaggagagggcccatgggatctgtctgtggtgctgaatcagctcccagcaagttgagcccatctcctctcttacttggccctgacttctgctattttgatcttttctatttttactggtcttggaacaatgatgttgatgtcatctcattaggccactacaagcaatcacagcaaattcatttgtgacccagcccaaatatccactgtgccaataacattcatcacatctgaggttctctctaccctcagccagtcaggaatctgccccttcccagctgtcctcctctggactgtatgtcctgcagattaacagtttaaaatttggttac

SEQ ID NO: 1183 - DNA, 1220 bp, Homo sapiens
cttgggagtacaatggcccgacatttcttcataggtagaaacaaatacttgactcagtgatactcatgaccattagaatagtcatacctggaatgtgtcaaattataagagacagacacttggttagtggctgcctcatatagcacttttgaagaggcctaagtcaaaacttgcaatataacattctattgactttcttaaaaatattttttctgtacctaacttgagcataagggttatttgagcaagtaacattaactcagtggaaggcattgtcctgtgaaatattcttaggcagatctgcccacatctttattgaacttgaaatctaatatttctagtatttgaacaaagcagaaggttaagtcagggaagagcagtgctgtccatgatgtaatggaagctaccaggggaggcagtgtctggatgatgctgtgctacctacccctgcacaagccatgctggctcagtctgagctgtgggccacatcagctagtggctcttctcatgcatcagttaggtgggtctgggtgagagttatagtgagggaatggtcactaaagtatcctgacaagttcctaggaaaaaaggaataaagtttttttccttaaaaaaaaaaaaattgctcttggctgtgaaaagaggtactaaatgcgattcagttcaccgctaaggaaagtgatgacatagcagttacagagggtgataaatctctccagctaattcaggtcattttgtgaatactatgtatcaagccctgaaaatatggtaaataaaacgtgacagggaaacctttttttgattgaatattgttacatagttaaatgtgctatatatccttaatattttatattgatcctgcaaaatctgttggttttaggggagttttgttttttgtttctaacaattttcagacctgttggtataggaatgtagaagtctttcagatgatttgaaagcagctgcatttgctcttggaggctttgggagagcaggaatgaaaacattcagaggaagacatctgtagggaattcttctgttacttaccaaagaataagtgtctttctggtgttttatttcctatcataaaaatacaacagtgcatttacaaggttaaagattcctcgaagttctaggaaattcttgaaaatataagtggtgcttagaaaattcaagcatttaggaatgtgacctttaattcaggtatgtaaaagactttt

SEQ ID NO: 1184 - DNA, 1178 bp, Homo sapiens
tatattttttctctggtaacatatttggtaattttccttgctcatctataattattttgtaaggaataaaaactatttctgcatccagtgatttgtatcttacagaatgtgcagctctcactgctaacagaaagagggatgggtgaagcagtacaagaatttgtggacaaggaggagaaagatgccattgaggaattagtgaaataccagttggaaaaaacacagcgatttcttaaagaacgtcatattgatgccctcgaagacaaaatcgatgaggaggtaagtaactaatttgagtgtctaggtctatttaaatagtctgtctttaagagtagctctgagatttttttctggtaaatcactatttaacctctctgatttgtttagtttttctcatctataaaattgaaatgataaaatgaaggttaaattagaaaatgtagaaaatgcctagaacagagtcttgcatatggttggtactaaagtgttttgttccccatggatagtatcttctcttaaagatcctttgaaagggctttaaagtgaaccttgtaggatggtaatttttgttcattttaatttttttagtaagttttgattgagatcttgaatttcatttagaaaatttctgctaagcaagaagcagtggaaaaattacaggaaaagctgtctagacttgactacatagaaattataaatgtttgcatatcacattgtcaaaaaacaaaattaaaagatattgacatgaaaatatttgtatgtgggcagaaaaaagtttaatattcttaatattaatgagctcttagaaatcttaaaaataattaaacatttgatagaataatgaacaaaggacatgaataggtggttcataaaagaaatataaatagctaataagcatatgaaaatggtgtttagcctaggataatcaaagaaactcaaatacatcttttgtttgtcaaattggcagcaatttgagaaaaatagtatctagcacactgctggtagtagtattacgtttgaatagctttactgaaaagcagtttggcagagtatattaagaggcttaagatttaccctttaactcagcctgggaaatttccctatgaaaatagtgaggtagagatttgtgtatggagtgattcatcttagtgttgttcatagtggggaataattggaaa

SEQ ID NO: 1185 - DNA, 1219 bp, Homo sapiens
tctcactaagtttccttaggattattattttgaattcctttccaggcatttcatagattttcttttctttggggtctgttactggagaattatgttcctttggaggtgtcatattccttgaattttcatttttttgtgtgtccttatgttgacatctgcacatatagtgtaacagtcacttcttccaatttgatggagtagcttttgtaggaaaagatgttttcccatagatgtatctatagtgttggttggttggggcactttggttttggttctgggtgaacacagtagtatagtctttgtatgatttctttggctgtatccaacatcagtggtgtctgcgagctcctcagtggcttagtctgtgtttgtggaagccatcaggtaatttttctggggttggggcccctgggcaggcttatcctttcgtcccgggtggggcacacgtgggcatatagtagccctgacactgcagggggcaggatcactgctagcagtggtagctccaggcaagtggctctcgggttctgaggagcccatgctttgccttcctatatcctgtgggcagcttccctgatgtgctggaccacctgttacccaggaggtagggcactgaatgggcttagacgccagcaacacaaattcaccactgggtccagctagtgtcataatgctgcagctctttggatgagtgatagggtggatatcattggtgtcccagtggtgtggagaggcagggggctattggggctcaggtcaagatgaagtttggtggtggctcagctcttaaaattgtaccatactgtagcagcctgggtcccaaagggtgaggggcacctgatgtagattcccactctggggcaatgcagtcatgtggagtccgggaagctccctatatcaggctcagggcctgtgagggctgtggcgctctcctgtagtcaggatttcaggtgtctgtggtgggaatgtggactgctggggatctcctgcctacctttttcctgcaataagggggcagggggctctcagctccaagccagttctggctggctgctttacttcccatcctatacatctcaagtttccatgcctcagagtgtctttatctcttctttgctgaattcttagatgctgtatttaatgtgtggttatctatttgttgtttgatccttctttgtagagaaggcaagtgttgggtggtccatcagccatcttgatc

SEQ ID NO: 1186 - DNA, 1111 bp, Homo sapiens
ttaaaatagtacaccatttttagtggagggagggtgcatgcctatatgatggtaagattcttttgaactctaaggacaattcctcatggaaaaaataaatttcagtgcatattataaaaatgatttgcactgtgttagcaaaataaggtgttttaggttgtattttaaagacaattctaaatcatttctctggaaagcaagaccttaaattcttctctttaatagaactgcttttatgcaaagagatggtcttaacatggactaaacagtacataacaataatgtttgttatgtaaatagtatatcacatttgcttagtagcacaattcaacagcaggctgaaagtcgtggctcctctgctcagattgagttttaagttacctaatttatgtaatcagaatctattctaggtggccgtcaacgtaaactgtgtttccctattatatccctctggagactgagaatcaaattaaatagtctttcttcaaagcagtactgtaacatgaatgtatttatctcagtcaacagaacttatatgcccactgtatgtggagcttatttcaatgctaatttggcttagttagcagacctagaatctgcccaggtgagacctagaacaaaaatagctggggtgaaatggataagagaggtagaggtatatgtcaaggcagagccctatgaggaaggaagagttttcaaagaatatgaggaacatagtgctgagagtgtggctgccttcagcaccgtacacctaatctagagaaaatatttcccatgtgggaggtcctgtctgcattcagtccacccttttctgcctgcttcttcctccaagtgcctcaacctctacatgctcactctcctccccttccctcagcccatcttggtctaagcagctttcacaatccaaaccaaacatcaccagccacccgctgataagtcaccagcatttactttcctgagttactttttctccattcattgagactatggattcatcccaactccttctaaatccctcaaccatccagctatattttggctaacctttgccctagacactctaccagatgttaatgcagtatcaagtgtaaattgtgtcaccctattctgt

SEQ ID NO: 1187 - DNA, 1159 bp, Homo sapiens
gtgtgtgtgtgtgtatattgcttatatacacataaaaaaacctttgtgaatgtctaataagattttccaggtgtttataatggttactaaactgataacattttcacttctaggttcatgtcaatctacttttaatggaagcacgaatgcaagctgaacttctttatgctcttcgtgccataactcggcatttgacctgaagtatcacccaaggaaaatgtcatacatgtgtaaagacctttcacataagataaacattgaagctatttgtgatatagcatcaaaaattattcagttctctagtgtcaaagtttagccgtttgtttttttttttttgttttttgcggctgtaatgtgcaatgatgtgttttattttccttgatgcttaacattactaacaattgcaaaaataatactgaggagcactactttgcattgtttgtagttggagttttggatactgatcataaatcatgaatctggcgtattaatgcttaacttcagcgcctttgggttgtgtgtatgtgtattttttctccccccaccccgcccttttttttttaagaataaggacaagtgcttacaatctgctcaagcaattgtttttcagatattggaattcagcaaagagtgacctctctggccattctaaaactttaatgttgtgtcctaaatctggtggaggaaaagcatgcgctgttgaaccaagctgctcactggacacatatttgtgtccccaggagattatttgtcaggcactgttttttatttgtttgtttgttcatttattgttgttttactgctattggcgataacatgaaatgtgatacagctattgcccataatttaatgtgaaattaatcatgatgaattctatagcatgctactgaaatgccaaattcagctattttctttctcttctaaaatggaagtttcagttttccatatcagatgtatataagtggaattataacacaatcctatcactgacagtaatcctcagtcaccttaaataatcagtgctcacagtgctgcttacagttcatttagttggcacatataaacctgtacccacacaagactgaccaaaaattttctttgcacatttttcctttctcatagtttttttctatatttcgttaagcaaaggaaggttaat

SEQ ID NO: 1188 - DNA, 1221 bp, Homo sapiens
taacctaattgatctgctcctccagaaatattttattttgttgtgtttgtgctactgagagttttattataatccagattgtgcttcatttgtgctctctctgtgccatttttttaaaaaactgaatcttgtgtgtaaatagaagaaacatttaaatatcacatcactttttatgagaagcatcattggattcatatttcttatttttcctttttattcccttctgtctttcagctccagggttccttgaaaagaaaacaggtagttaacctatctcctgccaacagcaagcgacccaatggctttgtggacaactcatttcttgatatcaaaagaattcgtgttggggagaatctctctgcaggacaaggtggcctccaaataaacaatggacaaagtcagattatgtcagggaccttgcctatgagccaagcacccctgcgaaagactaacactctgccatcccatacacattctcctggcaatggcctgtttaacatgggcttaaaggaggtaaagaaggagccaggagagactctgtcttgcagtaagcacatggatggccaaatgacccaagagaatatttttcctaataggtacggagacgaccctggagaacaactgatggatcctgagctgcaggaactgttcaatgaactgaccaacatatctgtgcctcccatgagtgaccttgaactggagaacatgatcaatgccaccataaagcaggatgacccatttaacattgacttgggtcagcaaagccagaggagcacacctaggccctccttacccatggagaaaatagtgatcaaaagtgaatactcaccgggcttgactcagggcccctcaggctctcctcagctgaggcccccatcagctggccccgcattctccatggccaactctgccctctccacttcgtctccaatcccttcagtccctcagagccaggctcagcctcagacaggctccggagcaagccgggccttgccaagctggcaggaagtatcccatgcccagcagctcaaacagatagctgctaatcgtcagcagcatgcccggatgcagcagcaccagcagcagcaccagcctaccaactggtcagccttgccctcttctgctggaccatcaccaggtccatttgggcaggagaaaatccccagcccttcttttggtcagcagacattcagcccacagagctcccccatgcctggggta

SEQ ID NO: 1189 - DNA, 1199 bp, Homo sapiens
gtatatattctatgtgagagtttgtgtgtatagagaaagacataaaagaagaggcaaaaggactgaaaaaataatatatacccataaaagagggttaaaaaatacaaactttttttttttttgagacaatgtctccctctgtcccccaggctggagtcctgtggtgtgatctcagctcactgcagccttgacctcccagcttagcctcccaagtagctgggaccacaggcgtgaaccaccacacctggctaatttttgtattgttttgtagaggcagagtttcactgtgttgcccaggctggccttgaactcctgacctcaaacgatatgcctgccttgacctcccaaagtgctaggattacaagcatgagccaccatgcctggcctaaatacaaccattcttaatactctcaaccctccatattcgtgggttctacattcctggattcaaccaatcatggataaaaaatattcataaaaaataaaaataacaataaaacaacacaacaataaaaataaggcaaatattaaggatacactataacaggctgggcacggaggctcatgcctataatccaaacactcggagaagccaaggcatttggatgacttgtggctaggagttcgaggccagcctggccaacatagtgaaacccccgtctttactaaaaatacagaaaatttagccaggcttggtggttcacacctgtaatcccagttactcaggaggctgaggcacaagagtcatttgaacctgagaggcggaggttgtagtgagccaagattgttctactgcactcaagcctgggtgacagagagagaccctgtctcaaaaaacaaaaacaaaacaaaacaaaaaccaaaaaaaccactataacaactatttacataacatttacattgtattgggtattttgaataatctagagaggatttaaaatatacaggggaatgtgtgcaggttatatacaaatactactctattttgtgtaaggtatttgagcatctgcaaattttagtgtctttagcgtttagtgagtggggtcctggaaccaatcccccacagatattgagggcaactctatatggttttctcctatttcaggaacagattaacaggaagaaagttgtcacaaaagtttgcatcgttaatgcaaaacactgatataagtaagatattcttgaatctctaggaagtt

SEQ ID NO: 1190 - DNA, 1199 bp, Homo sapiens
ctctagattcaagtatacaaaataaactgatgcattctcttggatttagtgacaatgcttctcgaaatttgtaccaagataaaatatcagaggggtgaacaaaaaatgaatggataagatgttcatctcaacattgtttaaagtactatataatggctatgttacataacttcatacagtggaacactgcggccataaaaatgatggtgaagattgtgtttattgccatggaaagctatccatgcaatattattgttgttattattttaaatagagatgtgatcttgctgtgttgcccaggctggagcacactggtgtgatcatagctaactacagcgtttaactcctggactcaagcaatcctcccacctcagcctcccgagtagctgggactacagcatgctccaccatgccctgataattataaaaatttttcagtgatagggtctcactatattgcctaggctggtctcaaactcctgggctcaagcaatcctcccgcctcagcctcctgagtagctgagactataggcatgtgctaccatgtccagctgatgcaatattattaagttaaaaatgcaggctacagctctttttcatggtggctcgaaggcgatcagctgcttcaagatgaagctgaacatcttcctggccactgcctgccagaaactcattgaagtggacaatgaacacaaacttcatactttttatgagaagtgtatggccacagaagttgctgctgatgctctgggtaaagaatggaagggttatgtggtctgaatcaacagtgggaacgacaaacaaggtttccctatgaatcagggtgtcttgacccatggccatgtccacctgctgctgaataaaaggcatgcctgttacagaccaagaagaactggaaaaagaaagcaaaaatctgcacgtggttgcattgtggatgccaatctgagcattctcaacttggttattgtaaaaaaaggagagaaggatattcctggactgactgatactatggtgccttgtcatctcgggcccaaaagagctagcagaatctgcaaacttttcagtctctctgaagatgatgatgtccaccagtgtgttgtaagaaaggctttaaacaaagaaggtaagaaacctaggaccaaagcacccacgactaagtatcttgttactccacatgttctgcagcacgaatggtggca

SEQ ID NO: 1191 - DNA, 1312 bp, Homo sapiens
aaagttttgagaggaatttttagagaggacatttcctccttcctgatttggatattccctcaaatccctcctcttactccatgctgaaggagaagtactctcagatgcattatgttaatggagagaaaaagcacagtattgtagagacaccaatattagctaatgtattttggagtgttttccattttacagtttatattccagcactcaaaactcagggtcaagttttaacaaaagaggtatgtagtcacagtaaatactaagatggcatttctatctcagagggccaaagtgaatcacaccagtttctgaaggtcctaaaaatagctcagatgtcctaatgaacatgcacctacatttaataggagtacaataaaactgttgtcagcttttgttttacagagaacgctagatattaagaattttgaaatggatcatttctacttgctgtgcattttaaccaataatctgatgaatatagaaaaaaatgatccaaaatatggatatgattggatgtatgtaacacatacatggagtatggaggaaattttctgaaaaatacatttagattagtttagtttgaaggagaggtgggctgatggctgagttgtatgttactaacttggccctgactggttgtgcaaccattgcttcatttctttgcaaaatgtagttaagatatactttattctaatgaaggccttttaaatttgtccactgcattcttggtatttcactacttcaagtcagtcagaacttcgtagaccgacctgaagtttctttttgaatacttgtttctttagcactttgaagatagaaaaaccactttttaagtactaagtcatcatttgccttgaaagtttcctctgcattgggtttgaagtagtttagttatgtctttttctctgtatgtaagtagtataatttgttactttcaaatacccgtactttgaatgtaggtttttttgttgttgttatctataaaaattgagggaaatggttatgcaaaaaaatattttgctttggaccatatttcttaagcataaaaaaaatgctcagttttgcttgcattccttgagaatgtatttatctgaagatcaaaacaaacaatccagatgtataagtactaggcagaagccaattttaaaatttccttgaataatccatgaaaggaataattcaaatacagataaacagagttggcagtatattatagtgataattttgtattttcacaaaaaaaaagttaaactcttcttttctttttattataatgaccagcttttggtatttcattgttaccaagttctat

SEQ ID NO: 1192 - DNA, 1202 bp, Homo sapiens
tgtatacacatataatgcttaggaagcatgtatgtatatatatacaaaatccttggaagctaatatatatatattaactcttttgtctcaagggcctctgttcatttttccctttattttctctttgttgttcaaattacataaactctcttgattttttctcaaatgtactcattgcatcctctgacatctccactctgctattgagtccatccagccagttttacatttctgttactgtatttttcagttctatatattccacctcattttttttataattctattttttcttgagattttctgtttttcactagtttcaagagaatttgtaactgcctgttgaagcatttttatgatggctgccttaaaatccttgtcagataattcttatgtcagattcatttcagtgttcacatctgttaccttttctcattcaagttgtgattttttttagctcttggtatcacaggtgattttcccttatattctggtcattttggatattatattatgatgcactgtataatatttaatttttatattttagaaaacagtctctttgctgagagggttgggggtgtgtgtgtgtgtgtgtgtgtgtgtgatgagtttcctgctgggccctacagtaccaaagtggagcatttgtacactgattcattgcagatgactggaatggaagtttagtgctccattttactttactgataccttgttgtgaaagtgaggcaccaacttggaggcaccttgttgcctccaagctggggtgtaagctcagcttcctactgggccctgttgactcctccctgttagggaggaggagtagaggagtggagggcagattcacaccactgtgagtggggtgggagctcagctccttgttgagcctcatgaatattaccttgtcagggggattggaacactgcatgcttttgccaagtaggtgatggaagatcagctttttacttagtcccactgaaacattagaaaggggtgattttctccttggtgttaagctacaataggatgtgtattgctaaaaatgttttctcttgttaggctgctgttttcctagccctttataggaggtttttgagtctgtgcctgtcagtggttccagattggaatcttctctagcgccctgtcctggatgtataggagataataaggaaacccaggtttgtcgtgccttaattcct

SEQ ID NO: 1193 - DNA, 1099 bp, Homo sapiens
gccgtggagcattgccaaaagaacagacacgcttcaacagagttgatgaagattttaggtcagtacaatgatgtaagacatagacacatatggtattttttttaaattaattcatattgtgaagtgcttaatacaggcaaattacttttacatgattggtatcctctgtgtattcaaattctttcctagtggatccttttgagaagctattctctcattcaagcatttacttcttgaaccattatggtgtggtctctgttattaccactctacctaataatacatacttcataaaatcactaattactttctcttttaaattcaaaaggcattttcaatttttattttactttatctctcattagtatttaatagagttgagcatttcttctttcttagaaagtctcttccattggcttctgtgatttcgtcctctcttggttttctgactgtctctctagttcaacacatagttcctagtccttagctgtctccaaatctttagatgtagtcattctccaggcctcagccttcgatttttttctcactgtattctcaggtaatcttaaccactgccagcatcagttctcttttatatgctgaggtctcctcaacttacatgtacagcccatatttctcttctgagctccaaatctaccaaacatgctcaaatagtaggctaaaactgaatccatgagcttaatttaccagttcctttccaacaaatctttcttctttctgattcctatttcaataaatggcccaacctaattgctgaaagcagagacatgatggataactttgatatctccctcttcctccacttttacatacattaagttgccaaattttgttgattctaacctgcttagtatatcttgagccaaatacctgtacagaagtatatctgtacttctattctaatgttctgtatctcttacttggactacgcacattaaccttctgacttgctcttgtataatataagtttttcacacaacagccagagtaattgtttaaaaatgcaggttcagcactttcttttactcctgtaaataaaactttaaaatagtttcccattgtgctagggataaagcat

SEQ ID NO: 1194 - DNA, 1241 bp, Homo sapiens
tttttcaatttgcatgtaaatttgaaaatgaaatgtattaattcaccctcaatttttaagaagtgaatacatctttttcacagggaaaatagttaataatgattttttaaacaactgaatacttcatagcaaccaaaaattgaaaagtgaaaattctacaaagaaaaatataaatgaaagatagcaaaatagcagcgctgttaggctcaggtgtgaaggttttgcactaagtctagagagttctagtcaatcatagttagagtagattagtttatacattaggtcaatattcagttatcagtgagggatcttaggaaggggagctctacagattgtacctgttactagtgattttggcaggaaggttaaactattcatataagcttttaattatttaatgaagattaatttctggtattagtttgattcttcttccaaatttattattaaagccagttaggaaggtttagggattactattattgaatctcatactgttatattacaacatgttagcagatctgtttttaaattttgtttgtttttttgcttttgtaggttgccatgggtcaaggtcaagctgatttagcaattcaaatgctaaaagaatgtgcccgcaatggagactggctctgtttgaagaacttacatcttgtggtatcttggctgccagttctggaaaaggtagattcagataaatgtacaaataatatctattatactcaacttagcaatctccaagggacatcagtattaaaatgtcatgcattatttatgatgatttaaaaagtaatatttgagaaattttaaatttaaatatttcataaatatgtacaattctgcaaaataagacattaataggaagtctataaaaatctttttttaaaggcatataagagaagccaagacatttttaatgaagattgacagggaagcttagaagacatatttataccatgagtttctttttttgctcttattctgttgatctgtattgggagaagagacatagtggggtgtcagagggaactgcctaacttcctaggtgctaaggaagctagagaataaactgaagcaaatgtttcgtttatctcaaatggactcaggagaaaaataatcttaagacaggacaagtcactggatgggctttacatgcaaacctagattttattctagtgcttatttaagaaagatgagtagggtcttgggtagttaaagatgattctgaagagatattcctt

SEQ ID NO: 1195 - DNA, 1208 bp, Homo sapiens
agggaagttcccctgcacatgctatctagcctcctgccatgtaagatgtcccttgctcttctgccatgattgtgaggcctctccagccatgtggaactgtgagtcaattaaacccctttcctttataaattacccagtctgggatatgtctttatcagcagcgtgagaacaggctaatacatagatcaactgtttaatgcatcttaacagattatacaatagcaaaatgttataaagagatttcagaaatcaatgacggagatgagattgttgaatcatattgaggagtcatgtttcagtgcttggttggtttatacatggtgctaacttaagttgagtaagagatacaaaataaaaatatagcatgggtaaatattaggttcaaaggagtaagagagtttaatactgtttgaggaaggaaaagaagggtctcaagaaatataattttctagaagaaatgggagtgagaggagaaagcactccaagtagagcaagtggcacaaaccaaagcaaggaggtgaaaaagttaatggagttttgcagaggataagaagtctggtttgattaaaacctttggcacgtgggatggtatggacgtggaagttggcgatgtgggtgtgatgacagtgtttcactaagatgtcattagcgttctgtgttggttctgtaccactgtgtatttatttaagctatttttttaaagtctgtaatgtaaatagactcatctatttatggcagaatagaaaggatcgattgaactgatgacaatagccctaaagatttttattgtttttttccttcatatgataacatctactgtctggtaacaaatgcaaagattttactatctaaagaccgtagtcacaagcataaaaaagactacatccttatccttttccaaggtttcttttaagggtttcattctgttttgatagatgccaggttaagatcataacaaataagcatcctctacaaaagaaaaacagcttaaactcctatctgtacagcggtctgtcattgccatttggaaggtagatgaaagaattttgtgagagacattcctctctggaccttttgtgtgctttccagatgataccctgccaaaaaggattccatgccatgggtatttgatgtgagtacacattattctctgtcacttcattgggagccatttagctcttatgaattttagcaacgggtatgtcaga

SEQ ID NO: 1196 - DNA, 1099 bp, Homo sapiens
ttccagttttacatctttgtaaaattgtatctcaaaggcagaaaaggccatttcgtctctcatttgttttatccatgaggaagatttttaacaaaagcctccagaagatttcccctcagtttccattgacttagatcaggttacagagaaaggcaatgtctgacatttttggtctctgttagaagtagactctgttgaaaagaaagaagctaagctaggtgtgaagaatggaattggaagcccactgccttcccataagaaaggtttaccataatttactcacttttttctgtgttagacattttgattatctgcagtttattactacaagcagtggcagagtgaatgtccttgtacattttgagttacatgcttaattatgtccttgagaaagtttctaaaagtggaatgattggtttgactggttcatagggctttaattatacaatttacccctctaattagtactatatgtatgtgacttccctccccctgccagaatactccttggtcaattgtaggtattctttttggtttaatttttgccaatgtaattaaaaaatggtatgtcatttttaaaatttgtatttctttcattacaaataagattgttatgtcagtattgttattggcttttcgtattcctcttaacgtgaaccgtctgttcattgtttttacctgttttcgttttagcaagtagtacttaatttaaagtgtgaacttaatatataagatgccaggaccatcatattgatgacaaaaatctattatgtggttgtagtgcatgtcttggagttaaactcttaagtatcaagaagtaaaataatttcattgtttctgttactaacattaaaagtgtgcaaattgtataaaattaggtacttcgattagtaaaagaaaaaaatttgaatgttttttttttttattttattaagcatgcccagttatgccaagcatagtaaataaaggtcaagtagcatttataatagaggaagtattgttatccctagcatgagtgtaatggtgatatgaaaaactttgtcttgtcattataataataaaaaaatgaacatttattatggaatttctatgagcctga

SEQ ID NO: 1197 - DNA, 1218 bp, Homo sapiens
atttccaatgaatagttaattagaaaagtttattataaagcagtcatttttttctaattgttaaaagtgatatattctgaccacaaaaaacttggaaataaaagcataaggatgcaggaagaaaccactataaccttatcactgagaaatataaaatgatatagtttaatattttttacattataacattataaatatttatattacaggaaataagatatgtggaacggagttatgtatcaaaacccactttgaaggtaagtaatttaaattgtgctttaaaatttccagaatttaaaggaaatgtcaataaaaatgcatatacttatgatttggatacatgtgaaagtcaaagcaggattatgtaacagttaggaatagctaactattcaaatattcagttaaagtagatgactataatagaaaaacatgtcagttagtctctgccaatgtttgttgcttccttatagtctgctacaaaacaacattccctctagaactgggcagtgttcttcttttactcacagggactcgcattgtattgtgtgtggtacaagcagagactgtatagaagatcctagaagagagggagtggaccagttgggaattagacaaggagggccattacagcatctcctaggaccttctgaagagtctctgttttgtaagggtcactaaagtgacttagttaagatcttctatcaaaatctaagcaaccattctgttatttatctctaaacttaataggagattgtggaagacaagtgtaaggagagaactgtcacagtgctgttttatagtattcaagagagcttttatcttcttttgcttaaagttcatattattgtcttactgtttaagaaattatggctctgggccgggtgcggtggctcacacctgtaatcccagcactttgggaggccgaggcaggtggatcacgaggtcaggagatcgagaccatcctggctaacacggtgaaaccccatctccactaaaaatacaaaaaattaggtgggcatggtggcaggcacctgtagtcccagctactcgggaggctgaggcaggagaatggcgtgaatccgggaggcggagcttgcagtgagttgagatcacgtgcctgcactctagcctgggcaacagagcaaaactccatctcaaaaaaaaaaaaaaaaaaaaaaaaaaaagaaaaaagaaattatggctctggctgggcacagt

SEQ ID NO: 1198 - DNA, 1207 bp, Homo sapiens
atatattcaccaaagttcttacctctaagaagtaggattaggaaacacctatctagttttgttttaatttgttttaaatgagcatgtcattggaaattttcttggagtgggggaatgctactacataaaaagtcagaaatagtcgagtgtctgctaattattttgctggtattaaatcatattattcacgctgagtacagtggcccacatctataatcccagtgctctgggaggctgaggcaagaagatcacttgagcccaagagttctggactaccctgggcaaggtagcaaccccatctctatcaaaaataataataataataaaataagctgggcatagtggtgcacttgtagtcccagctactcaagaggctgaggcaggagcatcagttgagcccaggaatttcaggttatagtgagctacagtgactctaccactgtaccactacactccagcctgagcaaaagagtgagaccctgtcttatatatatataatatgtaaatatatataaattcagttagaatcatgccttcacgccactcctttcttgcagagtgaaattcacatgtctgaagaagctatacaggacatattggaacagacagaatcagacccagcatttcaggcactctttgatctctttgactatggtaaggagactatttatttcaagacagaaaaaaaaggcttctacaatttctttggtaacttaaccagagtgaatcaacattccccagagtatctaaaaaagttcttgttttcatttcatcaaacattatatggatatgttaaaggagtgtttgttgttttgtttttagctgagaaactttagctgttaaagtggagagtagttttgttttttatttttgtggcatttttgccagtcatcagggaatgtgttgatgtctaccactatacaaatgtgttaaacacaattgaatcgtacaaagggaatacaaaaaattggccattgtcctcaatcttatgatttagtgcagtagttctcaaagtatagtcccccaaaccaacaatctcagcattatctgagaactcgttagaaaatgcaaattactgggctaaagtttaagaaacacctgtctagtgggaaaatctttgtacttgtaaatgatattaaaagcaacattttttaaacatccataaaaccctaaatcgaagtttaacatttgcgtaatcaccaacaag

SEQ ID NO: 1199 - DNA, 1221 bp, Homo sapiens
ttcagattttttaagatttgggaatatttgcatgtacataatgaggtatcttggggatgagatccaagtctaaacacaaaattcatttatattttatatataccttgttcacataccctgaaggtaattttatataatatttttaataatttgtgcatgaaacaaagtttgtatacattgaactgtcagaaagcaaaggtgtcactatcttagcgacccaagtggtggtgtcagcactcaaaaagttttggattttggggtatttcagattttagatttttgtatgaggaatgttcaacctgtatttgaacaagcattaccaaatatcattgaatattaatatcttttgcgtaaaaactgctattatcagcatcatagtttctctaaaaagaaaacttggggatcatagccgatagagagacttgctaaaatataaatcagcctctgcaaaactgtttacatatttattggtttacatattttattggtttatttctatcccctgttcactttttctcttccacttccaattatgaagagaaaatatttgttcagggttgtccccccgccccccgtcactgcataatttctcctcttacaagctgcttttggctttcattaataacagcttccttttagaaggtctgataaggatatttaaggaagaagagaatgactctgttattaaaggtggcatggagactgtggagggaatattttttaaagcactactcatatcctttaaactaaattttgccaaagcccgagacaacattaaggagaaattgtaccttaagttagtaattccaaatctatctgagttgtatacccatcaaagacaatacagttattaacatagatgaaggtatgctataggcatcattcattatctctatattgaataggtgaaagataactgtagtcaggtgaaaggcattcattatttttaagctgaaaaggggatccttgaaaacactgaaaacctctacaacaatcttcaggaagcctgctatcttgggattcactaataataggccaagaacaaaggcaagcatccattcctcactccaccacttttctatttcagtgggtgtcgttgctacgatgaagactttggaaatttcctttctcttttaggacagggtcaggatttaggactcatagcctgaaagctcattacatactccttgtaaccatcagtccaaggttcagttcactaaa

SEQ ID NO: 1200 - DNA, 1209 bp, Homo sapiens
gaaatgataaggattttcatttctttgccaatggttgtggttctgaaagtcacataagggcctacaccagaagagaaagctaatctgtggatgtcaattagagggatatccattggggtctgcaaataaaacctgattatttatcaactgacttcttcaactgcagtttcccttattattattttttaggccaaagatgaagaggaagcctttctggattggagtgatgatgatgatgatgatgatgatggatttgatccaagcacactcccagatccagataaatacagaagctctgaagattcagatagtgaagatatggaaaataaaataaggtatgtttttactatgggtatgaaatacatacttagtactctcacatcagtcttttaatgaatccaaaagacattactaagagttctactccaagagatgtttgttgcttttttttgatacctttacttagattcctggaaatcctgctgctgtttttttactcattttgctgcagattgttctggtcatgttagggcctttttgattatttctataatccctattaatagatatgagtatgatatatgagttgtgtttttcctttctctattctttttttttttttcttatctttctctgagtcctttatgcctaagtatttgatgcactaaaatctgttctctgcaaacagagttagggttttattttttttcattgtcagagaactctattaaagatactgctaaaaattgtccttgaattttaaaacgtggacattattcttccacattcttttatatggaattaaataacaaaatactggtggggctgggcgctgtggctcatgcctgtaatcccaacactttgggaggctgatatgggaggattgcttgaagccaggagtttgagaccagcctgatcaacaaagtgagaccccaaatctacaaaaacaaatttttttttaataaataaaataatggaacacttgtacagaaacaactcttgacaaattccttcactttaaagtctatttgctattatttatttgctaccattggcagaaacaaatgaaacgtgatgaataataatatgacttgctcaccatttgttttcagagtactatgtattagattacattaagagtttattgatttcaaagttgagaatgttaaacttcatgctcaatctaaaccagtgagcttctttacagaa

SEQ ID NO: 1201 - DNA, 1354 bp, Homo sapiens
ttattggatatttgatatttggttatttaatcacagtcatctttaacagcttacactgattggtgttttatctcctgtgatcctttgatggctttttttgcctaccatttcacagaggtttagacagcagtagtagctccctaggagagtttactgatgaaacagcctctgcaagattttaaaagttttgttcttttatagactgatttagaaaaacaaatgattagttaaaaaaagaaaatatacatttgttggtaactaatgttattttttaaaacctggaccttttctggaagggcagcatataaaaacatcagtcccgaggaggggacaacaatactacctcactactacatctgtgatgactggttgttcaaacacaatggagtgtgtaaggtatatgttttataattcataaccatagcctcgatcatcaagaaatactttcgaaatttcattttccttcagaatatcttaagagtgctaaatttttaactgcctttttgtcgagtcaaactgtgggattctgatttgtattaaaattgtaagctcctcactggtatactatcatcctggaggggtgttgtatggctgagcaagagagagagagaatgagagagagactgtgtgtgtgtgtgtgtgtgtgtgtgtgtgtactctgtgtgtgtatgagagagagaaatgctaaccttgtagcatgtgaagaatgtctgtaccttgatacgatagttacataatcagtatatttggtttctagatcactgtgcttattttgtttcaatctctgactaaaaatacttaaatttggtttgttaattcttattttagaaattataattttagtttatattaatttcggttatagcttactgaagaaatctttccagttagaaggaggttctaatattcacatgttctaatactttgtttattgtaaaacagctaaatttggagatacgtaaagccttgttttctctgtgtggttcagctactttccatttggtattacacagtcaaatttacatttatctattaaaattgccattttattaaacattttcatgcacagtagattcaagttgtgtctgaaaatatctcttgtgcttttttgattttgctgactttaaaaggattaatctgggcagacattatgtaaaagaaaggttgcgtttaatatattttttgaactttgtaggacaaaacatagctggttaaccttgaagtgactgttgtaccatggttgtgcacatgcttcagaatcctatggaagagaatattcctacttgcagtacatcaaaggaatggatggtggaccctactattcatgttttgagacataaatgttcactttaaa

SEQ ID NO: 1202 - DNA, 1194 bp, Homo sapiens
caggctttggggcgccagtcgctcccgccgctcgcacccgccaggccagggccgcggttcccggccgcagctctacctgctgctgttgcagctctcggagccctgtaactttctcgggcccttgaggccgctcagttttagtgtctcagaccccaccagacaagttcagtacatgatatccctcttttcctttaaaggattctaaactcaattcccggactaactttgaaagggggcagtgcatttttgtttttttttttttttcagtttaaacagactacatcacttcctagacagatgtcatgtttcttcagacattcccaatatttggtggtttttttttttccttaaagagtagttactaggttggaaatgtgttaaaagtcaacttcataaaaatatattttaaaatacatttgagattttggtggaagacacgttgctgaggaactcgatggcattcttgtggcactaagactggcaggatgtaaatataaaagtctaagataataagggtttatttgataaacgagtactttgacatagacattgtaatctattgtttaaggagcatacttctttttttttttttttttttagaacactaaatactcttttatatgactgatggagctaagaaggaacaattaccccgttcatgttgctggataaataatggcttgatccatttgccaaaacagcatcactggatttgagaaaggagactaatattcaggattgcagttttttattttcagaatttctttgctttccccagtgtgctttatcttccagagattaataatactttccttcaaatacagcaacatgtaaaacactccttttgaagttaatcgtatgctgtaaagacgattgcagtgactttctttgcttaatcgcttttttatatatgatggaatttaataaacagttggtatattattagcaaggaatgaatagacattggcattctttacagttttatttaaatgagacagaatttgattgtggcattgaaaaaacgttgagttcttgaccttaggaatcacatacaatgttttgttcactcctgtatccccacacatggaagagtatgtaggagagtctcagaagtagctgtagaatagatgtaattaatttgggtgtagggaaaatacgttgagtctgtccttttgtttttttttttgaaattgt

SEQ ID NO: 1203 - DNA, 1330 bp, Homo sapiens
ggaattttccagttcttgcattggcataatgaggagcaggagggaaaaggcctttactagattcttgtcacaaatttctagtcaatgtgttcttaactgggtggagaaagaatggaaaaccttcaagatctcatccaagcaaatggcaacaacttagaagaaatcatttagtgacttaattctttctaaagatgaaatgggattgttttttactcgtcttccttgttaaatcattatttaagccgttcttattgaccaattcctgacacttgattgtctcctaatgctttatccatcaccacctgggctcctgcatcctcactgtggaatcaggcaccagccacataatgttccagacaaagcctggaagggtgtggacccagacgtggagtggagtgattctcttgacgtttacatatatctctgtgtctctccatcattccaaagctaaatgtacatgtttagaataacttattttataaactcttcgggagacatgttgagatttgaccgtaatgaaagccacattttcctgaattatgatggtctgcattagtctcatgtgaaaggggaatgtggaagctcagggttaatgtagtggttgttttggtttttatttgctcaattttgtctgtactcatgtcattcagaaacctgaagtgtggctgcatcttgctgctaatgtgtgatgttgacgcctaactgaatttgaacagctcaccactgtgcctacatttaaaaatacttctctctcttttctaaaaagctttaactgtagtgcctcctaataagcagtatgtttgtttcattgtgagattgcagttctgtatttcgaatgagtctaagaaccacagggataatactgtgcagatttcctgttctttacctggctctgcttccagcagtattgacacctagtccttgctgcattgtacagtagcttttcaaactgcagttttattgctaagtttttagtatgggtgatactggagtcttatcatttgaagtgtttgcttttctacttttacagtaaaacctcattaattctgaaatttaagataatgagttaagctgaagagtttactgaagcaaattaatagtgaggaagcctatttgaactacttaaacagtattaaagccctttttaaaaagcacctatttgggatcatttgaggtcaagaattcgagatcagcctgaccaacatggtgaaaccccatctctactaaaaatacaaaaaagttagctgggcgtggtggcacacacctgtagtcccagctactcaggaggctgaggcaggagaattgcttgaacctgggaggtagaggttgc

SEQ ID NO: 1204 - DNA, 1178 bp, Homo sapiens
aagtcgtgtctttgggttggccgcaccatatgttatcactgtgtgagctgaaagtaaccatttggtatgatgcagctaacattctggttacgtgtaccacctcccttcagtcactttaaaaggtgattatctgtttctaacctgattcaataagttttcttctctggttttcctttttaatccattcagcctcctttggaaaatctggcaactgtggaagagactgttgttcgtgacaaggctgtggagtccctgagacagatctcccaggagcatactcctgttgctctggaagcttattttgtacctctggtgaaacgcttagcaagtggggattggttcacctctcgcacatctgcatgtggtttgttcagcgtttgctatcccagggcatcaaatgctgttaaagcagaaatcagacagtaagccatggtatttttttgccttgttaaagcagaaatcaggtagtaagctatgagttatttgggattactggggacttgtagctgacaatttacatagtaccttgttaccaatgagtggctgatactaggatagtaggatttatgacatctttcttttttttttttaagagataaggtcttgctctgttgtctaggctggagtgcggtggcacaatcatagctcactgcaaccttgaactcttgtgcttaagtgatcctccagcctcagcctccaagtagctaggactaccgacatacactactgcgcctggctaatttttaaaaaaaatttctggctggatgcagtggctcatgcttgtaatcccagcactttgagaggctgaggtgggaggattgcttgaactcaggagttcaagaccagcttgagcaacatagtgagaccttgtctctactaaaaagaaaaaaattagctgggcatggtgggacccgcctgtatttctagctactcagaaggctgaggtgggagttcacttgagcccccgacaaacaacaacaaaaatatttttggcatatagatagggtcttgctatgttgcccagtctgctttcaattcctggcctcaagcagtcctcctacctgggcctcccaaagtgctttgattacaggtgtgaggcaccatgcctggcctatgatgtcattttttattatccagttgaatatgttttatttttgttacttctataagtagaagct

SEQ ID NO: 1205 - DNA, 1208 bp, Homo sapiens
cacccagctaaatttttgtattttttgtagagacgaggtctcactattttgcccaggttggtcttaaactcctaggctcaagcagtctgcccaccttggcctcccaaagtgttacaattacaggtgtgagccacagcacctggcctttttttttttttttttttttgagactgagttgtgctttgtcacccagactagagtgcagtggtgcgaacacagctcactgcaaccttgacctcccaggcttaagcgatcctcctgcctcagcctctcgagtagctggaactacaggcacgtgccaccgtgcctggctaatttttgtattttttgtagagacaggggtttcaccctgctgcccattgctggactcaaactcatgggctcaagcaatctgcccaccttggcctcccaaagtgctaggtttacaggtttgagccactgggcccagcacagagcattattatagtctgtttttctattgctgtcattttggagcattagccacttctaatgtttgttttatgggtgcttgttgatataacctgtatctatctcgaagtccctcaagtgggtattaatgcagtgtgatttctgcccagtgctctgaatgtcaaagtgaagaaattcagagaagcctgggtagccgggcgtggtggctcacacctgtaatcccagcactttcggaggccgaggcaggcggatcacaaggtcaggagattgagaccatcctggctaacacggtgaaacctcgtctctactgaaaatacaaaaattagctgggcgtggtgacaggcgcctgtagtcccagctactcaggaggctgaggcaggagaatggcgtgaacccgggaggtggagcttgcagtgagccgagatcgtgccactgtactccagcctgggcaacagagcgagactctatctcaaaaaaaaaaaagaagcctggggaaacagcggaagtcactatgactcttagccaaatgcctcgtcatctcattagtgacacacatgagtggaccatttctgtaagaacagattcccactgttcctacctatgattcagcaaaactacagccaagggaatgggcttggcggagtcattgggaaaagaagaccctgtcgagcttgactctagtctggcatggtagagagacatgagaaatgtagaataagcaggaggccccaggggttggggatgatctccaaggggct

SEQ ID NO: 1206 - DNA, 1243 bp, Homo sapiens
aaatcccttaggtatgagctgagaggagtgttaaaaaaaaaaaagaaagaaagaaaatcccactgttcttactatgcaggcagagttaggtgataaatatcatcgactgctatctacacatcagacacttgttcatcagatggataagatttcagtttcagttgcttatatgaccaacaataaagaattaaatgaacagaaagggagtatagcatagtagttaagagtgtgagctctgtagctggaatgcttgggtatgaacctcagctctttatactagctgtgtgaccttttgtgtcacaatttctttgtatataaaaacattaggtttaatggttgtgaggtttaaataagttaaccagtgcctgtacagagaaagcatatctaggtattagctataatgataataatatttttgttattaaataagatgatttgagtgctaagaaagaaagaaactcagtgatatactagtgagtgaaagggtgaatggatatatgtgcagtcatgactacttttagacaggttggttgggagatctttttgatgaggtgacatttgatttgttttgaaagataagaaggaggcagcttgagccaaccatgtgaagaactggggaaagatcattttggatagagagactagctgtacacagtctgaaatgggaaagagtttagcatgtctgaggaacataaaagaggccagtgttggccaggcgcaatggctcacgcctgtaatcccagcactttgggaggccgaggcaggtggatcacaggtcaggagatggagaccatcctggctaacacggtgaaacctcgtctctactaaaaatacaaaaaaattagctgggcatggtggcaggcgcctgtggtcccagctactcgggaggctgaggcaggagaatggcgtgaacctgggaggccaaacttgcagtgagccgagatagtgccactgcactccagcctgggcgacagagcaagactccgtctcaaagaaaaaaaaaaaaggccagtgttaatgaagcataatgagcaaagggtctagtaggagatgagattggaaaaaaacagggatgagaacataaatgaccttatagattatggtaaagagtttgaattttatttaaagtacttgaggaagccattgagaaatttaagcaaagaagtgaaataaaatgattatgttttgaaaagatcattttggttgctccatggaaatggatgaaacgtttatatagtttatg

SEQ ID NO: 1207 - DNA, 1175 bp, Homo sapiens
ttcacttttttgattgttggttttacactatttctgtagaatggttttctgtaatttccttaggagtcagtttaatttctttctcgtctagatagatcccgttgattttgcgcttaagaaagagatcccatacacagtcaatagcttctcctccctttatccacttaacagttttctttctaagaccaccacacctccacctactcccttattaggccattaatttccctgaagggcaacactttccataccaggcctaagatggaccctgcactgtacccccaccgctaccactgcagcttccactctcactccagaagagcttatacaagatgtattgtgactagtcatttgtctttatagagacttaagctgaaaaccagttcctcaaatactgtcctggaagtgattttcaggacttttaagtctgttagtattttactaaacctttaagttttagtgatactttgtaaggctggaaattttaaattatttttatagaaccaaccataccaactggatgcagtatcatgtgcctataatcccagctatatgggaggctgaggcaagaggattgcctgtgctcaggagtttgagaccagcctgtgcaacttagtgagaccccatctctctctctctctctctctctctctctctctctctctctctgttttttttgaagatggagtgtcgctttgttttccaggctggagtgcagtggcacgatctcagctcgctgcaacctccgcctcctgggttcaagcgattcttctgcctcagcctccagagtagctgggattacaggcatgtgccaccatgcccggctaattttgtatttttggtagagacaaggtttcaccatgttggccaggctggtcttgaactcctgacctcgtgatccacctgcctcagcctcccaaagtcctgggattataggcgtgagccgctgttcctggcccccatctcttcacaacaacataagagaccccatcttttcacaacaacataaaagaaatgagaatacctgatgttttatagttcaaaaataccaatttaccaggagacaacagggtattctttattttaaaatagagtataggagcattttccttagcatgataatacttttgttttaaaataaaatgagaccttcgagttgtaccttcatgaagcta

SEQ ID NO: 1208 - DNA, 1246 bp, Homo sapiens
ctaatacgtaaatctagagacagaaagtagattggtattgccaggggtggagggcatgggggaatagggagtgactgcttaatggttacaaagttttctttcagggtaatgaaaatgttttagaactagacggaattggtgattgcacaatattgtgaatatattaaatgtcactgaacttgtacacttgaactttttttttttggagacagagttttactcttgtcactcaggctagagtgcagtggcatgatctccgctcactgcaaccgctgcctcccgggttcaagtgattctcctgcctcagcctcccaagtagctggaattacaggtgctcaccaccacatctggctaatttttatattttttagtagagacggggcttcaccatgttggccaggctggtcttgaattcctgacctcagtgagccacctcacccagccccactttaaaataattttatgttatataaattttgcctcaattgaaaaaaaaaaaatcacctgggtgcagtggcacacacctgtagttccagctctgcagcaggctgaggcagaatgatcacttgtgcccaggattttcaaacagtagtacaccacgatcatgcctgtgaatagccactgcactccagcctgagcaacatagctagaccccaactctatgaaaaaacaaatgaataaggaaacctgtatacacatccccacacaaaaggaaagaaggaaggggggagggagggagggaggaagggagggaggaagaaagggaggaagggagggagggaggggacacaagaaagtactaacttgggcaagaagattgaaaaagaaaatgttgtttagaaaatcttcttagggttaaagtgcctaccagccatcatgtagcatgcagctggtacttactgaggcagatctttagtttggttttgtgtgtctgatattttgacccctgttttacgtagaaagcctagacgctggaaatagtgccatgcagcccagactccagcacacatcagcctcctggcaaatctcaatcttcctcagcatcagtttccagaatggaaaatgaagtacaccaaaagctttgacagccctgtatgactatcaaaggaagtactgcaaataaattgttagcaaaatgaagaaatgcaatagaaatgaaaaatactgggacttgcctgttcaactaaactcctctagagtttacagtaaaaatactgatatcctgtgttatagttttggttttatc

SEQ ID NO: 1209 - DNA, 1216 bp, Homo sapiens
cggctcactgcaagctccgcctcccgggttcacgccattctcctgcctcagcctcccgagtagctgggactacaggcgcccgccaccacgcccggctaattttttgtatttttagtagaggcggggtttcactgtgttagccaggatggtctcgatctcctgacctcatgatccgcccgcctctacctcccaaagtgctgggattacaggcgtgagccaccgcgcccggcctgggtcttattttttatccattcagcaactctgtcttttgatttgtgagtttagtccatttacattcaatgttattattaataagtaaggacttaactcctgccattttgttatttgtttcctggctcttctgtggtcttctcttcattctttttttccttcctgccttccttttatgaaggtgtttttttctggtggtatgatttcattccttgctttttatttttgtgtatctgttgtatgtttttaaatttgaggttatcatgaggcttgcaaataccatcttataactcattttttattctgataacttaacactttgcataaacaaacaagcagaaagaaaactaataaaagctctacaccctaactttgtcctcgcactttttaacttttggtcatttttatttatatcttattgtactgtctatgtcttggcaagttgttgtagttattacttttgataggttcatcttacagtcttttcacttaagagtagtttacatgccatagttacagtgttataatgttctgtgcttttctgtgtacttcctattaccagtgagttttacaccttcagatgatttcttattgctcgttaacctccctttctttcagattgaagaactccatttagcatttcttctaggaaaggtctagtgttgatgaaatccctcagcttttgcctacctagaaaagtatttatttctccttcatatttgaaagatatttttgctggatatgctattctagggtaaacaacttttttccatcagcactttaaatatgtcatatcactctctcctggactgtaaggtttccactgaaaagtctgctgccagaaatattggagctccattgtatgttgtttcttttctcttgctgtatttaaaatcctttctttatccttgaccttttggagtttgataattaaatgtcttgaggtagccttcttagattaaatctgcttggtgttctctaacct

SEQ ID NO: 1210 - DNA, 1425 bp, Homo sapiens
tcagttggagtggtgcctttggaacccccggatccccctttgtctcacccaccccgctctcttcttccaattgttttttcccctctgctgcctgcacaccacttcggctgatgatggccataaagcaagttgccatctctgtaccactttacacagaggccatcagacagtcacggtgctttaccccttcatctttcaggtacatacttcactcatgaagccaaaggagccgatgacgcagcagacgcagacacagctataatcaatgcagaaggaggacagaacaactccgaagaaaagaaagagtacttcatctagatcagcctttttgtttcaatgaggtgtccaactggccctatttagatgataaagagacagtgatattggaacttgcgagaaattcgtgtgtttttttatgaatgggtggaaaggtgtgagactgggaaggcttgggatttgctgtgtaaaaaaaaaaaaaatgttctttggaaagtacactctgctgtttgacacctcttttttcgtttgtttgtttgtttaatttttatttcttcctaccaagtcaaacttggatacttggatttagtttcagtagattgcagaaaattctgtgccttgttttttgtttgtttgttgcgttcctttcttttccccctttgtgcacatttatttcctccctctaccccaatttcggattttttccaaaatctcccattttggaatttgcctgctgggattccttagactcttttccttcccttttctgttctagttttttacttttgtttatttttatggtaactgctttctgttccaaattcagtttcataaaaggagaaccagcacagcttagatttcatagttcagaatttagtgtatccataatgcattcttctctgttgtcgtaaagatttgggtgaacaaacaatgaaaactctttgctgctgcccatgtttcaaatacttagagcagtgaagactagaaaattagactgtgattcagaaaatgttctgtttgctgtggaactacattactgtacagggttatctgcaagtgaggtgtgtcacaatgagattgaatttcactgtctttaattctgtatctgtagacggctcagtatagataccctacgctgtccagaaaggtttggggcagaaaggactcctcctttttccatgccctaaacagacctgacaggtgaggtctgttccttttatataagtggacaaattttgagttgccacaggaggggaagtagggaggggggaaatacagttctgctctggttgtttctgttccaaatgattccatccacctttcccaatcggccttacttctcactaatttgtaggaaaaagcaagttcgtctgttgtgcgaatgactgaatgggacagagttgatttttttttttttttcctttgtgc

SEQ ID NO: 1211 - DNA, 1183 bp, Homo sapiens
taaagggtctgtccacaaagggctagtggaatgtgggattggagaggatgacattcttagggacaggatcgtcttaccagtggtctctgaaggtctgactcaactgtcatcttgatttgggtgattcccaaatctgcagcttcacccttgagctcacttggaaaatgtagtcctacacaccatccagctagtggaacacattatctacttttccctgcccacgtcctccaggcttcccatcttcggcagtaagtcctagtcctccagactcaatcttggcattttcctttattccctccatcctctctcaccaccattttgtgatcaaccacattgtataaactccttccttgtaattctaggatctgatctttcctgtggagactgctgctcctccctccctggttcaggccagcattgacttgcctggcaatgctccagtaacctcttcgctagtctttttactttcatggtccgcatttcccacccttatcacacaacattcagtccttcttacaaacttctgtagaattgttcttcgtggaatacactgtggaatgtggtacctctttaccctgttccctctatactcatcgacttctaactaccttcagtcatttttcaacatctataggataaagtctctatttctggctctggcattcagaaccctccatagtaatgacaaaataaggcccttcttcctctctcttaactcctaccagtcctttctgaaatattcatatgatctttattatgccctgctccttatcctagttatatgaagacctttcttatctatcctactaaatcctgagttgctagaggttaagttctatttcttttacttgcttatatccaccacatacaattctaacaaactgtgactagtaataatgatagcttacatttactgaacattttctatgtgctagttactgttcgaagtgtttacatatttttttctcatcttagttcacagggcgggtattattattctttccctttattacagtgcacatggaatttaaagaggcagaaatgatcacttctatgcaacataatcaggcaaggtttcatggcaatccacaggatatagtggtgagggaatttattgtagagataagcttctctgcaggggatgaaaatgtgattggggaggggtgggaattacaggataggt

SEQ ID NO: 1212 - DNA, 1148 bp, Homo sapiens
tttttcgctttctaggccattaattaccagacataattaattttcaatatctttaacaaggtataatattcttttctaaatccaaggtagctgtatatcatttttctttattttaaatagagcaacataaatatatgttccttgtacagcaaggaaaggatgttagggtttgtgcatgtgagaacacagatgggctaagagtgatttgcatccagagggctcatgcaaggaacttggtaagaggttacagagtgacactactgtggcagtgaataataaattaacatttcaatattggcaaaccggagaattttgaagaatgtcatatttagttaatttctgattattacaaactaagcctgtacattgatttgttaataactaggcatgcatgtgcacgtgcatgtgcactctctctcacacacacacccccccctatatacatatatatgttttttgaggggcatctttagtgatttcagcctgggtactctgttctaatatatgctcttccttctgagaacccatttactgtcacagatccaactttcttccaaaggcaaatgactccaaacccatatctgtgttgtgatccactgttaaacttaatttccctccctgggctctgacatctacttagctataggatacaattactaggatgaccttttgatattggtaacttatacacaaaactgagttccgtttctcctcatcctcacaaataagcaaccattctcagtttcccctttattttcttgaagatagacttgctctttggaacctcagaatcatttttgactctctctttctgggaccctggtgtggtcaaatctgtagtcaatttctgctgattgtctgtgcctggttggtttggacctagctcctctttccccttgcagtgcctgccatggccccttgccctcttcttcctcccttgatttacgttcacctttttaatgcctgctagcttctgtacatgaactctttgcatgcccaacccaatctttcttgttttatgaccactggtcttgctattcattccatccatggtgtcttccttctcccccactatctctgcagattgaaagctaaagtatagctcactgccatctcacgtttgaaaccctccagttcactccagtcaa

SEQ ID NO: 1213 - DNA, 1202 bp, Homo sapiens
tttcctttgcacagttctctgcccagggtaatgtgctttcacatattttacttcgctgacacatcacaacaactagtgaggttggtgttatgattaatctcatttcacaaatgaaaaaacgaggtcaaaaaggttatgtgacttgtgcaagatcacacaattagtaaattttagagacatgtttcaatttggggtctgctgataccagcctatgaattctttctgctcaatgtcttctgcctccccctactatttttttccccaccgaggatggttcagcctgcctttctaaatacacccagaaacacagagttttcaattcataatagtgatggcttcagggacaaagtgaaacaaacaaacaaacaaaaaaacaaccttgtaggaagtttctttccagctattcacttttttcccatcagaaaaaaatgtaaggggtatcgttatgatcttccaaatacttttattataaatatgcaatgtctatttgtccatccctacacagacccagattttagctttgaggagcttagtcttttccgagtcttttctactgcagagctttggctcattctagaatgttttagactgtagcatacaattttttttttttttttttttttgagacacagcctcgctctgtctcccaggctggagtgcagtggcatgatcttggctcactgcaacttctgccttctgggttcaagtgattgtcttgcctcagcctcctgagtagctgggattacaggtgagtgccaccacgtcctgctaatttttcctatttttagtagagacagggtttcactatgttggtcaggctgatctcaaattcctgacctcaagtgatctgcccacctcagcctcccaaagtgctgggattacaggtgtgagccaccgcatcctgtagcgtcccttctccacggagcctttcctaatcaccccaaatctattctggtttggttcttatcctgtaatgtcttctattatgcctagctgtaaacatgtctgacttcctcactgaaatgtgagctcttggtgaatagggactgtgacatacacattttcgagggggctgatgtaatagattagaaggccctgggttttagcatgagctctgtcatttgctaaagtctgtagcctttgacaaaccatgtcacttctctaggcctcagttttcttttttgtaaaatatgagtgttggg

SEQ ID NO: 1214 - DNA, 1200 bp, Homo sapiens
aatcctatgttcaactactgcaaacattcatgtcttccacaacccgcacatcagctgtcatcactgtcaaagaaaaaagggtcgtttcctcctccctgctttccaatcatacatgagtatatttcatcagcagaacataaattgcatttcaaaactggtgtcaaggagcctaagaagtgtagtgaaatttcagctcttgagatacagggaagaacacggaggatggtggaaattaaagatgattgctaataaacatgatccagtccaaaagaataaaaacaatatcatccaaaaaagtaaattttctactttttttgtagaattttaggttttacatttacttctaaatttcattttgagttattttttgcatatggattgaaattcatttttttttgcgtatgaatatccaattgttccagcatcatttgttgacaaggctatgcttcctccaccaaatcatctttgcacctttgtcaaaaaaatcagttttgtgtgtgagatttttagactctattatgttccactgacctatttgatctattcatctatcctgataccaatacctcactatcttgtttactgtagctttatattgagttttgaaacaggtatcattagctttccaactttgctcctcttttaaaaatttattttgattattctacattctttacatttccatgtgatatttacaatcagctcatctatatctacaaaaaaaccttttgagattttaaatagggattgtgttgaatctgtctgatgataattgacagtttaacagcatagatcccttaaactgatgcacaaggtacatcttttcatttatttaaagtcttctttaatttattttgacaatgcattgtacttttcagtggcaggttttgcatatcttttgtcagttttattcctatgtgtttcatatttcttgccatttagagtgtgtgtgtgtatataagtttctggttgttcatggttagtatatagaaacacaattaaattttgtacattagacttgcaacttgcagccttgctaaagtcacttattagttcctgtacaatttgttttacatgttatacccaattttctgcataaataatcatattgtatgtgaacaaagacaattctacttcttccttcgcaaaccggatgccttttatttgcttttcttgccttatttcactggctggaaattt

SEQ ID NO: 1215 - DNA, 1203 bp, Homo sapiens
cacagactgagaatctgggaaggctcagaggaggcagcctggaaatgaaatgtcttttcattttttttttcccaaactagttctttctcagaaaccttttatcctaaggctcaggactgtgagcaaccactggggaggtcctgggtttaacaatttcctttccatgtctgccaggctccagcccacctgggagaggcttcttctgaggttcacccctcccctgtgtctttgtctcctttctctgcgtctcagacgaggctgtcataccgggaatttcagtgggcaggtgctcaaggaagggagagaagcagataaggataccagaggcagccgaagtgtttttaatttaaattatcctcctcctcagcctctggaacctgaggcggctgcttgaacctttggatgcaaatgtcgatgcttaagaaaaccggccacttcagcaacagccctttccccaggagaagccaagaacttgtgtgtcccccaccctatcccctctaacaccattcctccacctgatgatgcaactaacacttgcctccccactgcagcctgcggtcctgcccacctcccgtgatgtgtgtgtgtgtgtgtgtgtgtgtgactgtgtgtgtttgctaactgtggtctttgtggctacttgtttgtggatggtattgtgtttgttagtgaactgtggactcgctttcccaggcaggggctgagccacatggccatctgctcctccctgcccccgtggccctccatcaccttctgctcctaggaggctgcttgttgcccgagaccagccccctcccctgatttagggatgcgtagggtaagagcacgggcagtggtcttcagtcgtcttgggacctgggaaggtttgcagcactttgtcatcattcttcatggactcctttcactcctttaacaaaaaccttgcttccttatcccacctgatcccagtctgaaggtctcttagcaactggagatacaaagcaaggagctggtgagcccagcgttgacgtcaggcaggctatgcccttccgtggttaatttcttcccaggggcttccacgaggagtccccatctgccccgccccttcacagagcgcccggggattccaggcccagggcttctactctgcccctggggaatgtgtcccctgcatatcttctcagcaataactccatgggctctgggaccctaccccttccaacc

SEQ ID NO: 1216 - DNA, 1148 bp, Homo sapiens
gaatgaataaaaatgaggtctaaaggggaagacagcacttcatctttcagcagattttcttttgccagacaaaaatgtctattcagagactcggccttcctatagccatcctatctaaatgcgccagctatatccaggatgtggattgttttagggctcataaagtgtctcataaacttataatgaaagggttaagtcagttcaggtctttaaagaatgctttgaaagaatttatataagctttgactacttaccttacaaaattgaaagttcaagggttctcagcagttgaagagaagtaatgttagtaattctcaactttgactaaaactgccttctagtttgaatagcatcttttatgttctttgtctccttaattctggaaaagaatagtttcaaatatatatatatatatataattatatatatatataaaaggtaccttaaaatgtatgcttcttttttcaggaagctgtgctgaatggtttggtggccactgaggtgttgatgtggttttatgtcggagagattataggcaagcggggcatcattggctatgatgtttgaagaccaatctttaacatctgattatatttgatttattatttgagtgttgttggaccatgtgtgatcagactgctatctgaataaaataagatttgtcaaaactcagtgttttctccatcagatactccatgaaaggtcacaatttctcttgatattaagctgggttgtctttaaacaaccctaaatacacgtctgtttagcccgcaattggaaaggatatatgtggcaatattaacctggtacatgaatatatggggataacattttaatttgaaggtttggaatatatatatttaagctttatttccagaacagtgagggttaggtcttgggaaaactataacttgccaaagtagaagaaatagtagtaccatatgccaaagtgatagagatgaatcatgtcagtagttagaataacatttcaactgttttctttgctaaaatcacagaaagaccctattgacaacatctatgtctgtaaaaatgttagagtacttgtcatcttgaatatagcctccccaagagagaacagggtggtattctaagtatgtttctttgtaacatctttagcagtaggacag

SEQ ID NO: 1217 - DNA, 1241 bp, Homo sapiens
ccaaagggaaacaaagaagatagcctgaaaaaaattaaaaggacaccttctgctacgtttcagcaagccacaaagattaaaaaattaagagcaggtaaactctctcctctcaagtctaagtttaagacagggaagcttcaaataggaaggaagggggtacaaattgtacgacggagaggaaggcctccatcaacagaaaggataaagaccccttcgggtctcctcattaattctgaactggaaaagccccagaaagtccggaaagacaaggaaggaacacctccacttacaaaagaagataagacagttgtcagacaaagccctcgaaggattaagccagttaggattattccttcttcaaaaaggacagatgcaaccattgctaagcaactcttacagagggcaaaaaagggggctcaaaagaaaattgaaaaagaagcagctcagctgcagggaagaaaggtgaagacacaggtcaaaaatattcgacagttcatcatgcctgttgtcagtgctatctcctcgcggatcattaagacccctcggcggtttatagaggatgaggattatgaccctccaattaaaattgcccgattagagtctacaccgaatagtagattcagtgccccgtcctgtggatcttctgaaaaatcaagtgcagcttctcagcactcctctcaaatgtcttcagactcctctcgatctagtagccccagtgttgatacctccacagactctcaggcttctgaggagattcaggtacttcctgaggagcggagcgatacccctgaagttcatcctccactgcccatttcccagtccccagaaaatgagagtaatgataggagaagcagaaggtattcagtgtcggagagaagttttggatctagaacgacgaaaaaattatcaactctacaaagtgccccccagcagcagacctcctcgtctccacctccacctctgctgactccaccgccaccactgcagccagcctccagtatctctgaccacacaccttggcttatgcctccaacaatccccttagcatcaccatttttgcctgcttccactgctcctatgcaagggaagcgaaaatctattttgcgagaaccgacatttaggtggacttctttaaagcattctaggtcagagccacaatacttttcctcagcaaagtatgccaaagaaggtcttattcgcaaaccaatatttgataatttccgaccccctccactaactcc

SEQ ID NO: 1218 - DNA, 1155 bp, Homo sapiens
gctttctcctggggcccctccaattgtttactgttagaaagtgggaatggggtccctagcagacttgcctggaaggagcctattatagagggttggttatgttgggagattgggcctgaatttctccacagaaataagttgccatcctcaggttggccctttcccaagcactgtaagtgagtgggtcaggcaaagccccaaatggagggttggttagattcctgacagtttgccagccaggccccacctacagcgtctgtcgaacaaacagaggtctggtggttttccctactatcctcccactcgagagttcacttctggttgggagacaggattcctagcacctccggtgtcaaaaggctgtcatggggttgtgccaattaattaccaaacattgagcctgcaggctttgagtgggagtgttgcccccaggagccttatctcagccaattacctttcttgacagtaggagcggcttccctctcccattccctcttcactcccttttcttcctttcccctgtcttcatgccactgctttcccatgcttctttcgggttgtaggggagactgactgcctgctcaaggacactccctgctgggcataggatgtgcctgcaaaaagttccctgagcctgtaagcactccaggtggggaagtggacaggagccattggtcataaccagacagaatttggaaacattttcataaagctccatggagagttttaaagaaacatatgtagcatgattttgtaggagaggaaaaagattatttaaataggatttaaatcatgcaacaacgagagtatcacagccaggatgacccttgggtcccattcctaagacatggttactttattttccccttgttaagacataggaagacttaatttttaaacggtcagtgtccagttgaaggcagaacactaatcagatttcaaggcccacaacttggggactagaccaccttatgttgagggaactctgccacctgcgtgcaacccacagctaaagtaaattcaatgacactactgccctgattactccttaggatgtggtcaaaacagcatcaaatgtttcttctcttcctttccccaagacagagtcctgaacctgttaaattaagtcattggattttactctgttctgtttac

SEQ ID NO: 1219 - DNA, 1153 bp, Homo sapiens
tttgatgggcacaaggttgattttgaactttcttcttttgatagtttcaagcagcttatgctgggcagtcttgcaaattaagtattagatttcctctctatggtctttgtgagtattaagacccctaaaatttctattcccacttcatattccctgattttcttccaaaataactagagttgccatcctcttctttgaaagtccatagcttttcgggccgaagctgtctaaagtgtacacagggccctgaagatctaagtaatatgtacaatagataaaattagaatttataccccagcctcaagtagagaaatggaatagggttctagaaagtggagtccccatttgtagctgagcaggggcagaagaaggctctcaagccccttctgggaagtgcccccttctctttctggtgacgaggtgccaggtggttggtgtattggttagagcaatagagaactgggcataggtacatttgatttttttacttgaagctttctatgcctgccctgccctatcacaggagaagaagaagacctcacagttgacacctcaacggggctttagtgaaaatgaggatgacgatgatgatgatgatgattcatctgaaactgattctgattctgatgatgatgatgaagagcatggagcccctctggaagggtgaggaaagaacacccaagccaagggtgctcttcagaatacctccttcaaaacactggagtgggaggacgtcagttagaagtgaaattccagcatctcttttgatctcctgtatttaggattttcagatgtctcagaaacccaacataataatgagttttcctccctttctgactccactaccttatccagtcctatagtatcactttactatctgaaacgtttgtgggcttgggggttacatgagattttgctgagtaaatcaaaaaggtggtggccaggcatggtggctcaagcctgtaatcctagcattttgggaggctgaggtaggaggattgcttaaggctgggcgttcaagaccaacctgggcaacatagcaagacctcgtctctacaaaattttattttttttttgagacagagtcttgctctatcgcccaggctggagtgcagtggcgtgatctcggctcactgcaagctccgcctcctgg

SEQ ID NO: 1220 - DNA, 1159 bp, Homo sapiens
ggacttttaacacgagactttgagagcagagcaaatgaataatgtgaagagctagaacgttgccttttgggtcagaatgttaatatatcatcctgatagaatgtctatgaatttcataggttatacagggcagggctgggctgtggccactcattttggagcttttacttaatactacggaacatctcgtcccaacagttgtcttttctccatctagaagaaaagcagcttaatcattttggtggggaagagtgatgctgtgactttcagttgtgaattgaacatttttctagtattttacagttacttttaataccgcttttagggaaattgatatgttctgtaatgagaatgtagtcaacatgatggagactcaaacctcctgctttaccttactctttgtttattttcctaggttaccaaagtgacccaggtagatggaaacagccccgtcaggttttccacagagaccactttcctagtggataagtatgaaattctgtaataccaagaagagggagctgaaaaggaaaattttcagattaataaagaagacgccaatgatggctgaagagtttttcccagatttacaagccactggagaccccttttttctgatacaatgcacgattctctgcgcgcaaggaccctcgactcacccccatgtttcagtgtcacagagacattctttgataaggaaatggcacaaacataaagggaaaggctgctaattttctttggcagattgtattggccagcaggaaagcaagctctccagagaatgcccccagttaaatacctcctctacctttacctaagttgctcctttatttttattttattattattattattattattattattttttgagatggagtctcactttgtaacccaggctggaatgcaatggcatgatctcagctcactgcaacctccgcctcctgggttcaagcaagtctcctgcctcagcctccgagtagctgggactacaggtgcacgccaccacgcctggctaattttttgtattttagtagagacggggtttcaccgtgttgcccaggctggtcgcgaactcctgagctcaggcaatccgcccacctcagcctcccaaagtgttgggattacaggcatgagccaccatgcccagctgctcctt

SEQ ID NO: 1221 - DNA, 1162 bp, Homo sapiens
ctgggctctggcctcctgaagaaccagccagaagaagaaaagtagaggtggctttgctgcctcctgggagcccagaacttgcagtaaccctttagggtcctgccccaggcccagccagggctgaggagctgtcacagagagggcctcagctctgacctgacacctgctctccccagcctgttttctcttttctaaaagacaaattatggtaccataagctgccaaagatcccctcctgcctcagacccctttgccaggggctttgggggctgagcagagccacatccagagtggggtaatagctcaggcggcccgcttcccatttctcaaaccccgctctgccccattgttctcctttcccttatactttttattaccttgctcaagggccagagatctcaagtgtcaaccttgaggtcccagctccatcccctagttgcagactcatcaccatggttaccatagtgactgcttcattgccatggttacatactaattgctgcagctctgtggcccagcccactgcttcagctgtgggccatctgagggtacgtgccatcatctctccagcccaggcccctgggcatctcatgctggggggaagggactgaatacctttttccttccccctgcctgtgtcttcagccctgatgcacaggctgccagccccccagtccagccctctcccttccactggtgccttgcttagagccagaagggatgaagccgggggatctatggaacagaggaggagcgatgcagttgggagaggaagctagaagggttatggttggagttctgtacagtgttgagtttccgacagggaaagaggattcctccaatgctcctagagagaaagcctgagcaggagatgatgcagcagaggggaagggccctgtggtgccgccgcccttccttcagcctccgaagggtgatggaaatggagagtggaggaccaggcctccagctgtctggcctcgcccttcacgccttaacactaagcccacctcccctgctctccttcccagcattgagcccttggttgcctgggcccaggctgggggttttcagtatttgtaagcatttcagcagaacaataaagcctttggactacggaagtgagtggaaggccggtgtggggcttggcgctgaggcacttggg

SEQ ID NO: 1222 - DNA, 1178 bp, Homo sapiens
aaaccagtgaacttttttttttaatgtttttaattcccttttaacccagtgtactaggtcaatcaggaggcatctggaaagggggggaaaaaagcaaaaaacaaaattaaaaaaaattgatttccatattttatttttcaaaaccctaaaatattacaaaataagtcccgcatatactttaatgttttaactcttttggacaaaggaatcaattacttgaagttgcttttttgactctgcctacttctgagcaaactatttgcgactcacccacaattgccttggagatcaaaatcctacagatgcctcctgatgggacatagccctaactccttaacaactgtagcaagaactgcacggtacaaacccaaaaaagaacaagctcatctatttggaacccaagcctcatattttctgtccagtcaatgttggttactaaatagaaaacctaattaaggaagtaacttttttccagggaggggtgggagagggaatttaaaaggtgtcaacttttgaccaaaaaaattgtgcccttgtaccgatgcagctctctttctcccccacctcttgcgagataagagggatcattcatgtagaagaaaagagtataaatgcaattctgtatctcgctagagaacgtgtgggtgactaaacaaaaagtgcagtctccttcaccaactttagactgcgtggtgccacatgcctgtgggtccctcttaaagcacagacttaaaatggaaagtattactgaagtatagcctctaatgaggagtggcacttaaactatctgggacaccactactggacacggtcttgtagaggcagctgtccagttttggtgcttgactcttgaataggaattgttaaatggaaagatgctctgaggactaggtcaaagcctggtctttttttttttttttttttttttctttcttttttgggccctcataataagcattgttactattggaagttgttttcacattctttccaatattaaatatgtatttttttaagtaatgataatattttccagtggctcatttggatgagaactaccctctatttttaatattaaaactacatccaactcatcatttagcctttggttgtacagttgtgtaatgggctatggactgttacacaccttaccacctctaggcctatgttttttcttt

SEQ ID NO: 1223 - DNA, 1405 bp, Homo sapiens
cgccattgtgggactcatggccaatggtaagtgttaacttctagagtctctccctcacccccacctgtgctttgcatatagaccagtgagaagctggagctagcaccactggcttaggttcttccctttccccctgacagtgggcggctttctggctgggctgcccttcagcaccattgccaagcactacagttggagcacagccttctgggtggctgaagtgatttgtgcggccagcacggctgccttcttcctcctacgaaacatccgcaccaagatgggccgagtgtccaagaaggctgagtgaagagagtccaggttccggagcaccatcccacggtggccttccccctgcacgctctgcggggagaaaaggaggggcctgcctggctagccctgaacctttcactttccatttctgcgccttttctgtcacccgggtggcgctggaagttatcagtggctagtgaggtcccagctccctgatcctatgctctatttaaaagataacctttggccttagactccgttagctcctatttcctgccttcagacaaacaggaaacttctgcagtcaggaaggctcctgtacccttcttcttttcctaggccctgtcctgcccgcatcctaccccatccccacctgaagtgaggctatccctgcagctgcagggcactaatgacccttgacttctgctgggtcctaagtcctctcagcagtgggtgactgctgttgccaatacctcagactccagggaaagagaggaggccatcattctcactgtaccactaggcgcagttggatataggtgggaagaaaaggtgacttgttatagaagattaaaactagatttgatactgaacactgtcagtgattcattttttcaaagtgagacagcttccttgggaaatattgtcaatacctgctctttccaccccaaaatggaaagacttcatttccctggaatggggaagctgaagtgtagatggactcctttaaaactcatgcctcctctgccttcacctgaacattgaatagttcaatgattattttagagataaagctattgggttgtggacagattaaataacttgatggagggaagaagtgtaacagtggtttactgagtgtgtagccagaaagcctggttcaaacccagactgtcagtaactagcttggaaactttgaggcagaaagtctgctaaatctcttatctgtaacagaatgtaccccctggagttagggtgaagatcaagtgagataaagcaggaatgcctggctgtaagtgcttgaaatatgttccatcatcatcatcatcataacagccaccaccactgctgccaccaccccaggaccccaggaaatcagcagcaattctgggactagatccaatgctcatgcttc

SEQ ID NO: 1224 - DNA, 1882 bp, Homo sapiens
taacccccacctctgttttccccattcatctccacccccttcccccaccacttctatttatttaacatcgagggttgggggaggggttggtcctgccctcggctggagttcctttctcacccctgtgatttggaggtgtggagaaggggaagggagggacagctcactggttccttctgcagtacctctgtggttaaaaatggaaactgttctcctccccagccccactccctgttccctacccatataggccctaaatttgggaaaaatcactattaatttctgaatcctttgcctgtgggtaggaagagaatggctgccagtggctgatgggtcccggtgatgggaagggtatcaggttgctggggagtttccactcttctctggtgattgttccttccctcccttcctctcccaccatgcgatgagcatcctttcaggccagtgtctgcagagcctcagttaccaggtttggtttctgagtgcctatctgtgctctttcctccctctgcgggcttctcttgctctgagcctcccttccccattccccatccagctcctttccccctgggtttccttggcttcctgcagcaaattgggcagttctctgccccttgcctaaaagcctgtacctctggattggcggaagtaaatctggaaggattctcactcgtatttcccacccctagtggccagaggagggaggggcacagtgaagaagggagcccaccacctctccgaagaggaaagccacgtagagtggttggcatggggtgccagcatcgtgcaagctctgtcataatctgcatcttcccagcagcctggtaccccaggttcctgtaactccctgcctcctcctctcttctgctgttctgctcctcccagacagagcctttccctcaccccctgaccccctgggctgaccaaaatgtgctttctactgtgagtccctatcccaagatcctggggaaaggagagaccatggtgtgaatgtagagatgccacctccctctctctgaggcaggcctgtggatgaaggaggagggtcagggctggccttcctctgtgcatcactctgctaggttgggggcccccgacccaccatacctacgcctagggagcccgtcctccagtattccgtctgtagcaggagctagggctgctgcctcagctccaagacaagaatgaacctggctgtgtcagtcattttgtcttttccttttttttttttttttgccacattggcagagatgggacctaagggtcccacccctcaccccacccccacctcttctgtatgtttgaattctttcagtagctgttgatgctggttggacaggtttgagtcaaattgtactttgctccattgttaattgagaaactgtttcaataaaatattcttttctacagtttttgtgctgtgagtttttaaaaatagaaaaattttgggccaggcatggtggctcatacctgtcatcttaacattttgggaggccaagatgggaggatagcttgaggtcggaccagcctgggcaacagcaagactctgtctcaaaaaaaaaaaaaaaaagtatctgagtgtggggatgtgtgcctgtagacccagctacttgggagactgaggctggagggtgggtcccttgggcccaggacttcgaggcttcagtgagctatgatcgtgccactgcactccagcatgtgtgacagtgaaaacctcaaaaagtttgaataattacatcatcaaaatgttattgacactttggacttagttgagatttgtatatgtatttttttcaaggaaacaaaatactggttttattttactgctaacattatttggactcctatatcccaggcatttttaagtaacgtactttttttt

SEQ ID NO: 1225 - DNA, 1383 bp, Homo sapiens
gtccgccgtccgccctccggtagggttcgggccttccggatgcggcttgggcgctcttcggggacctccgtggcgcggaagacccgagcctgccggggggaggccggcggcgccgcacctgcccgcctcggcgttcgtgactcagccgccccatcccgagtcgctaaggggctgcggggaggccgcagcaccttctggaagacttggccttccgctctgacgcagggccgaggtgggcagtccaggccgagaggccggcggccctgaaggtgagtgaggccctcggcagctgcagccggggtgtctggtacccccccggcgtggtgcttagcccaggactttcagacgcggccgctggccgggaggctttggtgggagagacgcgatcgccgatttcggtctggcgccccttctgcggccgggacccaggcctttcacatcagctctccctccatcttcattcataggtctgcgctggggccgggacgaagcacttggtaacaggcacatcttcctcccgagtgactgcctcctaggaggacatttaggggagggcagaggcctgcagtttggcttcacggctggctatgtggacagcaagagtcgttttcgcggaagccgactggcagccaggcctgtcgggccccccgacgccgccccatttcccttccagcaaactcaactcggcaatccaagcacctagataccagcacaagtcggttaatccctgtctggactgagcctccgttggcttctgaactggaattctgcagctaacccttccacgactagaaccttaggcattggggagttttagatggactaattttattaaaggattgttttttttttaaatggagcgtttgttttcattttgcaagagagttgtagaattagtgactttctatactttcctgataataggggtgggaggggccatgcaatataaacaggctctactgttaactgaaggggcaaaccataggaatttaagattgtggctctgtttcttggtgttcctgggagacaatttattctgtgtgaaatgaaaactattgaggcagaagcagaaaggacgtaccaggagaactctgggcaaaagtcccagcctctgaggtaaggatgaaagggctttgtgtttgttcctatcttcccgccaactccacacgcgcacacacaacaccttcagaactggtttattagtaggattggttacattcaaaggctgttgcttggacttctctaaagagatgaagcccccacatactgaggaggcaaggcagtcatcaaggccccaaggtgaggcaaatccctggaaggcttgaaccctgcagttcagtctcccggggtaatcactccccagatagcagtgagaatggggca

SEQ ID NO: 1226 - DNA, 1205 bp, Homo sapiens
attttagttgcaattgttagttgcacaatttgggggaatgtttgaggtctctatagtagttactgtatttaccaggaagccctgcatgattagaattcttgagacagtgtataaagttaaattgggtgtgttgcctggatgtgaacagtaaaaaaggagaagcttctcaccatacaattatagcttaaaaggaaccaggtacaattctgtttccaaaaatagaaagtaagtcaaatattatatggatatgtaatagtaattatattaattttgactccctggccgactttttttttgaagctatcattttttgtcagagataaaaagtagcttttaaaggaaaagatatctcagcccttaattatgtgtgtgtgtatgtgtgtgtatgtatttatttatatattttagcccttgtaagagaggagcagtggaagggaactgaaggagcatgatatagagaaaagagcctgggttttggtgtgttgcatttgttctgttactagctgggagaccttgggcaaatttacctctctgatcagcagtttaattttttcatctgtaaaaatgggaagaatacctactttgcagaattgtcgtgacgattaaatgagagtgtgtgtgagtacctagcacatcgtaagagagagctcagtaagttatagtagctgttattgtttaaacttcaggaattagctaggttttgctagaactttcatctgtgcttgtaagatctttttgaatccatatgtatttttagcagctgtggctaagatagtttttttcccttgctgtgataatattccttatcttttatatttcaggctattgttagaattaaatgcgtttgcgagtgaggaatagatttaagagttatttcaattcagaccgtggaacatctcttcacaaaatgggttagtttggattggcagtatacttttaaatctgccttcgatcactcagaatttgtccagttctgtatttattaacatcagtttgtttatttattcagtaaatattgaatgcctgttctgtgtaggtcattgtcttggcagttattttgagctcttgctacctgctgaattatatcttaaaatgaagaaatttacatgatagagtgatatttattcatctgtgctgaagattaaagtgagaagtatgtggcaggcgcggtggctcacgcttgtaatcccagcactttgggaggc

SEQ ID NO: 1227 - DNA, 1118 bp, Homo sapiens
gtggtacaaccttggcacactgcaacctccacatcccaggctcaagcaattcttcaacctcagcctcctgagtagctgggactacaggcatgcaccaccatgacctggctaatttttttgttttatgtagaggcagggtttcgccatgctgcccaggctggtctcgaactcctgagctccaagcggtccacctgcctcggcctcctaaagtactgggattacaggtgtgagccaccgtgcccggccagtaatttggatttttgacatgcttttagcaaagtttctagtaaattattgtggaattagtgctaattcgtataatctttgttttattgaagtacaataaatatagtacaataaatacgttaatatggtaagttgcacaaattttaagtgtacatcttgatgaattttaaagtaaatatatgtaacctttatctagtttaaggggcagactatttcaagaccctaaaaacatccctcatggcctccccaggtcatagtattagagtaatcttgtattgttttttccagataacaaagctttattcgtcatttccatgtcagacaatggcgctcagatttatgaactggtggcacagacagtttctgaaaagactgtgtatgtatcagatatggctaccttgctatagctaatattttcattatcccaagcgtaatattccataaacttaactttgtttttataatgtatggaaaccaagcacttcctctgtactcttttagagacgttctactatgaacttgttcttttttaggttgatgccttttattttgattctattctgaaagtttatttcctaaagaaaaaattgtgcaaaatgtcaagtgaagtttttttaatgtgtccatagatttctcttaaggtatagttttggactctcgccttaatagtgtgttgccaaaataaagatattctctggcagagtgggttttgttgttgttgttgttgttgttgttgttgttgttgttggttgatttggtttttgtttagttttgctttctgagtatatttaaaggatatttcttttttcttttttgtattttggatttctttccaactttctgaagctggcaggacctaatctgtcggatgg

SEQ ID NO: 1228 - DNA, 1099 bp, Homo sapiens
tcaacatactaaatagcaggcacttgaaaatgggtgtgttttcttccattgtcgtcttttctattgagggttgggatttgggtgggagaggaaagcaaattttattttcttgactataaatttgttattcttggtatcatttcatttttataattatacattagacattggcacttgtgtaaaactgtccctgcagattgagcaggaagtaaaaacaaatggaaatgcttcggatagtggcaggggtgggggttgctaaggaaagggtgggatgggagtgggtaaagagtttgggaaggttatctaactgaatcactactgagttgaatcatggctatcattagccacaggtactgctgattataaggccagtaaaattttagtacctggaggtttgactctaatttttgcactgatggtgccaaagggccctgagtcaaaaggatagccaagggtggagtggaaaaagatatggtgaaggcagaactgctcacaccagctccagaagcacgtcctctgacttcactgccgcagctctttccacacggggccgtgattgaccctaaaaattgcagaccagcacatacactggacactgcaggcaaggtgttggtaactgcctgctctaggatgaatagtagcgttagcagcaccctacagagggtaagtttcagaattgtaatttgagaactccttcaattatattgactttctttggttttccttgtgcattaggtatatattttttgaagtatttttgccaactaaaatgaagtctgtaaattctgttaataaacaaggagttcatccgttgctcacatctttcattggtgccctctgaactctgtgggttgctaggatgtaattttaatgcttccctgcagtccaaagatgattttttcaccacaaatggtaagggatgcccacctacttttataaacaccactgcaacttaacaagtttatttatctatgtccagatttctgtttctgtcctaaattgatctgtgtttttaggtggatcaacttggatctttagacctcatctataaattgaaattatatttttagtcataagccaagtacaatctaactcagaa

SEQ ID NO: 1229 - DNA, 1148 bp, Homo sapiens
tgaggaagtaggcataatgaactaccaattgttaatttccattgctgtgtaacattttattttatgaatatattgtaatttacccaattgcctgttcttagatataagggcttctccacactgcattcccccccaccgcaatcctcccaggatttttgcagttttaagcaatgctgttgttacggacattcttttacttatttcctggtgcacactacaagttcctgtagagtttatactgagaagtggaattgctagatcatagagtatgtgcgtcttcaactttactagacagtaataaattattttccaaggtgtttgtaccagttgatactcccactggctacattgccagtttctgttcttctgcattttctccaacacttggtattgtcagagtttttaagttttgctgatttgcataaaatggtatctcattgagattttaatttttgtctctgaaaattattgaacgtgagcatcttttacatatgttaaacattttaattttatcttttagtaagtacttgtttatgtcttttgtccattttcctattaggttgtcttcctccttcttactgtttttaagagttctctgtattagttacacgtgttgcaagtatcttttttccagtttttggcttgtcttttcatgtttttaatgtcttttgatgattgaaagtatttcttttttctttctttttttttttttttttttttgagacggggtcttgctctgttgccaggctcgagtgcagtggtatgatctctgctcactgcaaccttcacctcctgggcccaagtgatcctcccacctcaacctcccaagtatctgggactacaggcacatgccaccatgcccgactgatttttttgtggagatggggtcttgctatgttgcccaggctggtcctgaactcctgggctcaagcgatccttctgccttggcctcccaaagtcctggaattacagatgtaagccaccatgactggccaagttttcatttggctgcttaactttatttttatggattttaaaaatgttttctttatgaaatatttccctaaatcaagatcataaagttcttttcctattagaagaaataacttatttttttctcaaggagataaagtttgctttcatatttt

SEQ ID NO: 1230 - DNA, 1111 bp, Homo sapiens
aaggaggcactgtcatctggtcttgacagggataatggtatttcaattgagttactggtgcctaagggcgtctagctaagagaaactagagttacacatacacaggtaatttaaggcttttacttagagttaatttctttcctaggccgtttgagcaaggaagacattgaacgtatggtccaggaagctgagaagtacaaagctgaagatgagaagcagagggacaaggtgtcatccaagaattcacttgagtcctatgccttcaacatgaaagcaactgttgaagatgagaaacttcaaggcaagattaacgatgaggacaaacagaagattctggacaagtgtaatgaaattatcaactggcttgataagaatcaggtttgtgttttttttttttttttttcctcccccactcaatggaggggaaggggatggtaaaccaagcttgagctggatttcagtgtagggtcacaatgatgaatggtccaaaacattcgcggtttccaccagaattcaaggtgttggcaactaccttccttggatgtctgagtgacccaagatgttaaggaagaataaggccctattttaatgttggtagtggccctcttgtaagagtttgcgccagacttttagtatcagattgcgtcagggagaaagaagggttattaacattaaaagaacttgcagtaattcctttttctcttcctcagactgctgagaaggaagaatttgaacatcaacagaaagagctggagaaagtttgcaaccccatcatcaccaagctgtaccagagtgcaggaggcatgccaggaggaatgcctgggggatttcctggtggtggagctcctccctctggtggtgcttcctcagggcccaccattgaagaggttgattaagccaaccaagtgtagatgtagcattgttccacacatttaaaacatttgaaggacctaaattcgtagcaaattctgtggcagttttaaaaagttaagctgctatagtaagttactgggcattctcaatacttgaatatggaacatatgcacaggggaaggaaataacattgcactttataaacactgtattgtaagtggaaaatgcaatgtcttaa

SEQ ID NO: 1231 - DNA, 1201 bp, Homo sapiens
gaggatggaatctttgaggtcaagtctacagctggagacacccacttgggtggagaagattttgacaaccgaatggtcaaccattttattgctgagtttaagcgcaagcataagaaggacatcagtgagaacaagagagctgtaagacgcctccgtactgcttgtgaacgtgctaagcgtaccctctcttccagcacccaggccagtattgagatcgattctctctatgaaggaatcgacttctatacctccattacccgtgcccgatttgaagaactgaatgctgacctgttccgtggcaccctggacccagtagagaaagcccttcgagatgccaaactagacaagtcacagattcatgatattgtcctggttggtggttctactcgtatccccaagattcagaagcttctccaagacttcttcaatggaaaagaactgaataagagcatcaaccctgatgaagctgttgcttatggtgcaggtaacaatggtatctcaattaaccctaaaggcaggcaggcccaaggtgactcgctgtgatgagtgattgttaaacattcgtagtttccaccaaaagcttggctaatgatggcaacaccttccttggatgtctgagcgagtgatagttaaaacaggagctatgtactgggttttcttttaacttcttttaacgttaactttttgtttgctagctgtccaggcagccatcttgtctggagacaagtctgagaatgttcaagatttgctgctcttggatgtcactcctctttcccttggtattgaaactgctggtggagtcatgactgtcctcatcaagcgtaataccaccattcctaccaagcagacacagaccttcactacctattctgacaaccagcctggtgtgcttattcaggtatgtttctgtacttctcttgtttggcttactgataacagataaagggaagtcttgactgactcgctatgatgatggattccaaaaccattcgtagtttccaccagaaagtcttatgttggccagttccttccttggatgtttgagcgaccattcttccttagcaggaccctagcactgtcacagacctggagtccattgtagtaatttgttttatttcctaccaaggtttatgaaggcgagcgtgccatgacaaaggataacaacctgcttggcaagtttgaactcacaggcatacctcct

SEQ ID NO: 1232 - DNA, 1203 bp, Homo sapiens
gttcagtctcactctggaaagagaacacattcatagtttataggccaatttggagaccttctcaggctgtgtggcggtgttgggaagtgactgagcaactcacctctgggtctcagttttcaccctgctggaagatagactggaagggagaaggtgtaggttccctctctgctatagaggtcacgctgtgtggtattcatttgtggggagccatagactggattgcgcattgttctttcccctgcaggcagcatgagctgatgctcttgacactgaggttggaggcagagaccctctcacatgcacacaccccgggcccccagtctgcttgctgctgctggctctgcccccagtgctttcctatcactaagaatagagaccttctctccaggcatccagcttcccacacagtctgactctgcccaagcctctgcccttgaagatgccaaagtggtttctgtctcagagtctttgcgcttgtttttcccttgcccaggaatgctctttccccagatggctgcaaggctggctccttgcctttcaggtttcagtgcaaacaccacctcagtgagcgctttcctgaaaccctctctcacccctgccccagctaaccagggactctgcctagtcactatcactttgccttgttatattttctccctaacacttatcagtgtcttttttttttttttttactcctatgcatttctgtttttgtctgttcaggctgcttaacaaattactgtagactgggtgacttataaacaacagaaatgtattcctcacagttctggaggttgggaagtccaagagcaaggcacaacaggttaggtgtctggtgagggcctgcttcctcgttcatagagagccacgtggtggaaggggtaagggagctctctggggcttcgtttctaaggctctgctctcatgacctaatcagtccccaaggccccacctccaaataccagcaccttgagggttaggatttcaacatatgagctttgtgggaaacacacacattagaccgaatgtgccaatgtacttgtttactgcctgtctctgcaatagccaagacttcgtctatatcatttacttcatttacttctgggtccttggtgcttaggacagtgcctgacacagagatgctcatgtactcactgaaggtgacacagctggtaagcaatgaagcctgaatttgaatcc

SEQ ID NO: 1233 - DNA, 1195 bp, Homo sapiens
tcaggcatcagagaacacacactggggagaaaccattcacgtgccctacctgtggaaaaagcttcagcagaggatatcacttaattaggcatcagaggacccactcagaaaagacctcctagctaggtccccatgtgaggagatctgctttcagccctcacctaagggaggtgaggaagaggaaaagccctcttgtcagcctgggaagaccttttcgagggagtctccctgacctgctcagatctgacattacctcttcctgcaactaaacacgagcctgggcagaacctctcagccttcctctacgccttgaggggatgtttcatccaaagtacaacctgaattgaggcttctccttcactggagtgcacctgcctctacctcatgggtataaagtaggagaactaagagacttaagaggtcgtggttcctatatcgtccaaaaaataggctgttacatatcctaaagactgctcaacagcttcaagttgaaagtggccaaggacagccccttaggtttgggaagggacgagcctgaaggattctgtctttactggggtcaaatcttaaagcacacagctctggactcaagacaggaggtttgcgtcctgatggctttgccacacattcacaggataactgcatagatccctcgctgtctgattcacttcttaccatgcactttcctttgatgctgaggagaaatggaagtgggcgaaaaatctcaaggctgcttcatgtggaccttgtcaagctgctccctcccccagcgtcaaattgttatcaggtgccaaacactgctagaaaggagggcctagtcagaagcctctttccatacgagttttggttttgtttttaatatttttttctattaaaatactcatgcatttaaccttcccgttattcaaccagtctcttggttgcatccctagcacttctactacaagtgagatggtagtgtttgagtgcttattgagtaaagcataattcggtcataatgaaatcgttcacattccctcatatgcacaagcccaccaaccccttcacaccccccttcacaggggtcgtatgagtaaggggatttggaaactgtcaacttacaaaggcactataacaattacagaatcatgattgccatgggccactttatttacatgaagacaactggagaacgactaagaccaaattatggaaa

SEQ ID NO: 1234 - DNA, 1282 bp, Homo sapiens
gcatccactgtagaaaacaatatggaggttccttaacaaattaaaaaaacaatgacctcatgatctagcaattccacttctggctatatctccaaatgagttgaaatcagtatctcaaaaatatatctgcatcctatgtttatttcagcattattcacaatagccaagacatgaaagcaacctaaatgtccatcaatggatgaatggataaagaaaatacacacaatagaatattattcagttttaatgaagaaggaaatcctgccatttgtgacagcataggtgaacctggaggacataatgctaagtgaaatagatcatataaagtacacatactacatgataccacttatgtaattaatctaaaatagtcaaacacataaaagccaaaagtggaatagtgtttccagggactggaagggagaggagaacagggaggtattagtgaaaatgtacaaaatttcagttacacaagatgaataaaaagtcctagaaattgactctatagtataatgcctatagttaagaatcttgtattaatccttacctggcagaggtgataccatgatcatgaaggtggttttcccagggcgaggctgatccattcactctgggtgtgctgactcctgtgatttccccaaatgtggtagacttgactgcataatttgtggtagtaggggactgtgttcatgctttcccctcaagaaaaccaaccaaacaaacaaaaaaaagctgtattgtatacttaataatttgctaaaagagtagatcttatgttaagtgttcttataataaacaaacaaaatgataataataaatagagaaggttggaagaaactttctgagatgatggataggcctactgtgtggattgaggtgatgatttcgttggtgaatctttatctccaaactcatctgcatgttcacaaatctcaacgaacaccaaacaatataaaccaaagcaaactatacctacacatatcataattaaattactgaaaatcaatgataaaggggggcttttcttcccttcaggcccaccttgtggttttcaactgcaagaaggcaagctagctgttcaaacatgaatctgggcaggaggaggggaaggggcctctgtgaagtttttgaatcaagactgtatatattaagatgtatacattaatatacatagtttttgtatgtcaatcatacatcaataaagtggttaaaaaggaagttttatatttacagtcatacttaccacgtccagtggccttttgtgtgtgtgtatgtagatctg

SEQ ID NO: 1235 - DNA, 1249 bp, Homo sapiens
aagattcttaataaacaaacactgaaggcctctttcatatttgtatcatctgcatttttttttatatgcttgtcatgtggctttactttcagcctcactcttttcttcttccaaatggattatccttaaaccttttacctttaaagagcctgagatttatatttaactcgaacaacagtttgcctctgttgcccctgtgttcatgttttcctaagccagagtttcccacgcctcctgttcctggcagcccaagtgccttcgctgggctactcccacctggcccttgcttttcattccttagggcagtcacttagcaccttccaaagtgcctgcacatgtttcttatttcatttcttaaacattcatattaccactatttagattgaaggaacagaattggtttgggcttgaagagaatacaaagagatctgtcttcaattatctgatagtagtaaagtttcacgggagaaagaaagatttcggttccacataaggaaaaacttggaaagttttgaatggaaagttcatagagagattcagtaaccacctgtcaggaattttgtaaagacgtctacggccatatcaccctgaacgcgcctgatctcatctgatctcggaagctaagcagggtcgggcctggttagtacttggatgggagaaattttataaagaacacatgaacactagctggcctatgtggcctttaaaatctcttccaatcctgagattcccacaactctggataaaaaggggcaaaagtattagacatttcactcccattaatatgagggaagtaaatgacattgaggtccaatttgtctgtagttcagaattagtccaatacagacccttagaccaactagggaacaaaaagcaagcatttcaagttacctataagcctgggctcatcagaatatagaaacagccatgtgctagctgaaagccattcaatgaggctttctattaatttcctttaaaagcaatggttattattgaaactcctaaatgctaaaatctgaaggacccatccttatatctaagttctgatcatactgaaacagtcatttagcaacattgctctgatgtccaggaccctggtctgtaatgaaagcaatgaagggaggggctggcagggcactactggggtggtataggggacactgcttatattcacaaggccacgtggtccaagcatagcggagagcaaccacagtgccatgacaagaatcgatcgccagggtcagggact

SEQ ID NO: 1236 - DNA, 1179 bp, Homo sapiens
tttcttcaaaattaacatccaaatgttcactgtatgccaaagcatgccttagtaatttctattttctttccttttttttaattaaaataatttgttttagagacaggatctttctctgccacctaggctggagggcagtggtgctatcatagctcactgcagcctcgaagtcctgggctcaagtgatcctctcatctcagcctcctgggtagctggaactacaggaatgtaccatcatgcccaattaatttttttttttatttttgcctttttagagataggggcctcgctatgttgcccaggctggtctctacccctggcctcaagtcatcctcccccctcagccttgggatgacaggtgagagccaccatgttcagcttgtccagtattttctgatcactgttactaaaccttttctcccccttcttagtaatgaattgaaacaagtacttcctagtttatgataacagagtttcagctagagagaaatggacatgcccagatatctctagaaaagccagaaaacacttcagtttctttcatgttattgtcttatcaagtcctcgtctactgcacagaatgaaatttaaggcacgcacacacacacacacacacacacacacacacacacacacctcaaaatttaacaatccaatcacgttgaaaacagatgcactatgaacaaatacacagtccagttaacaagtattttaaaagttaaatctgaaattccttatgaaaacttccagcaatgtaaactgaaggagacttttgtggtaaattaaaatgcttaccgtacttatagttagatccaatccaatgagaccggccttattttgtgatcaagcatagtctttctttcagactattttgatcgaaatgggagaggatgtagaaaaaaatttatgtttcagtggaaaataatgtattgtctagaggacacccctccaaagtgacctgattttagcctaaagttctccttggtttaacaattctgcaaactgtagataaatatgaaaaacatcagttttgcctccatttgcacatccaatccaacattcttttatctatataaatttgtgcatttttttccttttttcttggaaccagttgaaacatctacttatttccctcatgaattaaatgtttaatgcacgttcatttttatatctgtatga

SEQ ID NO: 1237 - DNA, 1160 bp, Homo sapiens
tggcacatggttagccctggttggttgtccaggggtggagtcaccggcctgtcaaccagcatcctgcacctgtctggccttcggggccgtgtgagcggttggagaggggaccaaggagctgaaatgagggctcccatcctgattttggagtggcttctttggagagtctgcttttgaaagagcaaaggtggccgagcctaaggctgcagacttctctttttctaccctctttatctctgttttgacccctccctaccaggcaatgaccactactactactaataatagcaatagcagctggcagtttttgaatactgtgcctggcactgtgctaaacacattacatgtattactctatttaatcctctctagggatattagtatccccattttacagatgaggccattgaggcagagagaggttaagcagcttcccacagttctccagctggcaagcaacagaaccaagatttaagccctggcattttggttcccaagcccaggctcttaatcaccattacatgaaaaggaggaaaggtgtgtgcgtgcacagagagagagaaaaagagagacagagagacagagagagacagaaagagagagacagagacagaaacagagagagacagagaaacaaagagacagagagacagagagagagtcgggtgcaggagaggggagggagggaaagttgaaaatacctgcttctgaaactacgtactgtttatcccaataaactctccccagatcccaacaggcagggccctgcattttttcctctatagggaaacctgaaagctaagcttccagactcaggaaaagctacttggagccagaacacactacttggcatgttgcaggcatttaatattttttagatgactcagaggatggatggacaaatgaatacacttctggcctaggtgtcaggagaggaggtcttaagctctagcgagattgcagtgtgtggccctgggcaagtcttgtgctctatcctcgtcccctcctccaggaaatgaaagtgctgataatagatgcttatctcagccccaggccaaaatgtgctgtacaagttgagaatgtgagcttgaaggtgtcactggctctgctaacttccagggctctgggctggctctggttcagggagcgctgtttggagc

SEQ ID NO: 1238 - DNA, 1194 bp, Homo sapiens
taactggggagctaacaagttgggtttcttgccttttagtctcttccagttgcgcctcttctccttggtggtcttcttaagcaacagactcttccacaagacagtctacctgcagtcggccctgagcagctctacttctgcagagaagttcccttcaccgcatccgtcgcctgccaaactgaaggctactgcaggtcactgagttgcctgccatccaaaggggatgggcgggattggaagaagctgtggcagctcttttccctgttcacctcccgcctgccagggaaggcaggacccgctctgccaagggccctctgcgtattcccttctctctgaggaattgaaatttttgtctctggtgcacgtaaggcagaatgttccctgacaccagtgtgtggatttttaacatcaccgtgagtctgaaaggaccacaggtttttctgcagctattttctagcatttgccagtccctgtgcctggactgattggaacactttgtttttctccctgtgccatttacccttccacctttccatcctgccttctaccacccttggatgaatggattttgtaattctagctgttgtattttgtgaatttgttaattttgttgtttttctgtgaaacacatacattggatatgggaggtaaaggagtgtcccagttgctcctggtcactccctttatagccattactgtcttgtttcttgtaactcaggttaggttttggtctctcttgctccactgcaaaaaaaaaaaaaaaaaaaaaaaaaaaaaaaaagcctgaagagatgagataggaggaaagacctcacagccagatctgctgggttttgaggagtgattttctttcttccccttgaaggggaaaaagctattttcattggtacatttaaagtcccccaactatggggaggtaccaattctggacaagtgccactacaacaacactaaacctgaacttttcaactccgttggtggtgggaggcagcgggcagaaatttactgttggccactgccaggtctatttcatatttcaaaggaatattgggtgctgcatataggaactgaaggggtcaatgtattaaacctgtgattggttgttttcctgtcattttgagagactaaatgtggggggcagatgtcaaaatacctgtacaattttaaaatgtcacaattaaacatgagctggtt

SEQ ID NO: 1239 - DNA, 1197 bp, Homo sapiens
tgcaaactcactgaaaattttacttattttagattgttcttagagagtagatgatcccagtctgccatcattttggcggttgttgcagtgatacttttccagctggggcttgactaaaccagtttctgtgattatcaggctcacgggtggggagagtgcaggaaatagagaaaaagttcacatgtttatatttagctacattttcttctctctctgaagaacttaaggtatatagagtcatatagaaccacataggagtatatctctcatataagaaaagattgagaacccttgatctatgtggagggtagatcagtaatattggtcctcacagaggtattccaaaaggctaagcagagagaatctagtctctagtcagtgcttgtgtattcacagccctaaaccaggctgcagaacccaacataatcctgcccactctgggtgaatccattttagtagaaaatttctccaaagttgatctgattgtaaatattaaactgacatctttatgttgcaggtaaaggacctggataatcgaggcttgtcaaggacataaatgtcacgtccagctctgatatgcttcgcactgagcacatcacatttaggacgttgaagatttttttttttttttttttttaatatgcagtttgtaagaacaaaactggatggcatcagaattgtctggaagttttgtcttgggcagtatgggctgggccaaatgaaatgatttttataattctaaacaggttaccaaatgaaatgtcatggctttactttggtcaattaaaggggggaatttttttaaaaaatgtgccttatttgttttgacttataactgatttgagggaggcaaaagctatgctaggctgccagaaggacataagcagaccttgtccattctcttagctccctaaattagccaaatagagacttctttctcaaatcaggaaaactatcaaagaccaattcagatcctacatttacagacagttttgtcataaccctttgcattgcagcacctagtacaattccttggaaacagcgtggctcaataaatttttattgaatgaataaatgtgggaccagaagagtgctagaagagtgcctttctgggctactatgtctctgttctcaatgtcttttatccttagacgctctttgactttataaatcagcagttttgaagactcaagacaa

SEQ ID NO: 1240 - DNA, 1222 bp, Homo sapiens
ataacttgaggcatcaaactttgggtcttgttttctttcccagaacaaacccttttaattaagagccacagactagcagttgtcctaggaactcatttctggatctaaaagaaaatagctttacattccatgttcaaacaaaaagaaccaccagctgcacacatctctttacagaatttgtaaagttatagcattctaacatggtttaagaggcagggttagcataaagctaatgaaggttagtcttcagaactctgcactttcatgatccccttctagggaagtcggaagggctgtgtattcataatttcttatggagagtgaagttggaggggtactggcattttgtatttgttttatttttcttatagagggccctccatattgtttagctttcaggctcccacatgcctcttggtatgattgtgacgagaactagagagactttgagagagctgtttgtgaagtgttaacaattctttcttctgcactccttccctaaaattgggttttcttgatgtgttccccatttcccacctgaagtcaatgactggcacccatccaaacatggctcacctgtagatgtgcttgaaattggtgcacctgaagcctgttcccctgaagcgtgctcacctgaaggctgttcacccgaggcctgctcaccagaaggctgttcaccggagccatgttcacctgaaggctgttcatctgaaggctgttcacctgactcaagctcactcaaaggctgttctccggagaggtgttcacctgaaggctgttctcctgaaggctgctcacctacagtatgctcaccttcagcatgttcagtcgcagcgggctcacctgaagcatgctcactctcagcatgttctccagaagtgtgctcggccacagtgtgcttgcttgaaccatgctcactggaaccatgctcacttaaagtgttcaggcctgaagaagtctcatataaagcctcagcatcagaagggttttcaagtgaaaagaactcacctggaagttgctgaactgaagtttgatgatctatggagccagaaagctcattaggctgacttgatgttcctgggatggagaaggaacagaagagagttggtgaagctgacagaatgggataaagactatcttcctatggagttaggctaatgttatgagactcctaggtttcctatgggcctagattgggcacctgaagactgcagatgttggg

SEQ ID NO: 1241 - DNA, 1179 bp, Homo sapiens
ttatttcttttgcctatttttctacagggttgtttattattattatttttttttatttaagaccgtgcctggccttttttttttgagatggagtcttgctgtgtcacccaggctggagggcagtggcacaatcttggctcactgcaacctcctccctggttcaagtggttctcatgtttcagctagctggaattacaggcacatgccaccatgcccagctaatttttgtatttttagtagagatggggtttcagcctgttggccaggctggtcttgaacccctgacctaaagtgatctgtccatcaaagtgctaggattacagcgcttacagctcacaggcgtgagccactgtgtctggcccaggttgtttattcttttctatttgatttgtaagtattcattttatattttgaatgttagtcctttttagattacagattttgcagatactttgtgaatctgaggagccctttaaaaatatgtatgattgagacttacccacagaagttctcattcgtaagtgtggtggttgtggggattggcatctgtattttaaaatttgatatacaatcaaatttaagaactatgataagattatggagaatggaggaatttaggacagtagctaagacctcaaaaagatgtgtgttcaactctcaactgtgtcatttaacagctgtggggccttgggcaggttattaaatgtccataagctttgttttcttcatctgaaaaatggaaacagtaggatttatgagatagttaaataagattgattcttgtgaaatgtttaacacagtacctagttcataggaaaagttaaaaaataaaaaatagagacttatttttctattcaagcaatcaaaatattaagactataaaatacatgttatgttatttgtgaaaaatgtccattaaggttcaaaattggtaaccattctcggtatcaggttcatggaggaattgaaatcaatcagttgggtcttgctgatggaacattcttgagttgtagtgtcatatcattaggaaggacattcttgtcacagaagatctacaaaatctgtaaaatacgataaaatgtaccagatagtagctgaaactgaagtggagtgtctgcgttgtgaaatagtgtgtgtgagtaggattttgaccccgtggttagtgattatacaaccgac

SEQ ID NO: 1242 - DNA, 1156 bp, Homo sapiens
tcacaactgctaaggaatttcttggacacatcccatcccatagacccctcagcagcaggtagagggtactctgtgctgagccctgaggggagtgaggatggagtgtggctacagccttcccgagaaccccagtgttttgtgcacccgcaggttcagagcgcctgggccggctattacgactacaacacctttgaccagaatggcgtggtgggcccccacccgctagttgtcaacatgtactttgctactggcttcagtggtcacgggctccagcaggcccctggcattgggcgagctgtagcagagatggtactgaagggcaggttccagaccatcgacctgagccccttcctctttacccgcttttacttgggagagaagatccaggagaacaacatcatctgagcatgtgtgctctgcactggctccactggcttgcatcctggctgtgttcacagccttgtttgctgcttccatcttccccagtactgtgccaggccttctccccctccccagtgtcctctcctctcaggcaggccattgcacccatatggctgggcaggcacaggcagtgaggccgaggccaatagcgagtgatgagcgggatcctaggactgatctgtagcccatgctgatgtcacccaccagggcaatccatctggaggcctgagcaccctggcccaggactggcttcatcctggcactgaccaggaaagactgcctctgaccctcttagcagacagagcccaggcatgggagcactctggggcagcctggctcaggtttattgattttcgtctgtttaccctatccattaatcaatacatgtaattaactccttccctccagtcttctgtctcttcttttcattgtacagcaggagcttttgaagcaccccattagccttataccagtacagggagtttttttaaaaaaaaacaaaacacgagcacaaacccacctttcattagttaaatccttgagcggtgcagtatcacacagattgtgtgtctgtagtcttagcaggaagattgggaatttggcataaaccatgccactgtttccgtgaacccaagttactttttcccagattactctggttttgtttggtgtgccaccagaagtcgctgtgtggttctttgctttgtgtacatga

SEQ ID NO: 1243 - DNA, 1225 bp, Homo sapiens
agaaagggaaccaagtgccccctgggcacttcacatacattaatgccgttaatcctcacgataatccaggagggagaactgttattggcctaactttataggacattgaaatcaagaaagacttggtaacctgctcactgtgtgagtcaggaatagaggccttattttttccactacctcaaactaccagccagttggtaggaacgggagcttaggggaatacttcggtgtgggtgattttatgttttttttctaggaaactcagctatagctgcccagttatccatggcgtacatcttccaggttatctgcatacttctggaccagtgtctttgtgtgtgcgttgtttatgtccctctgaagctttctgtgtatatataggtcacacattcctgcaatgtaaatcagtcaagcaggcagcttagaaattcttatccattcagacctttggcctttgcttgtgtaaactggaaatgtgggtgtggagagtcaatgtggggactagaatgttggaagaatagaagagaagcccacaggaggtgtgtgagggcagaaactgtacttgggggattttgccctgaggttcaagtatggctgtagctgcggggacctggcttctgccatgaaggaggacttagatggaggagctgtgccaagaaccagcaaccctggagtgggtacatgcctggcccaagcatgttcacatgcacgagttcactgacagctttcagaaccagcatgactgaaaatactctgtttagcctaccaaatgttccacatctccccaagctcccaggatgtctccggcacccaccaaccactcatgtactcaggttttccagaatccaaaaacagattctcaaaaaggccgaacatttggcagggaagtatttctaggtaaatgatatgcacagttatgtgatctccatcccagagggaaacattggctaagaggattggttgaagaaaaacaactattagaaaatgtgttcaatggggtcatgtttatgctccttctgtcaactaaaactgtgtgtttaaacaatgtctttggtttattacagtcatcacactgtcagtagcagataatgtgcttgaatttcacaagtgtatgtaaatgatctagggtagcagggcagctgtccccagtcaacgttttcacattgtgataattctcaggaaagagaaagacatacttaagagttgtacgttatctgtcttctca

SEQ ID NO: 1244 - DNA, 1905 bp, Homo sapiens
gcaccctgtgcaggtctcttcccagacaccacaatgaccctcaggttttgttcttccaggttgatccaatgctcaccccagaagagcgtcacctgaacaagatgcagaaccatggctatgagaaccccacctacaaatacctggagcagatgcagatttaggtggcagggagcgcggcagccctggcggagggatgcaggtgggccggaagatcccacgattccgatcgactgccaagcagcagccgctgccaggggctgcgtctgacatcctgacctcctggactgtaggactatataaagtactactgtagaactgcaatttccattcttttaaatgggtgaaaaatggtaatataacaatatatgatatataaaccttaaatgaaaaaaatgatctattgcagatatttgatgtagttttcttttttaaattaatcagaaaccccacttccattgtattgtctgacacatgctctcaatatataataaatgggaaatgtcgattttcaataatagacttatatgcaggctgtcgttccggttatgttgtgtaagtcaactcttcagcctcattcactgtcctggcttttatttaaagaaaaaaaaggcagtattccctttttaaatgagctttcaggaagttgctgagaaatggggtggaatagggaactgtaatggccactgaagcacgtgagagaccctcgcaaaatgatgtgaaaggaccagtttcttgaagtccagtgtttccacggctggatacctgtgtgtctccataaaagtcctgtcaccaaggacgttaaaggcattttattccagcgtcttctagagagcttagtgtatacagatgagggtgtccgctgctgctttccttcggaatccagtgcttccacagagattagcctgtagcttatatttgacattcttcactgtctgttgtttacctaccgtagctttttaccgttcacttccccttccaactatgtccagatgtgcaggctcctcctctctggactttctccaaaggcactgaccctcggcctctactttgtcccctcacctccaccccctcctgtcaccggccttgtgacattcactcagagaagaccacaccaaggaggcggccgctggcccaggagagaacacggggaggtttgtttgtgtgaaaggaaagtagtccaggctgtccctgaaactgagtctgtggacactgtggaaagctttgaacaattgtgttttcgtcacaggagtctttgtaatgcttgtacagttgatgtcgatgctcactgcttctgctttttctttctttttattttaaatctgaaggttctggtaacctgtggtgtatttttattttcctgtgactgtttttgttttgtttttttcctttttcctcccctttgaccctattcatgtctctacccactatgcacagattaaacttcacctacaaactccttaatatgatctgtggagaatgtacacagtttaaacacatcaataaatactttaacttccaccgagactgctcgtttcactgactgcggcattgatctgcgtgatggtcctacccccttcctccaggagggtgataacttcgttccacgaaggaccccagctgcacctcacaggcggaaatacgtctgctcaagctgtgactcaaggcttccagcgccgtttcgcatttagaaagcaaagtaagagggaacatctgcacagagcatttgtctggcaaaatttaggctactgatatttattaatatgagacttcttaatgctactgggaacaatgagtagggcttgtggctgaattttcagaggaatgcttgcagcttccatttgcttaaataacctgacactgggaggccctgtcacctcactgatgggggtgtttggtttgttgcct

SEQ ID NO: 1245 - DNA, 1417 bp, Homo sapiens
atgcaaccagcagagtaaactgctccaacacctcgggcatgtcctagggcttgccctcccaccagggccagcccaagattaggtcctcagcagcatcaaggtctgggagagccactggcccacatgtcaccattctattcctcagcctccaacaggactcttcattttggggagggaaagggaagatggggccatagcccctaccttgaaattgtacagtgtggaggggatgttagtgcctacctgtgacctttctgctccactgctcagcaagatgaggtaaggttgggtgtcagaggggacctccagcttctctgaagagccagcccttaaggcacttggagcaaaggtcattgagatcagctttatgtggagtaaggaggaggcctgggaaccgcttgtggcatcagttggggcgacaggtggatgagtgtgctctgatggagcttttacggcccacagccactgccaggagcctgagctcttccccatgcttgggacacgttccttggtccccacagcagaatggacattgaattttggtgcttttccctttggtagaaggtggaggtatctgaggagttgtttctgtcttgctacctctgtctactatatagagcaagagtcgggaatagggagatgtgtgagaatcactctcccatggatcagtgtgggccctgtccctcttccccactgtcaccaaccagcagcttggggaaaaggctctgtcgtggatttttgctgcctgcttcccgcttccactcttcttggcggtagatgttcatggtgatccactttgggcggtctgaaagtaggaggtgggggaagaggcaagcctgcacacacacttcctgtccacagggggttgcctgtggcattggagggtggagtctcagagtccagggactgggaggaaggtacttgatgggatggtcttgattctggaactttagactgaggtgttagaaaggggaattgttggctaggggagaagagcagtttaacgctccacttgctaagtcgtctgtatcagtgtcagaaggtcttgacctcccattcagatttaatttcctaactgccaggtgtggggctggggatagagggcccagaagggggcgcagtcactgacgtgaagggaccacatcccgcttcatgtcagtgactcctgccccttggtcttcagtgtttttctcttccccaggagggactttgatcatgcaggatagaattctcccatcgcacacctgggggcaagttttagatgagcttctttcctccatttcacctggtggtctgaggacacacagagggtgggggtgagcaggcagtgtgggtggggaggggctacctcccccagaccccttacaaactctgtacctctcggtgcgcggcagcctcttgctgtagttcttctttt

SEQ ID NO: 1246 - DNA, 1417 bp, Homo sapiens; identical to SEQ ID NO: 1245

SEQ ID NO: 1247 - DNA, 1168 bp, Homo sapiens
ccctgagggcttcctcctgtgacagtgtcctcggaggccagcagccctcctgcagcccgtggacggcgatgggattggtggaacgcagttccctccgtggatagagggtgaagatgtcacaggcacaagtttaggtgctgggtgtgggcatgtgtgacagcgtggttgtgagcatgtgggtgatgggggtgtaaccacctctagggaccagtgtccttcatagtctgcctttgaacaatggcagtgactactgatcagcttcttaggacttcggcactcactctgtaggagatcacgccttccaaacttccccttttacggtctggcggccttgcagtagacacgactcagatgtaaacctgcttctgtgtctcagatgtctgtctgcctcttcagcatcatggctgagaactgtggctgttgtagtgtcaggtgacccacagaccaggaagaggggaaaacggttcttagcggggcctggacaactgcatttgcgtggggagagaagatgtacgacgaggcagagaggcgaagcctgtcttgatttgctggtgggctgccgtgggctccctggtgctgagcggggtcctgtgctggattgttggggtggctctgggcccagcatctgggagtggccctgcctgctgccagtctgcctctaagcagcttccctggagagactgggggtaggacaggccttttgagatcctactttcttagcaggaaggacgcctttttcccagcaggctggcggggtctgtgccctcctttgaggtgcttagtcccacaaccatgcgcttgggggaagactgaagccgggtggattgagccgagtatttcttgttatttttccatgctctctgtctttatttttgatttgtgatctaaaatatttggggttgaactgatttaatttattcctctgccctttttgtgctgaggaaactggggtaaggttcaaatgtgaaattttctgattttatttggggtgggggacaaggttgacgaaacagtagcttctagggagaaacagatttcacggagcctccagcatctttggcactgcccacgatctgaatctccagggctgaagactgcgtggctggaatctgtttcttcctattttgttagcaaaagccttttccaggcttgggggtggggtggggga

SEQ ID NO: 1248 - DNA, 1357 bp, Homo sapiens
cttccctgtgtctgtctgtctgctctcccacctggcttccctgtgtctgtctgtctgctctcccacctggcttccctgtgtctgtctgtctgtctgctctcccacctggcttccctgtgtctgtctgtctgtctgctctcccacctggcttccctgtgtctgtctgtctgtctgctctcccacctggcttccctgtgtctgtctgtctgtctgctctcccacctggcttccctgtgtctgtctctgtctgctctcccacctggcttccctgtgtctgtctgtctgtctgctctcccacctggcttccctgtgtctgtctgtctgtctgctctcccacctggcttccctgtgtctgtctgtctgctctcccacctggcttccctgtgtctgtctgtctgtctgctctcccacctggcttccctgtgtctgtctgtctgtctgctctcccacctggcttccctgtgtctgtctctgtctgctctcccacctggcttccctgtgtctgtctgtctgtctgctctcccacctggcttccctgtgtctgtctgtctgctctctcacctggcttccctgtgtctgtctgtctgtccctgtgtctgtctgtctgtccctgtatctgtctgtctgtctgctctcccacctggcttccctgtgtctgtctgtctgtccccgtgtctgtctgtctgtccctgtgtctgtctgtctgtctgtctgctctcccacctggcttccctgtgtctgtctgtccctgtgtctgtctgtctgtccctgtgtctgtctgtctgtccctgtgtctgtctgtctgctctctcacctgcgcttcctctatgcagacccagcgcgtgtcctcaacatgccccctgtgatttacgtgcccgtggggatccatggctacatccgctgccctgtggacgcagaaccaccggccaccgtggtcaagtggaacaaggacggccgtcccctgcaggttgagaaggtgctagagagatgcatgttgagggttggagtgagggctccccccagtactgtgatgccacctctgggctctggatttctgccaggactcctggccccttccaaaagccctgggcaaacagagagctgcttctgtaggggtctgcgggtgccgcccgccccgggctggagctcctgtactatcctgcgtgctgcctggcccagctgggacccagcctgggatggagcgcggagtctctgaccagcgttccctgccctatcgtctgtgtctggcagaacctcggttggaccctgatggaggatggctccattcgaattgaggaggccacagaggaggctcttggcacttatacctgtgtgccttacaacactctggggacca

SEQ ID NO: 1249 - DNA, 1446 bp, Homo sapiens
gccctgctcggaggagacccgcccctgcaccgcccctcctcccgctcccctcccgggccctctggttgggagagtggagaagagtcgagaagagtggagaagagtcgagaagagtggagaagagtcgagaagagtcgagaagagtggacaaggcgaaccgtctgcagcgaggcggggctggggggcgcggggaggacggggttcaggccggtgtcgctctcaaggggcagccctggtgtcacccccaccccctcccacgctgaagccttccggccgagctgtggcatccacgcaaatgggtgggcccaggattgggttttcggcttggcggtgggggtgggggcgggggcgcgcggctagagactgcaggctcggaaggatcagatctgttaactccgagtccctcccttgaaatccgtgccacctttcccttcctctttcccagggccgcctcggcacctccaggccagaatttaaatgttatcagcggcaattgatctgctcgggactgaggtttcgggtcctctgcggaattgggaggagcgtggatggtgaaggagctgctgcactgtggcacgggcttggccggggctgcctggctctgagcaggctcgtgggacggccctgtaaggaccccactgcaagaagggcacagaagcacctgagttggcgtctcagcagggacccccccaggaaatgcccttctacagctggtactcaagctctttacacacttagccatcgctatacacagtccacgcttgtgcacccacacccacaagcttatgctcacgtgcacttttttttttttttgagacggagtttcgctcttgtcgcccaggctggagtgcaatggcgccatctcagctcactgcaacctccgcctcctgggttcaagagattctcctccctcagcctctagagtaactgggattacaggcgcgcgccaccacacctggctaatttttgtatttttagtagagatggaggtttgccacgttggccggctggtctcaaactcctgacctcaagtgacccgcccgccttggcttcccaaagtgctggggttacaggcatgagccaccgagcccggcctcacaggcggattcttgaatccgtgtgtataattcttctcttacagtcatccagcaaacatgtacagaccctgctcacgtttccacataaccatcctcgtcttccttttctatccttcgggtccgcgcatttgccatccatacatgttactggatacagttagctggaacatatgaaatgccctttcctagcacacacaatggatctacgtatgtacaggcctaaaaacagaatacacatcctacatgacatgtacacatgtgcacacagaaacaacagccttcacgccgtctgcatatgcgggccatgcccaggtcccaggcacacaggccaggcgacagtccacttcat

SEQ ID NO: 1250 - DNA, 1232 bp, Homo sapiens
gcaaggacttatgttctgggaatcgaaggacaatgattgcagttcctgactcagataccagcttgcgtatgctggtggccagcctcggactgcgtgagtgctgcctggtctccaccggcggtcatcgtactccggatgttcacggcactccggatgttctgctgtgcccggttgcatggatcctggcctatctgtgtctggtcatactctgcatggcagaccagaaagagatgactgtgaccccagtgaggcctcccagccgtaccatgaccccggttcctgatgagtgtttgcaggattgacgggtgatgcagggatgcccgctggcatggcaggacgcatttcaagcctggcacacttcactcaaggagatcctttctggtggtgacaggatctggctcacctcccacccagccgccctgcaagatcccctctgaaacttgacagccagtcccattcccagaaagaggtggtgaccttgccacctgctcatctgcccttttccatccactcacatccgggagcactttttactacacctggaatctcctgcctgctggggcctgccctgtacccttcatcctcaggacccacctcaccagtcaaggaaaaattactccagagggctccacctccccctgcttcctcaccacggggcacagcagaacttggtacctatgtcctctgcttcaggtttccattgcaaccaatttttgtgtctgcagcttgcccagccttcagcacgaatagtgcatgccccttttccacttgccaaaagggaactggtgaggatgggctgtagaggtcttgttaggttgtgcgcggccccatcagaagtcctgatgtgcctgccttcctccaggaaccccaccttggaccatgaccatggccaccctctccatccaggtggaggagcggagcctgactctgagcagagcagacctgggcactgagcactgagttcagggtttgctgtccggactcttctaaggtggaaaaatcgctttggataaatgaagccgagatacataggcaacaggaatcctagcagaaagtgttaacataagctccagttcaaaagaaggcaggtgttcctggtttcatcagataaaggtccatcgtggatgaactgctccccaagaaaagtgacagaaacacgctgggcttccttaggatttggttagctgcttggtatcaagcctaatttaggagtaaagtcttgctgaccttta

SEQ ID NO: 1251 - DNA, 1228 bp, Homo sapiens
gaagggggttgtattcatcaatggccagaaccttggacgttactggaacattggaccccagaagacgctttacctcccaggtccctggttgagcagcggaatcaaccaggtgggagcttccagccccttcctgttccccatgacgccctgcccacctgccgtcccagggagccttcggtcagggtggaggggcgtgtcagcgggttcttcctccctcctcctcgctgcagacgagttgttggtccctgtcccttccagcctggttcccaaaccctttccttctgaccctgccacctctcagcacctcccctggctccaggacagacgtcagctgccctcccagccgggccctctctccacaggtcatcgtttttgaggagacgatggcgggccctgcattacagttcacggaaaccccccacctgggcaggaaccagtacattaagtgagcggtggcaccccctcctgctggtgccagtgggagactgccgcctcctcttgacctgaagcctggtggctgctgccccacccctcactgcaaaagcatctccttaagtagcaacctcagggactgggggctacagtctgcccctgtctcagctcaaaaccctaagcctgcagggaaaggtgggatggctctgggcctggctttgttgatgatggctttcctacagccctgctcttgtgccgaggctgtcgggctgtctctagggtgggagcagctaatcagatcgcccagcctttggccctcagaaaaagtgctgaaacgtgcccttgcactggacgtcacagccctgcgagcatctgctggactcaggcgtgctctttgctggttcctgggaggcttggccacatccctcatggccccattttatccccgaaatcctgggtgtgtcaccagtgtagagggtggggaaggggtgtctcacctgagctgactttgttcttccttcacaaccttctgagccttctttgggattctggaaggaactcggcgtgagaaacatgtgacttcccctttcccttcccactcgctgcttcccacagggtgacaggctgggctggagaaacagaaatcctcaccctgcgtcttcccaagttagcaggtgtctctggtgttcagtgaggaggacatgtgagtcctggcagaagccatggcccatgtctgcacatccagggaggaggacagaaggcccagctcacatgtgagtcctggcagaagccatgg

SEQ ID NO: 1252 - DNA, 1190 bp, Homo sapiens
gaaatcggaagcaacagggacgcttttagggaggtgagtgagagggatgcccgcctccaccatctcctgggtaaataatctccctgctgtccaggacctgcagctgatccacccccaggcacctgcttcatcctactggctttataatttccagtctctttccattgcctcggcgcatactcagccaagccctgagcctgtgtcattcaccagcaaatacttactgagcacgtagcaaaagccaggaactgttctaggtggttgggatacatctataatcaaaacggaccaattccctgtcctcatagggcatacattctagaggagggagacagacactacacaataaatgggataaatgagtaaattaggtagcattccagaattaatgagtgctatagaaaaagaacaaggagagctgggtaaaggggatcaggagtgtgggtgtgggtggtggcaatttttaaaagggtggtcattgagagcatgtgagcaaagccttgccaggagtgagagaactggccatgtggatattatggggttgggtgaaagtgctttcctctaggcagaggaaacaaaggttgaaacgaagcaagagtctggctggcttgtttgaggaggactcaagcctggagctgggcaagtgaatagaaggtaaggtcagggaagtaaatgggctggggacagggagaggggcagatcaggtatgtcaggttggccactctcagacttcagcttttgctctagtgacattcagatgcagggcagggttttgggcagcagtaatctcacattatttccgccccctccaagatggagtctcgctctgtcacccaggctggagtgcagtggcgtaatctcagctcactgcaacctctacctactgggttcaagtgattctcccgcctcagcctccccagtagctgggactacaggcgcgcgccaacacgcgcggccaatttctgtatttttagttgagacgaggttttgccgtgttggccaggctggtctcgaactcctgacttcaggtgatctgcccaccttggcctcccaaagtgctgggattacaggcatgagccactgcgcccggacagtcatcttacattttaaaataatctctctagctggtatgttgagaactgagtataggggagtgaaggcagaagctgactggttataaggcaaaaatc

SEQ ID NO: 1253 - DNA, 1258 bp, Homo sapiens
agtgatgcatgcttttcggggaaaacttcattcacaagtattccagacaccaggcttcaggcatggccatgagcaagaccagcaaataacagctttttgccttgcagccctgaccccaatgtctgctgtttccaacactggtgatttctaactacggcccacagcagatgctgttgaataacaccatggcttcatcagaggatgtggggttgtagtacctctgggtgatgaagttgttttagtaaatccatttttaaaaaaaaaaaaggacttgtttttacttttttctaaatgtctctgactactgactgttctatacatagattatttttccttttttaatatacatatatgaatatataaatatatatatttactgttaccagcagcatatgacagagtttcaacatcaaaaatccatttgggggcttgctttttcttttttgctttaaaaaaaaaaatcccattccttctttgtagtacaaggagttagcactccctcctccatcccagcctgaccagatcttccattttgcttttgttcatatagataattatatgtcctttgtgtgttgggacttgtccctgtctgttgggaaacttggtctcactctagtctgtgctggctcttttttcttttgtgtgtgaatgtttgaaactatggtgctgtgtcctcttccctcctgttgtgttctctgttcttcttaaggtattaggtaagctgtatgtaaactcttattagaaggggactaatttttttttaaaggacaaaaaaaaaaatgactaaaaatagtgttttgtcatcactgtctggtgtctttattttggtttaaaaaaatctgtggtttgacttaaattcatcagttttccttttaaaggggggattggggtggacctagcaacagcttatagtttcctcttccctttttgccccagtctcttttaaagaactgtcttctagtaactagaagtgaaatgtactgtccagttacagtttgagtgggtatgagatttaactcaaaaggaatcttacaaaaaaaaagatgttttcttataaaatccaatttctgtaaatgttttctctgaagttcatactacctactttttattcattcttaatactgtataacattttgagtgttttgacttgttcagaggtttgttagtgttgctgtgcatatgtcttgaggtctcatctgaagtaagtttgtgtatgatcgaagatttcaatggatattgcaaggtaactaattaactg

SEQ ID NO: 1254 - DNA, 1197 bp, Homo sapiens
ctttgaataaagttgttttcatttcattataacagtgatgagggggaaaaataagttcagcttgcagatcagcttggtactgcccattaatctcattgttacacttaaagtccttgcaatgttaagtgagctctgattaggtctatgattctccttgaaattagtttccacaagctcacctacatagacacaatcccaaaagatgcaggacagactttgcttcattaaatatgtacctcgtaagtaatgattttctggatggtaactaagataaaatgactgattttattttactaaataattacctacccctcctcctaaaccaagagggggctcttcctcaagcaagaatactaagttcaaagtattttaagttatgaatttatggtcacaacagaggacatcacacaaaggaaaaaaccaccaggtcaaatgcaaataaaccggcaaataaaattttcattatacaattatcgcttgctctgtgggaaaatgctcaagagtataggcttttttttttttttttttttcattcaaagatatcaacatcaaagtaaattggcaggggtatatagctcagtggtagagcatctgactgcaaagtaaatttgaacttgaattaccataagtcttgccaccattcttctcagctgtcaaatacattgctaacactagaaaatccataatcttatttttctaccctgccaatacccactaccaaagagacagtaagctaagattctcatataaattcctccacaaaaagactactccatccaaccatatgaaactgcagttgtgatccctagtcctgaaaatcatcaatacttgtgatgttttcataggttaccagtctgctttcaagcaaagcccatcatgttaagcaattctagaagagtggctgatagctaatgtgctagaaagcaaccaccaaaaatatcaaaggcctctaactagggtaaacgggtgattccagtattcaaggaaaaagctaattatacttggcatgggttgcatttcttttcagctgctcttagtcaccctatatacaacttcgtaaacaaagatagtcattaacttctggataacaacgtgcttaagaatgtaccgctgtgtgtggtataagctagtgtacctttcagcagactgccaatgaattcttcataatgggatttagcagtacactaagatgatatt

SEQ ID NO: 1255 - DNA, 1304 bp, Homo sapiens
gtcttctaaaatagaaatgagaatctttttctgaggtttccagagctcttgcaaaataatccaatcttaaaattctctgtatcttttaatgtactttaaactaatagaattcattcttgttgaatcttaagtttgccaaagttgcaagctaatattcattgttttccctgtctgcacccttcagtcagttggtcattcttaaattcatacacttgtaacacttggtgttatttcagaatatttagcatgataactgatcattatcatgatcattcattaaacctgtccttgactgacaacgcagaatagttgtgaatagttgtgatctgtcagatgtgctatgttgagttatagctctcctcaaaaaaaaaactgactttgtggaattgggagaggatggaacatttcttcatgcaactatgccctgttatcattgtacttttgtttattttgttttcacagtactgtgtttttcatgtgtgtgtttgttttgtgttgagcctcgtcgtggccgtagcatgtcggtttgtgttcccatctttctgctgttgcctctgtgtcccgcatctctcccagtgctcttccaccccaccgccagtactgtctgcacctctttctccttccctcctccggactgccccgaggaaacttttgccgaaaagctttctaaagcattggagagtgtcctgcctatgcactctgcctctcagcgcaagcaccgacgctccagcctgccttccctctttgtcagtactgtatgtaactgtaaacttctgacaaatgaacaattattaccaatgaatacatccaggcaacaagaattttaattaaaattgaataaagaacaggactaaacttggttatattatgcttctaggataccagttattcctgtaggaaacttttttgtaataaggctttaagggggaataaaaagcaaggaggtaatgagagagaatacctataatgtccttggcacataccagcatgtgtccaataaaatttacctttcattatatcttcctgtttcctatcgacataaaattctttcattttcatattctagttttaaaaggattaattttaaagttattgccttaatcaaaagcaaattttatcaaacattacccaaacattttttctcctcactttattctaaggagacactaataaaactggatgagtcctttttttttttaataaccttagtcagcaaagaataaccttggagtgaacatttattttaatttaatcatttatgtaagatgatgtatcagcaaaccaaagaactacataatgttccc

SEQ ID NO: 1256 - DNA, 1183 bp, Homo sapiens
ggctggagtgcagtggcacgatcctagcttactgcagccttgagctcctgggctcaagtgatcctcccacctcagcctcccgagaagaatgtttaaggacagtttatcgaaaaaagtagatgaggaataaattatgtcaattttgattcacatttaagtgtggtaaggaattaacacagcttttccttaaaaacatttgtttttctaggtgtgctacattgagggtcatcgggtaattaatctggccaatgagatgtttggttacaatggctgggcacactccatcacgcagcagaatgtgggtgagtatgctctccagcagtggggacttctgcactgtccagctcctgctgaaagtctgctgtgggtgaggaggtaaggtaggtggactcagctgccagcaggaggaatggttgtggcccagcggtcagtgtcctcttcaacttgctctctttcccactcctagattttgttgacctcaacaatggcaagttctacgtgggagtctgtgcatttgtgagggtccagctgaaggtgaggggatggagtagacctgctgcccggaaggatcagtgggtggtaggagaaggtgagcaggtagggaagtaggtagctggacggggacccaggctccagagttgtgtctcagccagcgttccctagagtggtggaattcaaatactcttgctcatgtgctccctaaaagaatggaaaaactgttctcttgcacatgttcaagctgacacctaaaagttttcaccatatataaaaattgttgcaaaggatgtattttttggcatatggtaaaatctgacattttaaaatacaataattttaccatcactgataagtgtttggaaactcaactttaggcaaagcaggtccttttgttataacattgatgaaaacaaaaatatgttttgttaataagttgtttcacttcaagtcacagttatttaaggtgttaagtgagcacttaccgtaaatctgttgaatcttgttaaatattccagtggactctaaatactatagaggataagatctatcatttatttgaagaaatacaatgaacaagcttttttttaatcattagaaattttacattgttctttctttatctgaactcatatttctattctatttccccactggttttaatcctaatacatatttatggttgaaa

SEQ ID NO: 1257 - DNA, 1215 bp, Homo sapiens
taaaatatctctaaaatattgtttactatgagtacattatgctgtaatcacattctgaatgcgtgagtacatacatggtagaagggctagatcttctttaagtgggggtaatggaaagtctctgagaagggaaatatttattattggaggatttaatgtgtgatcttttcattacagatatggtgtaagatacttcttcaagattggacagctggggaccttcttctgattaaccttaaaccaacttgtagccatagagacacctcacaaggttcccatttttgttgttgttgttgttgattttctgctcacacctttcctgaccttgcaaccatgtatggaagtgcccgctctgttgggaaggtggagccgagcagccagagccctgggcgttcacccaggcttccacgttcccctcgcttgggtcaccgtcgaaccaacagtacgggagggagttcgggaagcagtgttggaggtggcagtgggaaaaccctttcaatggaaaatatacaatctttaaatgctgcctatgccacctctggccctatgtatctaagtgaccatgaaaatgtgggttcagaaacacctaaaagcaccatgacacttggccgttctgggggacgtctgccttacggtgttcggatgactgctatgggtagtagccccaatatagctagcagtggggttgctagtgacaccatagcatttggagagcatcacctccctcctgtgagtatggcatccactgtacctcactcccttcgtcaggcgagagataacacaatcatggatctgcagacacagctgaaggaagtattaagagaaaatgatctcttgcggaaggatgtggaagtaaaggagagcaaattgagttcttcaatgaatagcatcaagaccttctggagcccagagctgaagaaggaacgagccctgagaaaagatgaagcttccaaaatcaccatttggaaggaacagtacagagttgtacaggaggaaaaccaggtaagttctacgtgtgtttacctttattggctgaattcatgtatataaatgaaatagcctttttttcccctttcctagatttttcccttcgtagtatatgtatcttcctttttcctattgattttactgttttgtgtcctccatttctcagccctttccaaatttggtcctgtaccctgttttcttctagctgcccatgtctccttgctccca

SEQ ID NO: 1258 - DNA, 1301 bp, Homo sapiens
ggtgtgggagttctcagtacctgtgtggagtttgctaacagacctggggtcattcggggtgtgacaggcaggccctctctcctagatccaggtccatttactaatgtccttgcccatccatgcctgcaagaaggaagagatgtctgaactgccaggaggtggtggctacagatggtccctggcacagcaagaaggcagtgccaatcaaaggaggtcggcctcttcaattagaactctgagcagatggggctgaggcagccagaaggggcacttcccagtttactaagtgtgtgacagtaagctggtggccttcagaagaccaggagggtcacctggttcatttcctttctggaaggaagggcagtgtttaggataagtcagatgagattcctcctcattggacagataataagctttattgtgagttaagcaatatgcttggccctacggatatcacattaaacaaaatagacctgaccctgaccttactagtttacaatcacacgatcctgaccttactagtttacaatcacaggatcctgacctgactagtttacaatcacacgaccctgacctgactagtttacaatcacacgaccctgaccttactagtttacaaccacacgaccctgacctgactagtttacaatcacacgaccctgacctgactagtttacaatcacacgaccctgacctgactagtttacaatcacacgatcctgacctgactactttacaatcacacgatcctgaccttactagtttacaatcacacctcctgtttcttgccacttgcacacaactcagggatggggtaggaggaggaatatcataaatgcaaattcctgtgccttacactggagctactagatcagactacctggaggctaagcccaggaatctacatttttaacaagcttcatagttcagccttgcacatattaaattttgagaactggttacttctccatcaatgcatggggtaatcagtcaccttgggcacattggtgtcttaaaaatgacttaaacacataattggaactgttttgctaagtctagcctgtgtctacgttgctagaaaagccctttttccccttattctgatggtatagaagaaaacaactgcttaaatcaaatgaattaatgtgttgattgagctttcattacctgtctagcttcatgctgtttggaaaataaatataaaagctataatcctggcccctgatgagcgtacagggttcttgagttgataaaacacaccagttaaccagttagagatgacgagaagatggtgcaagatt

SEQ ID NO: 1259 - DNA, 1169 bp, Homo sapiens
caataaaatgcgctaccttgttaaaaacagacacggctctcctgactgggcccacaccatcagcctgccccaaagtcactgttggacccaggtgatgaggaaaggggctgcagcttgtttgcctatctcagactcctggctgccaactccccagcatggattttaaatacctgggggccttcctacagccctgaggtggccttaaccagaacacatgaggatggaatgagcaaaaaggcagagaagagaatagggcctgagcacaaggaaccgtcttcaatgggtcgttcattctcattatccttccttgggcccctagacgagggtcccactagccaggcctcagcatcattgctgggcagtcaagaagacctggccccatcctccacagctgctttccagagtcctgggaggcagggggtctagtggcggagaagtcagactcagacagtgcggctccaactgttggctgtttggcctgcacaggctactcacctctttgaacctcctttctcatctctgaaaatgggcatgacgatggtggtaccatccccacaggcctgctatgaggaggagagattgtgtgtgctgagcctatggtgcatgggagatgctcagtaaatgtctgttatgattgtgacgagagagccctttcccattggcttggccccaacttctgttctggccgaggtggatgggagaggtgtcatgggggatcttttttccaatggagataattactgtatttcctttccctgcctccctctctgcctcctctggccctgctcggatctcatccctctcctgggcctgccagacacggcaaacaaggccctgctggccctgttcacggcagagatgctcctgaagatgtacagcctgggcctgcaggcctacttcgtgtccctcttcaaccgctttgactgcttcgtcgtgtgtggcggcatcctggagaccatcctggtggagaccaagatcatgtccccactgggcatctccgtgctcagatgcgtccggctgctgaggattttcaagatcacgaggtactgggctccccctctcactttgaagaggggactcaggaagaagttcttccagagggcaagggaggtggcaaggcctgggtgggaggggggctgttcttcctcaaagggtgtctctgaagttca

SEQ ID NO: 1260 - DNA, 1355 bp, Homo sapiens
ggcctatacaggtatagctttaggacagatgtaggagaatgggtgtatctgtgtaattctgctggaaattaagtgtgtgttttttcacttgggaagtcagcccgtttgctgttcatcttccttgcaggccaaggcagaggcttcctcaggagaccatcccactgacacagagatgaaggaggagcagaagagcaacacggcagggagccagtctcaggtggagacagaagcatagcccctctccaccagccctactcctgcggctgcctgccccccagtctccccactccaccctgttagttttgtaaaaactgaagaattttgagtgaattagacctttatttttctatctggttggatggtggctttaggggaagggggaaaggtgtaggctgggggattgaggtggggaatcattttagctggtgtcagcccctcttcccttcctccattgcacatgaacatatgtccatccatatatattcatcagaatgttaatttattttgctccctctgttaggtccattttctaagggtagaagaggcaagtggtagggatgaggtctgataagaacccagggtggagagggagactcctgggcagccgttttcctcatcctttccctctcccagtccatttccaaatgtggcctccatgtgggtgctagggacatgggaaaaaccactgctatgccatttcttctctctgttcccttcctcacccccgacggtgtggctgatgatgtcttctggtgtcatggtgaccaccccctgttccctgttctggtatttcccctgtcagtttcccctctcggccaggttgtgtcccaaaatcccctcagcctcttctctgcacgttgctgaaggtccaggcttgcctcaagttccatgcttgagcaataaagtggaaacaataaaacctgggtgtcagacaaccctttctgttcagccttggagtggtgggtatgggtgggtacataatgggtagtagcacaatcaaggggtcacccacttagttccagttgagcttaaataagtgagcatctcatgtagatgccatagttgggcaggaagcagccccaccatgcatggcttcctgagcactgcacaggctgccgctgggatttgtgtctatggcttcgcccaaggttcccagcactccctccctccagcaacctggcagttttagtgcctctggttttcttccctgacacttaggaagacgaaagtataaagatctagaagactgggacaccatgcatgttcattttgaagttggaattggtcttctgcctacctctgatctggcagaggtatctgcattttggtttgttaacaaggtaaaactcctggtg

SEQ ID NO: 1261 - DNA, 1198 bp, Homo sapiens
ataggggaccttccttggttcttagctcacagtggaaatcagttgaaggttaaaggcttcagctctgacctctgtgatctgatgatcaggcttgtttccaaaactccctccccagtccatctctactatacctctgtttgtcctagaacctgttggtggcagtgagtgctgaaggctggtttcatttgtttgacctgacacctgccaaggtgttggatgcttctgggcaccacgagacactaatcggagaggagcagcgtccagtcttcaagcagcacatccctgccaacaccaaggtcatgctgatcagcgacatcggtgggcatgcctacctttgcaggcagccaggagagtaggagtcagtggatactagagcatatcccaagggattggggtgagagggagaatccgtattcatgtatgcatttgttatgtgctgagctcccatgataagccaggcatcactcaaggcactggaattgccatagtgaataaatagacaaaaattgctgccctcctgggccttattatgaagaaacagaaaagaaacaatataggctaggtgtgctgcctctcgcctgtgataccaacgctttgggaggctgagatgggaggatcacttgaggccaggagttccaggctgtagtgagctatgatctcaccactgcactccactccagcgtgggaccctgtctctatttaaaaaaggaaaagaaaagaaaaactatacattttgtaagataattaagtagtatattagaaggtagtaagtacacggccagacgtgatggctcatccctataatcccacgactttgggaggccaaggcaggcagatcacttgagttcaggagtttgagaccagcctggcccacacggtgaaactctgtccctactaaaaatacaaaaagtagccaggcatggtggcaggcacctgttatcccagctactcaggagactgaggcaggagaatcgcttgaacccgggagacggatgttgcagtgacccaggatcatgccactgcactctagcctaggcaacagactccgtctccaaaaaaaaaaagaaaataagtgcagccgaccacggtggttcacgcctgtaatcccagcacttcgagagcactttgagaggctaaggcaggcggatcccttaagctcaggtgttcgagaccagcctgaccaacatagtgaaacccc

SEQ ID NO: 1262 - DNA, 1185 bp, Homo sapiens
gggagggggtcccgggccggggccgggggtggggtctggcaccggagctttcagtttgttccgctgtttgaaattggcgccggcggagcgttaaggtcacgtgacggaacgtcgccaatcggcgccggccttgtctcggcattccgggctcgaaggctgtgcggtctgccaggagctgcggccccgtccggcccgggctggtaaggcggaccgcaggccggcttgtgggggaagaagtggccgtggggccggggaggggccggaggggtccccgccgcgtgggtgggcgagccgagggagagtttggggacgcgcggaagcggcgtgacaggcccgggtccctgggcccgcttttcctgccgcgctggtcacgccaggcgacacgcccccgcttcccctcaggctcctctgctccccttttcaaagctcggctttagttgatttcctcactgggggaaatcgtaccccattttcccacagtgaacgatcgtctgctccccccgattagactaagttcctttgagggctgcgtattatctccgctttcttccatcttgaaaaaaaatgtcggcaccatgaaccctacctcagcgcgaaacctgtcttttgcccctcccgaagccaagccttcggatataatagaccgtagtgctttatttattgacttagtcaaccagtctagttgagcaactgctgtgcgccaggcaccgctaggccctgaagatacaatggcagacaaggttctttccttcccctgggctcacagcccaatcctggaagaggggcacagacattttaatcaaataaacaaatgtgggctgggcatagtggctcacgcctgtaatcccagcactttaggaggccgaggcgggtggatcacttgaggtcacgagttcgagaccagcctggcaacatagcgaaaccgcttctctactaaaaattagccgggcgtggtggtgcgtgcctgtagtcccagctactctggaggctgaggtggaaggatcacctgaggccgagaggtggaggctatggtaagccatgatcacaccactgcactccagcctgggcgacagagggagacaccgtctccaaaacaaacaaatgttgaattattgctgtaaattgaaacattagaggttaatgatactttgagtatttacaataacgagatcttgagaggtagga

SEQ ID NO: 1263 - DNA, 1140 bp, Homo sapiens
tcaaaatcctgacctcaagtcatctgctggccttgacctcacaaagtgctggcccagccgagatttgttttctaagatactttgtgtcatgaacagttcagtttagtgtcatgaactattcacttcatatttttcttgtattaactgtttaaatttttaaaatatcttgtagtaactctttaaaatgtatgtaagtaaatggctgcagaaagtttttttagagaatcctgcttccatcagtaatacagcaatattaccccatccactaatggtctttgtttccttaaccactactcattaatccttaatcacctcattcaaactaattcattctgcatttttgagtaccaactcttgtcaggctcagtggcagcttctacgacctgatggatggaaaaaaatcaaactctgtgactctatggttgactgccacctctgcaaccttgactcatctgctgaaaaggcaagaagaagaaagggcagcaagccctgttttagggactacataagatgaggggagataagggggacatagatgagttctttaggattgcgtgtgttttgagtttttgtttctaactgaagaaatctgtcaatattaaatagggtgggaaaatggtttcttagaataactgttcaactgtgtgtaaataaggaaagttttcaatgagtattacttattgtaattaatgcagaaggacttccccagtcaaccgaatgtctcggccttttactcagacaagtagcatctcattaaacccattcatttagcattcattcagctggacctactgtgtcaggtccagccccaactagatcaagcagggattactgtatattttacagatgggagtttgatgcagagaatgaaccatgcacaggtcacacagtgagtgcacgctgacccaggcagtgtaacggtccactctcagcgtgtgcctcctaaagtactaacttgtaggttcaaaaccaatgtggaaacaactttgaccttagaacgccataaagccatttgtgcagtgacttgtcaggactcaggatgttttgtagggactataatgtgcatgtcggtagggagaaagggactgacatttggggacgggatttattggagacaagagtacacatttagacaggggc

SEQ ID NO: 1264 - DNA, 1152 bp, Homo sapiens
aaaaaaaaaaacagcgaaattcattcttagctcaaaggcagtacaaaaactgacggcaggccagatttggcccacacgctatagtttgcagcccctgtgctaaatcataaaagtattttttcctggaaggtcatagttattcatactgtgaatattatttaagagagcattgaagattgtttttatattaaaatggaacccgttaccttatggaataaaacccagaatttaattttcaagataaaacttggaggcgggggccgggcgtggtggctcacgcctgtaatcccagcactttgggaggccaaggtgggcggatcacgaggtcagaagttcgagaccatcctggctaacacagtgaaaccctgtctctactaaaaatacaaaaaattagccgggtgtggtggcaggtgcctgtagtcttagttactcgggaggctgaggcaggagaatggcatgaacccaggaggcggagcttgcagtgagcagagctcatgccactgcactccagcctgggcgacagagcgagactccgtctcaaaaaaaaaacaaacaaaaaaaaaaacaaaaaaaacttggagacggctgtggtggctcacatctgtaatcccagcactttgggaggttgaggcaggcgcgtcacctgagatcacgagttcgagactagcctggccaatgtgttggaaccccgtctctactaaaaatacaaaaaaaataaaaaattaaccaggcgtggtcgcactcctgtgttcccagctacaggggaggctgaggcaggagaatagcttgaacctgggaggaagaggttgtagtgagccgagatcgcgccactgtactccagcctagcgacagagcaagactctgtctcagaaacaaaaacaaaaaaacttggattctaaagatacgttgttctgtagatggtctctggaccgtactttcctcctttctcctcaatttcatttagagcataaaagcactttcttaggctgtttgaagcacttggattggaaatgttgcctgcagtaacctgtataaacatcaatatatcaataacagattattagtgcaaaatttaaatgtccaaaaactgaaagggaataatgatcggtgactgggtctatgaaattacaaaagtaaagcctaagggagatg

SEQ ID NO: 1265 - DNA, 1149 bp, Homo sapiens
gagtggccctgtggagttactgatagtccacgtttgtactgtggtagttctccataatgaaatggacttcagatccgaagatcctaatctactctttgctgtgaagagcacctgccttctggaagtgagaaatgacagcatcctgatgacaagacaggttcccatccctcggcaggtgcatcctgagcatctgtctgcctggggcttgaactgtgccgggtggcatgcaggaagcaaaagcatcctcggaaatgctccgtcgtaaattgcatgacctcatgttggaatgagaggtggggtcacttccagcacttggaggttgaagcaatagttgctgcttatgcaagagaagaagtaagctgtaccagtgcctcccatacctcctcagggcactgccagcccagcacagccagctctcctctcttggcatcagctccctccgactgcacctgccctcacccaatccacagcagccacagcacccacggtgtgcccggcactgtgctaggtgcagcgggagtatggaacggaagccctggttcctgtcctcatggaacttgcagggaaatggactgtgaagctagcagtaacatactgcaagacgaaagaacgtgcacaagcagggtctgtggcagtgcctggtaaaggatgattgattctgtcccaagaggaggaggcagttgagctggctttgagagtgggtggggttctgacaagcgtgtatatgtgtaagagagagggaagcagacagagaggaagagaaacagaactatccttgagaagacagagaaaatgtgatttgagggctattgtcatgaagtgatgagaggaggggaggtaagtgggttttgttttttgcgggttttatttttatttttattttattttattttatcttatttatttttttgacagagtctcgctctgtcgcccaggctggagtgctgtggtgcgatctcggctcactgcaagctccgcctcccgggttcatgccattctcccgcctcagcctcctgagtagctgggactacaggcaccccccaccacacctggctaattttttgtatttttagtagagacggggtttcaccatgttagccaggatggtctcgatctcctgacctcatgatctgcccgccacggcctccc

SEQ ID NO: 1266 - DNA, 1211 bp, Homo sapiens
tgagactcagaggacactgggcaggtggtggggggtaggagggtcgtggctgtgttgggtggggccacatcaggtgtgtggcacagagggggagggggagggggagtggcagtgtgttccacccagcagtccctgtgtttgacctcttcgtacactctctgttgtattagctctcagaatgaaaacgagatacttttccccaatctatgtacgttgttcttaagaatgtacacttggccaggtgcagtggctcacgcctgtaatcccagcactttgggaggccaatgtgggtggatcacctgaggtcaggagttcaagaccagcctggccaacatggcgaaaccccatctctactaaaaatacaaaaatcacctgggtgtggtggtgggcacctgtaatcccagctactagggagactgaggcaggagaattgcttgaacccaggaggtggaggttgcagtgagccgagaccgcgccactgcactccagcctgggcaacaagaacgaaactctgtctcccaaagaaaaaaaaaaaaaaaaaagaacttaaagttaagccaggccagtgattgaattgacctcttacaagtcatgtgatcttggacagacaccctctagggaacttcataatctcatttgtgaaatgggaataaatgctccgacttgggactgccactgggaggaggacaggtcatggtgtgtgaaggagcagggccacccctcgctcacggcgagctcagggaatgtgaaatgtgggtgtgtaaaaatgtcccctgactccgcccttcctgcccctaaaacacacgcacatgcacgcatacttatttttagagaaaaaaagctctaatgtccctcaaagaaggtgaggagaagaccttgagtcttggtttagcgaaaactgccccgtgcaaggttgtgcttttagattttcgtcctcatctgggtgtcaggaaaggggagggagtgttctaaatcggggagataactttgtggcccattaaggggagaaagaggtcccaagggaaggtctagaaaggaaagacagaccgggtgctgtggctcacacctgtaatcccagcactttgggaggctgaggcgggaggatcacttgagcccagcctgggcaacatggcaaaaccccatctctacaaaaaaatagaaaaattagcagggcatggtggcgtgctcttgtagtcccagtgacttgggag

SEQ ID NO: 1267 - DNA, 1150 bp, Homo sapiens
tcctgcccccaggcattgtaaccttttcccccgatgttgatagacctgctctgatgggctgaccaccctaccggctccagccttttcccacctccctttgtcccccgttactgatctcacatggacagtggtggaaatttccctcctgggagttgctgctgagtctcttggcttttcgagaccgcaggcaagtcagtccgtcatctcatctggggaaactgtttgcctttttctgatactacgtagccagtccatttaagtcagctggccaactctgttaaatggatatgaagtgggtacgaagctggtttaggggtgtcctcctataaatcctaactgttggtcaagttgatacctcatttctataatgggcacacgccgtgtttcctaactggggctgcctgtgtgtgcctcattcacaccggtggacctgggttgaacatgttcatatttaaaaaccaagagtgaacgcggtgaaatgtacaattcataacactttttcaaagaaaaatctgagccctcaggaagttccaggcttacctctggcaccccggaggctggttcgctctccctgaaaatgtttttagtggaaaggttcaagcagctctgggctaggctgtgtgtgtgtgtgtgtgtgtgtgtgtttatgcacctttccaagtgctaaatctcctcccatccatcagcctgtgttctctgaaaagctgacgctcagagggaagaaaaataaaaggactagaatttagaacacattagtgtttggagggaggtgagttgtgcttcctgagctctgtttaccatttcacgagtcacgaagtggtgtatttccttcattcgtttctggaagtctttactgaaggcccagttgttgctagaagttggggtggatggtggcatctgggaaatagaggatgagattcctgccttcaaggaacttagcagttgtatgatgaagcaagagtaaagcgtgcaaaaccctagcaaattaagaacgtaaacaaaggtgtgctacgtaacgtgttacgaaccctaaatgcagtaggaaatcaacccaaaagaaggagctcatcaggcctaacgtagaatgccggcctcccagcagagaaaacttggtgatagaaactgttcttagagtagagaaacaaaatgt

SEQ ID NO: 1268 - DNA, 1873 bp, Homo sapiens
tttttttttcttttttggttttttggttttttttttttcctctgatcacattcttcaaagacggagtattctttacctcaggtttactggacaaaatcaataactacaaaaggcaatgattcacgcttttgttttcataatacctcacaaccgtacagtttctgcttgggagcccattcgcatgaggaatacagaagcagtgtgagcagggctgactccctctcaggtggaaggcagggcggtctcactcccagggacctttttggtcatggaggccatcgggctcccagttagaccctggtatcctcatcatgatggaaaaaatacattgaaccaagggatcctccctccccttcaaggcagacgttcagtacaaacatttatgcggtaggctcagatgtcgtaatttgcacttaggtaccaggtgtcaggaaacagactaaaaagaattccaccaggctgtttggagatcctcatcttggagctttttcaaaagcggggcttcatctgcaaagggccctttcatcttgaagtttttcccctccgtctttcccctcccctggcatggacaccttgtgtttaggatcatctctgcaggtttcctaggtctgaatctgcgagtagatgaacctgcagcaagcagcgtttatggtgcttccttctccctcctctgtctcaaactgcgcaggcaagcactatgcaagcccaggccctctgctgagcggtactaaacggtcgggttttcaatcacactgaattggcaggataagaaaaataggtcagataagtatgggatgatagttgaagggaggtgaagaggctgcttctctacagaggtgaaattccagatgagtcagtctcttgggaagtgtgtttagaagggttcaggactttgtgagttagcatgaccctaaaattctaggggatttctggtgggacaatgggtggtgaattctgaagttttggagagggaagtggagcagccagcaagtaagctagccagagttttctcaagagccagctttgctcagcacactctcctgggccccaaggagtcccacggaatggggaaagcgggaaccctggagttcttgggaatcttggagcctaaagagaaaccgaggtgcaaattcatttcatggtgactgacccttgagcttaaacagaagcagcaaatgaaagaaccggacaaataaggaagggcacaagcctacccgactctatttacagtctgtaactttccactcttcctgtagtcccgaggcccctgggtccttctagcttttctctttcccatccttggggccttgtgtgatgatgggtgtggggctgccgatgggaaagtcgggggttgttaggcttttctgcctgctcctgcttaaacacaagaaggaatcctggattttgccctctccttagctcttagtctctttggtaggagttttgttccagaggagctctcccccttggatttgaacttgctctttttgttgttgttgttctttctcttctttttcttacctcccactaaaggggttccaaattatcctggtctttttctaccttgttgtgtttctatctcgtctttacttccatctgtttgtttttttctccatcagtgggggccgagttgttcccccagcctgccaaattttgatccttcccctcttttggccaaatcctagggggaagaaatcctagtatgccaaaaatatatgctaagcataattaaactccatgcgggtccataacagccaagaagcctgcaggagaaagccaagggcagttccctccgcagaacaccccatgcgtgctgagaggcgagctccttgaagaaggggctgttcttccaggaggccttattttgaactgc

SEQ ID NO: 1269 - DNA, 1197 bp, Homo sapiens
cctcataattcgtatgttgaagccttaacaccattgtgaatttatttggagttaggacttttggaggaaattgaggttaaatgaggccataagggtgaggtcgtaattcagtaggattggtgaccttataagaagaggcaaaaagagagatctctctctccctgtgtgcacatactgaggaaaggccatatgtgaggacacagcaagaaatctgctgtctacaagccaggaagagagcccttatcaggaaccaaactggctggcactttgatcttgaatttgccagcctccagaactgtgagaaaatacatttttattgtacaagccacccagtctatggtattttgttatggtagcctgagcagaccaaaatagattttggtaccaagaagtggggtgctgctgtagcaaatacctaaaaatgtgaacgtgcctttggaactatgtaaaggtagaggctagaagagttttgaggtacctggtagaaatatggacgttaagggtgatttttgtaaggtctcagatggaaatgagtaagatgtcattggaaactggaggaaaggtgatccatataataaaatggcaaagaaattggctgatctgtgtgtgttctagtggaaggtagaacttgtgagtgatgaaattgtttattcagctgagaagatttctaagtacaaagtattgaagaaatgccttggttcctcccgactgcttacaacagaatagaaaaagagagaaagaggaaatgaagaaggacttgttaagcaaaaaggaaccggaacctgaagatttggaaaattctcagcttatccatattgcaaaaaatgagaaagcttgttttgaagagaacactaagagtgtggctgaacaaccatttgatgaagagattgtggatgcgactcaccaactaacaagctatcttggcagaagccaggaatagagatgagattacatcagcaaagtcaccaccagtttgaactagaaggggcagaatgaaagaagcctgtctgacttctgatatcctacaggaccagaccacagagctatttggctgtgaatttgagctattcttcaagaaaagggaagaatgaccccaaaaggggttcagagatgtttagaactatctctttggtttcaaaggatggggccattgcctcagtttaaacaccacatggcctttgtcagaggccttggagg

SEQ ID NO: 1270 - DNA, 1401 bp, Homo sapiens
acccaactggtactttaaaaagaactggtgactgtttgtcctaactgtgcatgttagtcctgaaattccaagttataggttcactgataaatgcctctggatattgatatctctactgatgagcatgtacccagcttgccaccgtatttattcagttgaacaatttcacgtgtatttttaaacattcgattccacgggttagatctgatctgttagaaggggctctgcaggctccttcctgtctcacccccacactttctttccctcatagtcactttcgaagtatagatcctggcctcaaagaagatactctgcaattcctgataaaaggtgtttatgggtcagggggtaggggatggaaggtgtttgttatcgtttgtttgtttgtctgtttgtttgtttttcctacattttgtcagccacatgatgatatcaaggctgttgtgattcagttggtttggctaagcccagggacctttggcctgttaaaggtctgtaatcttggtgggcgatacagagttatgtgtgttcactgtaagggcagaccaacaagaactttttcctacttttgagctacctctttttaataggggtgattcttccagttgctggagagaaattgtggtaactggagtgagagagtaggaacagggcatgttcagggtatcagggccaagggtcctaaaggacttagcttgtgttatggccactgagagatgaaacacagatctttggtaatctgatggctgcaagtgctgggtgttttgaagttggggtatatgaaagaagtgagtgaaactgactccaagattctgcccctcacagtggtatcccgccactcccaggagcttccagctatcctggatgatacaactttgagtggatcagatagaaacgcccatctaaatgccctcaaaatgaactgttatgctctgatacgtctcctggaatcctttgagaccatggccagccagacaaaccttgtggacctggaccttggtgggaaggtaatttggagttttgggctcacgttatatggggtctggggagataggggaatagatggaaaagaagggaatccaatgatccacaaatcctttctgtcctcattgagaatttaggagaaagaactcaaaagtgtcacacgttttcttcctggacaagtagcgctgtggaacttgtaatatttcttccgtattaccttctatgttgtcttggtactagattgtttgggcactcagactgacagatcttgacccacttttttcccttattttttcctcaatgtatacatgatcctttttagggtaagaaagctcggaccaaggcagcccatggctttgactgggaagaagagaggcaaccaattcttcagcttttaacacagctacttcagttgga

SEQ ID NO: 1271 - DNA, 1401 bp, Homo sapiens; identical to SEQ ID NO: 1270

SEQ ID NO: 1272 - DNA, 1149 bp, Homo sapiens
aaagaggaatccagtgttgaagataaatatctgccccaaagaggtctagaattcacatttttattatcagtagtaaaagtcttcctctaccaaggacgaggatatctggctccctttaaggactgtaatgtgtcttaccactacaaggagtactcctaatctatattctgtagaaagggtttttagagtgagtgggtagctcagtttagagtatacttaaagatcatcttgaacaaaatggatgatgtgggacttgagcagattcttctcttcctaccctacacaggctctccccctgacacgtttccaggcagtggtggctttagctgtgggacgtctggcagacaagtcagtgctagtatgtaaaaatgccatccagctgctggccagttttctagccaataatcctttctcctgcaaggtaagtagacttggtccaccaaaagagaaggaattaaatggaaacagggatgaaattatgtcatttactgaccctgctattcattttacctgatagcttagtgatgctgaccttgccggaccactgcagaaggagacccagaaattacaagagatgagggcccagaggcgaactgcagcagcttgtaagtagttactgccttggagtcctaatgccagacaggcttctccttgcagtcagaaactctagtgaaagagactaagtgacactctcatttagctgcagtgctggacccagaggaggagtgggaagccatgctgccagagttgaagtctaccctgcagcagcttctacagcttccccagggagaggaggagattcctgagcaaattgccaatacagagacaactgaagatgtgaaaggacgcatctatcaactgcttgccaaagctagttacaagtaggcaaaagaatgggatattcttcgtgatctgtttatgtttagagttaacctttgagaaacttacataatgtgtcttttaaattaactgcacacagatatgctgccaccaggtgatggtagatgttttcatgtagtaatggtctgaccataggcctagtccacaattaagcatgtgtttctactttataaatgtttaaaaaaactactgaaacaattaaatgttaacagtattataatcaaacatgagtcctccttcaattgaaga

SEQ ID NO: 1273 - DNA, 1354 bp, Homo sapiens
agccaaaagggtcatcatctctgccccctctgctgatgcccccatgttcgtcatgggtgtgaaccatgagaagtatgacaacagcctcaagatcatcaggtgaggaaggcagggcccgtggagaagcggccagcctggcaccctatggacacgctcccctgacttgcgccccgctccctctttctttgcagcaatgcctcctgcaccaccaactgcttagcacccctggccaaggtcatccatgacaactttggtatcgtggaaggactcatggtatgagagctggggaatgggactgaggctcccacctttctcatccaagactggctcctccctgccggggctgcgtgcaaccctggggttgggggttctggggactggctttcccataatttcctttcaaggtggggagggaggtagaggggtgatgtggggagtacgctgcagggcctcactccttttgcagaccacagtccatgccatcactgccacccagaagactgtggatggcccctccgggaaactgtggcgtgatggccgcggggctctccagaacatcatccctgcctctactggcgctgccaaggctgtgggcaaggtcatccctgagctgaacgggaagctcactggcatggccttccgtgtccccactgccaacgtgtcagtggtggacctgacctgccgtctagaaaaacctgccaaatatgatgacatcaagaaggtggtgaagcaggcgtcggagggccccctcaagggcatcctgggctacactgagcaccaggtggtctcctctgacttcaacagcgacacccactcctccacctttgacgctggggctggcattgccctcaacgaccactttgtcaagctcatttcctggtatgtggctggggccagagactggctcttaaaaagtgcagggtctggcgccctctggtggctggctcagaaaaagggccctgacaactcttttcatcttctaggtatgacaacgaatttggctacagcaacagggtggtggacctcatggcccacatggcctccaaggagtaagacccctggaccaccagccccagcaagagcacaagaggaagagagagaccctcactgctggggagtccctgccacactcagtcccccaccacactgaatctcccctcctcacagttgccatgtagaccccttgaagaggggaggggcctagggagccgcaccttgtcatgtaccatcaataaagtaccctgtgctcaaccagttacttgtcctgtcttattctagggtctggggcagaggggagggaagctgggcttgtgtcaaggtgagacattcttgctggggagggacctggtatgtt

SEQ ID NO: 1274 - DNA, 1209 bp, Homo sapiens
cgggggaaatgattttgagatgattcaaacattacatttattgtgtactttattactatttttaaaaattattattattatttttagagacagagttttgctcttgttgcccaggctggagtgcaatggcgcaatcttggctcactgcagcctccgcctcccgggctcaagcaattctcctgcctcagcctcccaagtagctgggattacgggcatgtgccaccacgcctggctaattttgtatttttagtagagatggggtttctccatgttggtcaagctggtctcgaactcccgacctcaggtgatccaccacctcggcctcccaaagtgctgggattacaggcatgagccaccgcacccggcctgtgcactttatttctattattattacattataatatataatgaaataattatacatctcaccataatgtagaatcagtgggagccatgaacttgttttccgcaactagacggtcccatctgggggtgatgggagatagtgacagatcatcaggcattagattctcataaggagcacacagcctagatccctcgcatgcacagttcacgtaaggtagggttcaggatcctgtgagaatctaatgccgccgcggatctgacaggaggtggagctcaggctgtaatgccagtgatggggagcagctgtaaatacagatgaagcttcactcacttgcccactgctcacctcctgctatttggcctggttcctaacaggccacagacaggtactggtccgtggcctggggtttggggacttctgcattaggggaaccgttaggaggacttgctgacctcaggagtacccaaggtgcctttatctttgtgacctttgatctctcagggtcactaagatggagcaaggtaaagccaaggcccagagtggtgggcgggaggcagttcttccccaccgctcctcacctctctctgtctcctcccgtcccacccccaagtctgttcacacagcgagcctgcagttttcaaggtggcttgtcaaggacatctcctgacatgcacgttcacctcctgaccttgttcctgctgtaaatttgtgaattaagtggggacatagacatatgcagagactactggtggcagtactagccttgtatttcagtagaatatatttggttcatttccttcttcccagtctccctgagtgatggttccagaacccagctccct

SEQ ID NO: 1275 - DNA, 1092 bp, Homo sapiens
gacaccacctcttcctgcagaaccattctggagcttgtaactttgctgtatgtccctagctttacatactgggtgggtggcctatcagtgaattcccttgagattgggtggattcctatcatctggaattctgactcctcgggtctccttctctaggtagcccagcagcagtgaagatgcagactgataccacctccaccgctgagcagtgaccttcctcactttctcttgtcccagcttctcccctgggggcctgagagaccctcaccttccttctgcccatcttccatgttgtaaaggaacagccccagtgcactgggggaggggagggagtgaggggcagtggtgcccttcctgcagaagagacatgcagcagtagcgctggcgccatctgcaggagctggcgggctggccttctggaccctggcttctccccactgtaacgcctgttacacacaaactgttgtgggttcctgccaggcttgaagaaaatgatctgaattttttcctccttttggttttattttgttggtttattttgtgttttcttttctcctttttggggggtattcagagtgggctgggcccctgggcgagacacagctacctctgttggcatctttttaataccaggaacccagcggctctagccactgagcggctaaatgaaataaagtggaaaaaaaaaaaaaggaaaaaaccaaaagcataaaaaaccacagcaaatttcttgatgaaaattgaaaataaaagtttccttgtattttagtgctctggttcagtgtgggtgtaggtgcaggtggatgagtgtgtgcggcaggagcctggcacctgtatagttgaaaattaagggctacgtggtgtcctgataccccactgagtaactgggttctgtgtgtgggtgcagtatgtgccttgccaacgttgacttccacctgtggaaaatgagaggctgcaaaactgcgggcaccgccgcttaatggctctgtgaccttgagcaagttgtttaactttggtgggatgcagatatctcatgtatacctcatacggttgtcaagttaaaccagtgaagtacatggaacggttttaaca

SEQ ID NO: 1276 - DNA, 1302 bp, Homo sapiens
ccgagaaggcctgtctcgccagcatgtccttactagaattggtgttatgtctttgattcgcaagaaggtgagccctgagcctcttgccattgtttctagggggccaggcgcagtggctcacacctgtaatcccagcactttgggaggctgaggcgggtggatcacttgaggtcaggagttagagactagcctggtcaacatggcgaaaccccatctctactaaaaatacaaaaattagctgcacgtggtggcgggcacctgtattcccagctactcagaaggctgaggcaggagaattgcttgaacccgggaggcggagactggaaggccaataggaaaggagcctgtagctggaattgggtcttcaacttcttgtcccattgctacaggttcaggagtttgaacatgttaatgggcgctggagcatgcctgaactggctgaggtggaggaaaacaagaagatgtcccagccagggtcaccctccccaaaaactcctacaccctccactccaggggacacgcagcccaacactcctgcacctgtcccacctgctggtaagtctgcctgtcctatcattttctgtccctctctttttgtcctggcctatttttctgctcccctgtgctcagttctaacagggtagtctggcaggacacacagcaattccctctcagtttaggagggccgtcctaagaatagggctggctcttaaaggcacgagaggacaatttaagatgagacaaactgggaagaaatgaccttctctctgatctagtaccttcttcctaattgattgtcttttattgttctgcagaagatgggataaaaatagaggaaaatagcctcaaagaagaagagagcatagaaggagaaaaggaggttaaatctacagcccctgagactgccattgaggtaagagatggggtgactgaatgccatactaaagacaaatgtgtaagtccagtcttccttttagttgctggcctgtctgcttcatctgttttgtttttgtttttttttcctttgaagtgtacacaggcccctgcccctgcctcagaggatgaaaaggtcgttgttgaaccccctgagggagaggagaaagtggaaaaggcagaggtgaaggagagaacagaggaacctatggagacagagcccaaaggtaaaggtatccacattttttttgtttgtttgtttgttttgagacagtgtagtgctgccgccaggctggagtgctgtggcgcgatcttggcttactgcaacctccacctcccaggttcgagcgattctcctgcctcaccctc

SEQ ID NO: 1277 - DNA, 1302 bp, Homo sapiens; identical to SEQ ID NO: 1276

SEQ ID NO: 1278 - DNA, 1181 bp, Homo sapiens
gaatgagtcttggattttggagggaaatttgggaatctgaatgtggggaagcaagcttaggtggagaagattttattttccccatctttggtcttgtggtatatatttggatatatcctgattttaggtcccaatgctcggaggaagcccaagggcagccctcgtgtacctgatgccaagaagcctaaacccaagaaagtagctcccctgaaaatcaagctgggaggttttggttccaagcgtaagagatcctcggtgagagcccagcccatcgctttagggagggtgccatgtctaatagaaaggatgtgaccttctatcagaacctgtccttcatagtaggcacgtaagaatgtggggcgtttcccacagaacaagatgagactaggctccctgtataacggtgcttgctgggattctggtgtccccagtgagagagtactcccctctctgccactctgtccttccccttggcttgaacgtctaaccttattctttttcatcctgccagagtgaggatgatgacttagatgtggaatctgacttcgatgatgccagtatcaatagctattctgtttctgatggttccaccagccgtagtagccgcagccgcaagaaactccgaaccactaaaaagaaaaagaaaggtgtgtttctcttctgtatatttgtgatgggatgaggtgggagtgattggggaagaatctccctaaggagataggggtcggggggtggggggaggtagtttttttccaataactgggctttccctcttccttgcccaggcgaggaggaggtgactgctgtggatggttatgagacagaccaccaggactattgcgaggtgtgccagcaaggcggtgagatcatcctgtgtgatacctgtccccgtgcttaccacatggtctgcctggatcccgacatggagaaggctcccgagggcaagtggagctgcccacactgcgtgagtgtctggccattgtggccccttggaacccatgagaagaagggtgggacagtaaagctcttcggggcctggatggaaatggaaatgctggtgctgcgggttgtgagctttgggaagcattcaaaggaatgatgggcactggcttcagactgcggtgggcgggtgggggtaataatctgaatctgtggtcctttactgcaggagaaggaaggca

SEQ ID NO: 1279 - DNA, 1212 bp, Homo sapiens
agtgttcctttgacctgaccccgtataagacggcggagcatcataaggacatctgcctcactgtcaccaccagcaccatccaggtggagcacctggccagctcttagagatccgtgctgccacccactgggaagaggaagaagtagtcctggtgtcttctttctccaactcttggtgggaaaagtccttttcttccttgacaggccttggctccatctccttgggcctctgtcacggctttccttcacaggataccatcctttttctgaactcttcttcaaaaggaacatcagccctcctgattgcaaaggaatactgagctgatggtgtcatccagcagcctcccctcccaagcaaagcttctaaaactgggggtcggtgctcaagggaaggatttgctatgacctcatagaaccttgtccagtgtggccacttaccctatccttaccctccttatcctcaaagtttgggctgatgtaagactagaggctggccctcccagataacagagaaaagggagccccaaatgcaaccagcctcttgttctattcttgcctgcaaaagaacagaggtttctcaaatgcctcagtccctgagagccatttcttcccctacatcgtctcactttgcttcctattgactgctggtagaaggagatttggggtaggggctagacctccttttatttgaagggggcaagggctgagatgtggtccccaaggggccagaaattcccaagttggtcacaggtggcttagaagtgtgtgttatggttttacggatttccttgaagcctctctccttctctgcctacaaagaccctatactctcagtctccccaacccacccccaaggagctgtgggaggctttgtgttatctgtgaaactccaaaacaggggtgttgcggagaagggagagttcaaggcaaacgcaaggactggacttagctccctaggtgccacagtcagatgccggacacggatttatatataaatatatatatataaatatattatactcactcatcacggccatctttgttgtaaccatttctgtgtttataaatgcattatctctgagaattttcatatttgatgttttgtttatttttgtcctttttttccctctctccacccctgtcctctagccacagcatttttctttttgtcttttttttttttttttaaatcatggcagatttcagaggaaag

SEQ ID NO: 1280 - DNA, 1304 bp, Homo sapiens
ggcaaagtctgggctcaaaggagagcagagtcagggtgggtttgaagacctgaagcagggctgagggcgaccacgggggctctgccagagcttcctgcccttccccaatgacccatttctggctcctcagatgaggaagaagaagaagaggatgatgaagggcccgcgctgaagagagctgccgaagaggaggtttgggctgggttgctgggcctgaggggctgtcagggatgcagccgggctgggcgccctttggatttggacccagatccctgtgtggcaggggtgggggctggaacaggaccgggacagggggaggtctcccctcccattttacagctcccccattctctccctctccacaggatgaagcggatcccaaacggcagaagacagaaaatggggcatcggcgtgagcccctgccaacaggctggggttgggaggcctctctgggcctggaggtgggggtgggggcagccaagtccagccactcttcacctggctccctgctctgggccctgcaccagagctgccaccctcttctttctccccagccttctcatttccgcctctccagacactgcgccctccaccctcactctgccattgttccacctcctgacctgctccatctgagctctccagctggcccccaattgctcctctctctctttgctctctttctccctcccctaccagcctcattcttcctccggtagcctctcccacctaacctctgcatcccccagcctcatgtcctgccccatccctatcctgcctgatccctggatctccctcagatcccctcttctcagacagcgccaggccggggtggggccggggttggggccgagccccacagctgcccccctcccctccctttttgtataatttaataaagaaatggtcgcgcttctgtttttaacctgtctcctgctttcccgggggctccagtcagtgcgacaaaagggtagagagggaggagggtggctgacctcccattctgccaggacccttccctttgatacaaaagcagcagcacactcctaccacccacgactcaagaagacaagatcagccctccaggggtggcctggagcccagctcttctgagagctgacttatgtcctgttttggattctcagggatgctcctccccagcaatacacacttccctgctaacccacacaagacctagacactgctgagcccagtggaaagctaccagctctattgtgctgaaccaggcacagagaaacagcccagaaacaggaagtccttcccctgagctgggagagggctg

SEQ ID NO: 1281 - DNA, 1199 bp, Homo sapiens
ccagctgcactccagcttggcgacagagcaagactccgtctcaaaaacaaaaaacaaagccggttatgaagcgggggtggggtgggctagttttaataggtccaggcgattagtacctggcatccttaaccacctacagtttgagaagggagtgggtgataaaagcctggaagggaagggaaatcgggccgggcattaggctccatcgctcatcaatagacaaggcctttaggaaactgcgacaacggcttttgctctgggcctttactgccgaatccaggtctccgggcttaacaacaacgaaggggctgtgactggctgctttctcaaccaatcagcaccgaactcatttgcatgggctgagaacaaatgttcgcgaactctagaaatgaatgacttaagtaagttccttagaatattatttttcctactgaaagttaccacatgcgtcgttgtttatacagtaataggaacaagaaaaaagtcacctaagctcaccctcatcaattgtggagttcctttatatcccatcttctctccaaacacatacgcagcagtgttacagctcttttagaatttgtctagtaggctttctggctttttaccggaaagcccctcttatgatgtttgttgccaatgatagattgttttcactgtgcaaaaattatgggtagttttggtggtcttgatgcagttgtaagcttggggtatgaaggtttgggccacgcctgggcgcttccggctgcgccggatgctgtttcctttccgctcccaggggcgttgggaacggttgtaggacgtggctctttattcgtgagttttccatttacctccgctgaacctagagcttcagacgccctatggcgtccgcctcgacccaaccggcggccttgagcgctgagcaagcaaagggtgagaatcgtcctagtcaaggcataggctgctggcctggggtagtcaaggcatgggctgctggtctggggaggatgcgggcggaggatgtggggcgacaaacctggctacgtccgccgggaaaatggggtaggggacgccgggtaccgtccttctaagtggggcgcttgcccccaagacttgggatcttattgggttacctacagcctcaatccactaattccttgcgctctccgctgggcccgctgtctgttctccgacgcctacccgggacgcctccctgggat

SEQ ID NO: 1282 - DNA, 1100 bp, Homo sapiens
gctgtcaaccctgtttatcttttctcttgggagcaaaggagggttcaaagctgagtggggcctgaagctgtcaattaacatgtgcatttctcttctctgtttcttgttcatctggcgatctggcaccacaggggaaggtaagctgttgttgcttctgtggggtcctgcaggccaccttctccagtacccgcctcctaccctaccccctttcccacctccccgaagacaaaccctcaatcagggtaggagggtcgtagagggaatggcctagagtgtcctgcctctcacatttatgtcccctaataatgtcattatctatcttttttttcctacagtgacagcctcatcaagggtaagaaatgagcctagtcaccaagaactccacccccagaggaagtggatctgcttctccagtttttgaggagccagccaggggtccagcacagccctaccccgccccagtatcatgcgatggtcccccacaccggttccctgaacccctcttggattaaggaagactgaagactagccccttttctggggaattactttcctcctccctgtgttaactggggctgttggggacagtgcgtgatttctcagtgatttcctacagtgttgttccctccctcaaggctgggaggagataaacaccaacccaggaattctcaataaatttttattacttaacctgaagtcaaggcttcacgtgttcatgaactgggtaactggcagcaagcatgcgcacgttcacatgtgcgctcctgggtctgtctttgtgtgtgccagcagggggcgcaaaagaatctggctggggcggctaaggggaagcaaggcctgggctccgaaacaggacccaagctgggaaggctggccctgagttctcgaggcccagctgtgctcttcacacaccctccatttctcccacatcacccatttttttaaggctggacagccatggctttgctgagccagattaaaaatctgatgaccccaacaggagctgcttccttggcagcagggttccttgtggctgtggggagcctgcctgtgcctgttgaggcacttctgtgcccagaagcccagtggatcgcgtggcc

SEQ ID NO: 1283 - DNA, 1223 bp, Homo sapiens
aagctaaggcagtgcatgttgtattgagagtgaagggttaggggtcgcaaccttcctttcagctccccagtcccctcaaaccacccctcccttcccctcttcacccctgccctcaggtatccctgttgatccgccgggagctgacagagagggccaaggacttcagcctcatcctggatgatgtggccatcacagagctgagctttagccgagagtacacagctgctgtagaagccaaacaagtgggtgagtcgcaagagccgtggggtgagggcttctgagatgcaggaggaggaaagactccatgggtggggctcctgacccaggacagggtctccctgactctctcccaccacagcccagcaggaggcccagcgggcccaattcttggtagaaaaagcaaagcaggaacagcggcagaaaattgtgcaggccgagggtgaggccgaggctgccaagatgatatccttctgctggagagatctcagcccagcccctagggcacctgagttccccattctccttcatgggcaggctgatgagactaaggcgaatgcgactccgtgctctctggcccttggctccttgttgggggtggggactacagatgagatctgaaatcttagtggtagtacctgagccatgactccccactgtaaggccagatcaatagcattggtggccttgccttcatttctggtgctgcccctagttcctggcagcagcctgcagggaggcccacaggtggggtccacggtagggctgggcacaagccacctgagcgcaaccttggatctgacagcccagaggaggactggagcaagggagtgtggtaaggacagggccagggattgagacctgcccttgcgtgtaccttaaccctcctcaccttggagaagcactgagcaagaaccctggctacatcaaacttcgcaagattcgagcagcccagaatatctccaagacggtgagtgtgtcagcccagcgtctctgatggggctgccttgagaaagtgctttcagttaaggcacattgaggtgagggaattcgaaccttgcttgttccggtttctactcagattggcttctctggccggcgcggtggctcacgcatgtaatccccgcactttgggaggccaaggtgggtggatcacctgaggtcaggagttcgagaccagcctggccaacatggtgaaaccccatctctactaaaaatacaaaaga

SEQ ID NO: 1284 - DNA, 1223 bp, Homo sapiens; identical to SEQ ID NO: 1283

SEQ ID NO: 1285 - DNA, 1176 bp, Homo sapiens
acttctccacttcctgtcccaaactaccttgactgtctccagactggccccttccagcaccacaataaactacggcctccgatcttgtttcctgcccctagtcggggccgcttgggtggcagagcatcccagtcctgtgcctgctccccaccgcttcgttcacgaggcttgaatccatcactgggcgcggccatcttgcaacaataccggaagttgcgctaacgctcttaaataagaacagcgcggcttctaatcacaaatttccttccggctgccattttgaaagtgggccaggaaatggagatgacttgctgtcttgcgctgccctccctgggagggcagccttccagaaaggggcgggacttccgtatgcgcgattcctgtgcgcgaagttcgggtccgtagtgggctaagggggagggtttcaaagggagcgcacttccgctgccctttctttcgccagccttacgggcccgaaccctcgtgtgaagggtgcagtacctaagccggagcggggtagaggcgggccggcacccccttctgacctccagtgccgccggcctcaagatcagacatggcccagaacttgaaggacttggcgggacggctgcccgccgggccccggggcatgggcacggccctgaagctgttgctgggggccggcgccgtggcctacggtgtgcgcgaatctgtgttcaccggtgagcaacctccgcctgctcgccggacgcttccagtccctcccccaaaccccttgccctgtccccgcgcccctccacgggcctagcatttcctctgagcagcggcctggcctgatcaccacccatctccccacagtggaaggcgggcacagagccatcttcttcaatcggatcggtggagtgcagcaggacactatcctggccgagggccttcacttcaggtaatggcgggcagagcctgctgaccctgacctttcacccttgacgccgacccagcagtggctatagtcggacgtgcaacaggattcaacgctgctcttttcccaccctcctcatccctgcccctaggatagtgggtgctgcgagaacctccagcagcatacaaactgttgttttccagagggacaagagaatctctccttgtctgtggtcgtggagaggagcaggccaaaaaacgcgtggtgaggggaaaccg

SEQ ID NO: 1286 - DNA, 1197 bp, Homo sapiens
aacatctggagcaccctgcgtttggcattgtctatgttaggccagagcgatgcctatggggcagccgacgcgcgggatctgtccaccctcctaactatgtttggcctgccccagtgacagtgggacgggctgccctgtgagtgtccacctggagggatccccgctttggatgtgattccctctccccaaatgggcctaccaagggggcgggctgatgaccataagcggtacggcctttcaggagctgcctcaacgtaggggtgggtagtctgtgttctagttcctacataattgtaggaaaatgagctgtgtcatctctgagtcccttggtaattcaagggctgtacatccagctacagatctctctgctcatcatgccctttcttggtgctgctttttgggtaggaccccacgatttagggtaactgttatcatcagctgccatttctgatagggtctaccacatctgtaatgtctgtcctttcccccacttttactgggaattgatagtccagcttccttgggcagtgtaagtaggaggttcatctgctgtgcgcctctaatgtctgtctggatgggatgtgttaggagttggcctgttgggttgaattgttgatttggctgagcagagctgagttttggtaggagtgctcatggttctgtcattcttggacctctcctggctgagctctgattccctgtgagcacgatgctgatgcaatagtcctgtgtcatcactgcagcggtcctcaggagctgccagggccaattgctacagagtgtctgggtgtgtggcataggaggaaggtttgcttgtgaaatgaggctgggtgggagcggggagggactagatcagaagagatcaagggctctattcaggaacgttggtgggaggacagagcaagtgggaagggggtatggtgagtgcggcaatccctcatcctcttagaagcacctgtgaatgggaattgagccaactgttatagaaaattggttcagaaagtgcaatcttgccagatttctagcaaataggttcagtgttaccataagcctttgctgtacttcttgaaatgtttctaggggagagcattggaaaatccccttcccccatctagatcgaaggaagatgagggagcagcttggattcttctcagttgtcccctgcatggggagatacactaacccccagaaatgact

SEQ ID NO: 1287 - DNA, 1180 bp, Homo sapiens
ccctttggcaaggatgttcggctggtctccctcggctcccggcaggtaaacagtagccagtatttccaccaggggccatcctgctcctttccccacaactttgtcctgctcgtccaggcctgggagacgctgggtctgtgacaggctgaaccgtgtgaggagcagccccctccctggcctggccggcccatcactggaaggcaaaggagaggtggcgggggcaggtccacgtgtgttggtaggatgtcatttagctggcaccatctctttgcctctttctttctcctttgttgcagaacctttgtgtaaatgaagacgtgagaagcctaggttctgtgcagcttatcaacgaccgctgcgtggacatgcagagaagcaggcacggtagccaccgggaccatggtgtagccgcaggtggtctggagagagtgaggcaggggtggcagtgactgaagaccattcagtgtctttcatagaaagaatggcagaggagaccccagttccttcctgagtcccctctccttgggaaaaagtgttcctactctctgggtgagcgtctggtccgaatcgttggcttggagatgattttacgggctctttctggagaacaaaagtaaaaccttagtgttccgatgagacacagtaggcagtacttgggagggtcttatagaccccaccctgtggaagtgggtctcaacattacacaaccccctctcgggcccgtggacagttgctgtcttctctgttttctctctttgtgcctgtgccaccctcagagaagaagaaaggagctgaggaggagaagccaaagaggaggaggcaggagaagcaggcagcctgccccttctacaaccacgagcagatgggccttctccgggatgaggccctggcagaggtgaaggacatggagcagctgctggcccttgggaaggaggcccgggcctgtccctattacaggagccgccttgccatccctgcagccaaggtgagggccctgcagggccagaaagccgctcttggctctcactgtggtctaggccatgaggggcgtcctcatcacactgtagtttgggggatgccccccaccgtggtcaggttgatggcaccttaacccattctctcctgatgcgtgagttggaggaggcgcgtgggatcccttggggtctccaggcagcagggc

SEQ ID NO: 1288 - DNA, 1293 bp, Homo sapiens
cttcagttttcggcccctccctggctcttaccaggtcacgtgatccctccagacaacatcctgccccttgtcatctgcagcggggtctccaaccagccgctagaattcacgttccagaagagagacctgcctcagatggtcagtcccagccagctcgctgcaccacagcctggcctccggcagcaaagggttttctggggcaggggcgctctggcccaccctgagtgttttcaggtgttggggaaattgcacagggacacccacttagagccacacagaatgagcggcgtcgatctagatgcttatggaggaaggtctgagcttccccgcccctcacgccttaggctgcgaaatatgtattcataaaacctccaggcatcctctgaggacgcctcactcagcagaaagctgctagttccctttggctctcttgccctttggttatatctgcccctgccgggggcagggatgtggggcttgggggcatctcctgtggtgtgcctggggtgtgcagcccctgattgtcattgtggtgcccatcaggaccctggacagaagaagggacgactcagtgccagggcaatagggaggccccccagggacgctagtgctgtgacatgtgtcggaaaggcgcagtcagcagcagtggctgggtgtgtttggtgggaggtggcacctaccaccccgtggttcccacccaggggagccaagtcctcttctttggctgtagtcctgccgagggtctctcctcagttttgagtctcaaggtgaagacgcggtttgcgggtggctgaggggttgctccatgggggctccctccctccctcccttccttccttccttccttccttccttccttagatggacgaggtgggtcgcatcctctgtaacctgtgcggtgtggtttctggaggggtggtctgtttcttcccctcctacgagtacctgcgccaggtccatgcccactgggagaagggtggcctgctgggccgtctggctgccaggaagaaggtgagtggcctgtcggcagccttcccacttgtgaggacagtgccactgagtcctcctgggagctcttgtgctcatcgggtcaggacaggcttctggctcctcatccccaccactcccagtccctgactacagaggatttccccaaagtccctggctgtgaggttctccagtcccctggccagaaaacacaaggccacgagcagacccgagacctggcaccctgaacctgtctctgggaaatgtcctctgtctttctcagatattccaggaacctaagagcgc

SEQ ID NO: 1289 - DNA, 1147 bp, Homo sapiens
ttgttgctgccaaaataggagaagtttcactcagtacctttgtgctggacagagaatcatatgagcccatgaatagggattgtcctcttggtacctcctagactaacataggtttcaacacattctaggaaaataacagtatctcaagtctttcccattgaggaatattcttcctggtctagcattgcttctactttgacagttgtatatttgctaatttatgttctttaaagaggttacacattgcttttgcgattgacattactagacaagaaagcaaaactcaggttgtatgagcaaacaagccatatatgtttaaatcaggatgtgaagtaccttgctcactttgtttaaaacctagatctgtttttaaaatcacagtgggaattcttagtatgttctgccagtcttatactctagcagtccaaggctgttttttgagttagtgtatattctttttaattttgaggccatctttttattttcttctcagggtgcagaagctgccaatgtgactggcccggatggagttcctgtggaagggagtcgttacgctgcagatcggcgccgttacagacgtggctactatggaaggcgccgtggccctccccggaatgtacgttgtctctgttacttaaccagtgattgagaaattgttcatgcatggaattaagtgtatgtacttggagcagataaatgccttgtcttctcctggagacaaatgatttaagtgatttttattttttctttagaggaaatttttatcttattttttaaaatgtgtattattgatttccataggtttttgggaaaccggtggtgattagttacatgaataagttctttagtggtgatttctgagattttggtgcacccatcactggagcagtatacacggtactcttaaggggaaattttagcgctcagaacttttccagagccgctggtctcattagacacttgccattcagaagttgtatcagttaggatatatttggctacaagtaatagacatttaattatcttttaacaggaagacttaagggagacagtgctgaggttttttttaacaaggtttctcttcatttggctcttttttctggccagaacctagtcacagacattcactggcaaaggggaatggatt

SEQ ID NO: 1290 - DNA, 1130 bp, Homo sapiens
gtgaattatatatttgtattatgatattttctagttgattatcatataaaaatggcatttcatttcaaaaaattgagttagtaaccagctactttactaaaatgtttttaacgtaatacctgatattaaagtgatgacatttatatggaaggccaattcaagacaaaaatggcagggacatgtggaaattgagacaagaaccgatgtgaaacaatgtgtggtgatgtctggtatgactgctggcagccacttcacagtgaggtgagagagacagcatggtggtcatcagatgcatgcacttgactcccagaacttttccagaagggctacaaagggaaaccacagctggcattagtccatggaagagagagagaggagggagaatgtatctgctcagctgtcgttagtcttctgtttccccttggccagggtttccctgagttagaactaccatctctgttgttctgtcttacatcatccagtcccttggtggtggtcatgaaagtcagacctcatgcccacagtgtggtgatgcattcaagtcccaaatggaaggatgatctggatcaggcaaggtgctgaccaggggaacaggagatagtgaagggaatctgagaaagcacatgtttgtgtccaataccaccactccttgtgccactgagacgtgctcataccctccagtcatggctggctttatgagcatatgacttgcacagttgtacagggttttgtgcttataggggcttgtgcttagagtgactctatgcttggattaatgttctgcacttgctgtttggcttttcagacagagtatacttcagcattccctctgctgaagagggaatggtcttacactggtcttacactgattccatagggatttgctctcccctctcctacaggcttgtcagagacatgcacagagtcctataatgcccactatgcatgcctctagcagctttgaattccgctggatcatctggcacagtggccagagcagcctggaccagagcctatatcttctgtagagccctctttagttctgggctccatttgagaccagtagcctttagaaacatcgttcgtgagtcagagcaatattctcaaatgtggaatatgttgtctccaaa

SEQ ID NO: 1291 - DNA, 1153 bp, Homo sapiens
ttgcatacaagtctttgtattgacatatgtttttgtttctcttgagtaaatacctagatgtggaataaacagtatctagctattgccttggattgtatagtaggttgtatgtttaaccttttaggaaactgccaaactgttttcccaagtggctgtaccattttacattcaccccagtagagtatgagtgttccagtagctccatattattgccaattcttggtatagccaggctttaaaattttatctgagttattttaacaagaaaagactatcgtggtggaaatagttccccccatttcctatgtcttattttttaaatgctgcaaaaataatattttgtgtgtgaagtttagatggtctcctaatgatttatttattcttttcttattttcgacagtctttgctcacttaaaccgatttgaaacgcagtttataagaaccaatacgttttcttccttttcacttacatatttttctttttttgttctagcggcccctttgttgctttatgcaaacagacgggacttgcgattggttgatgctacaaatggcaaagagaatgctacgattgtagttggaggcttggaggatgcagctgcggtggactttgtgtttagtcatggcttgatatactggagtgatgtcagcgaagaagccattaaacgaacagaatttaacaaaactgagagtgtgcagaatgttgttgtttctggattattgtcccccgatgggctggcatgtgattggcttggagaaaaattgtactggacagattctgaaactaatcggattgaagtttctaatttagatggatctttacgaaaagttttattttggcaagagttggatcaacccagagctattgccttagatccttcaagtgggtaagtttttgtacagtgtacgaagatcatcatacctcctttcggtttttctccactgacatacaccaccctgacccctatgagaaaagaaagatcgaaaacaggaattttagattctttgggcttctttgttgagtagacttgaatgtggaaagttacgttgtgttattattatttttgacagggtttttgctttgtcactcaggctgtagtgcagtggtgcaatcaaagctcactgcactgtcagcctcccaggctgaagtgat

SEQ ID NO: 1292 - DNA, 1197 bp, Homo sapiens
cctctgaaagtgctgggattacaggtgtgagccacggcacccagcctttctgggtatttcatataaatggattcatataatatgtggtctttggtatctagtttctttcccttagcataacgtttttggggttctcccatattgtagctggtatcagtattaattccttttcatggctaaataatattccatagtagggatatactgcattttgtttatctattcatcagttgattaatttttttggctgtttataaatctgctgtgaacatttttatacaagtttttgtgggtccatttcctttcttaaattattttagatttggggtatatgtgcaggtttgttacatgtgcatacattttcagtgctcttgtatttacattttaatctggatgttatatctcactttacagaatttttttcacagttatttctctctagggtttgtggtggaacacatgtagacagagaaatagttgttaggaagacatagacctggtagtttgtcactctgaagtgggctgtcagctgaaaagcttgaagaccatgggtctagacagacagctcattccaactacaactatcatagattgaccaactcctgagaatttatgccatttacctaccttactgggccttccaataagatagactaattttaataagagtttcttattttccctccttaacgctttgtgggagatactgttgggtggaaataatgtcagtgtaaccttgtcaaggcctgtacctcttttattcttcatgtttgtatttgtgtggggcaggggactgtgtgtacctggggttgaagggaagatgaattgtcttcccctctgcctttccctctaaaatcagtgccacagtgagaatcagcaagtggccaggtgcggtggctcacgcccataatcccaggactttgggagactgaggtgagtcaattgcttgagtccaggagtttgagaccagtctgggcaacatggtgaaactccagctctactaaaaatagagaaattagccaggcgtgatggtgtgcacatgtagtcccagttactcgggaggctgagctggggggatcacctgagcctgggaggttgaggctgcagtgagccatgatcagcaccactgcactccagcctgggcaatcagagtgagactcctggctcaaaaaaaaaaaaaaaaaaaaaaaagaaaag

SEQ ID NO: 1293 - DNA, 1209 bp, Homo sapiens
tgcagggaaatcaagaacaaaaagtggcagccagacgttagattagacaagggtcctgaaagtggtcagacccaaggtagctactgactctctttctctaggagaccacatggtctactgcctccaattctctctgtttcttcattagctgcattcaccagcttctcttgagatcaactagttctgcttgtcccttattgtattactggccccaaaatggctgcccctaaatggtggccttggatctgaaattcacatgtccttataaattcaatgcttctgtcagagtgacccagtctctcaatgttctgactctaaattcttaggaggcagagtctgtttgacccagcctaactcagatacagagccagatccaaacagctgggagaacaggatggagaagagttcccatactatcttctcagcactctctaaaaagggctgttggcaattttgcctttttgtaattctatttgagcaagttggaagtttaattagctttccaatcaaccaaatttctgcattcgagtcttaaccatatataagtgttactgtggcttcaaagaaaatatggattctgaagtagtgggttttgattgagttgactgtttttaaataactctttggattttaattgtgatgcagaagttatagtaacaaacatttggttttgtacagacattatttccacgctggtggataagctcaataaaggtcatatcccaaactaaaaaatataaaataaaataaaataaaaaataaaaaaataaaaagggctgttggtcaattttataaaaggcaaagtcaaacagagggaggaatgactgatagatgaaatgactggtctcttggtgcatctgtttctaaaattccgttaactttccagaatgagcctgccaatagctctggtctaaactcaacccctgtgacctccatttcacctccatttgagtcacctgctgaacaagcatgcccttcacactgcttgtattgcctccgtggcttagacttgacagtttctctgccttgtcctctttgtgaacatctactcctcttttcaaaccctgctgggttttatcttatctgtagttctatttctctcccactctgtatccttccaaaataagttagtcacattttccttttcaccatagtactttaattttcatatatactacttatacgattgcatatgtcatattgcattga

SEQ ID NO: 1294 - DNA, 1150 bp, Homo sapiens
tctccaaaagtgttgagattacagttgtgagccactgtgctcagctgggaggagctcttgcggccaggattttaagaccagcttggacaacgtagcaagacctgtttctaaaaaataaaaataaatagttaagctattctggaggctgaggcaaggggattgctctatcccaggagttcagggccgcagctcaggctacagtgagctatgattttactactgcactccagcctggcagctctaaaaaaataaaataataataataataatataaaaataatttaaaaagcaatggtttaaatggtaatttgtatcttacttgtatttaaccacaataaaaaagaatatacaactactgggacatttttttttgagaccaggtctcactctgttacctaggctggagtgcaatgactcattgcagcctcgacctcctgggctcaagtgatccccctgccttagcctcccaagtagctagggctgtaggtgcacaccaccatgcccagctaactttgtgtgtgtgtgtgtgtgtgtgtgtgtgtgtgtgtgtgtgtgtgtgtgtgtgagagagagagagagagagacagacaggttcttgctatgttgtccaggctggtattgaactcctagtctcaagtgatcttcctgccttagcctcccaaagtgctgaaattacaggcatgagccatcatgcctggctcactggaaaaatttaaagttcatccatggtatgtctaaaagaatctcacacagtgtactgggccatattatttgtgagatgctgtagtggttcaatttcaggctctggaatcctactgcctgggtttgagtccagttactgaactgccatttgcaagttacttcaccttttaaagattttatttcggccaggcatggtggctcacacctgtaatgccagcactttgggaggccagggcgggcagatcacttgaggtcaggaattggagaccagtctggacaacatggtgaaaccccatctctactaaaaatacaaaaattagccgggcgtggtggcaggcacctgtaatcccagctactggagaggctgaggcaggagaatcgcttgaacctgggaggcagaggttgcagtgagctgagatcatgccattgtgctccagcctgggggacg

SEQ ID NO: 1295 - DNA, 1217 bp, Homo sapiens
cagtacaccagcagaggaaacttataacctcgggaggcaggtccttcccctcagtgcggtcacatacttccagaagagcggaccagggctgctgccagcacctgccactcagagcgcctctgtcgctgggacccttcaggtaggacagctcccaacgctgtggggactctcagcaaaacttctccttcctttccacggctctgcttcttctgacctcatcttagttttgctttttcttttcttccttcgctatttttctatgatcctctaagaaccaagtccttgaaacttttggctcaaagtggatacagagacaactttttctagaaagttcagaaaagtgtattttgaggacggagtctggggaaatcaatgggatggggctaaaatcgtgcctggcagtgaccgggttcttgttctaggatgtggagggagcagggactttgaaacaaactgggataggatcctgtttatggaggaaacaccacacaccttggaaatgacatcgggaactggccagatgtttttcacctcctccgttttgattccgattgcttcaggacttgaactgttactctgctcgctggttgttggttgggattttttgggtggtggtggatagataactggttttcagtttatttttgacattgcttttcctgcctgtttgcttccctattcacttctgtttaaatttaagtattttttttctcctcacaggatgggaagagggggattggtttgtttaaagaaaactgttggccgggcacggtggctcatgcctgtaatcctagcactttgggaggctgaggcgggcggatcacctgaggtcaggagttcaagacaagcctggccaacatggtgaaaccctgtctctactaaaatacaaaaagtagccaggcatgatggcaggtgcctgtaattctagctacttggtaggctgagacgggagaattgcttgaatccgggagatggtggttgcagtgaactgagattgcgccactacactccagcctgggcagctgagtgagactctgtctcaaaaaggaaaaaaaagaaaaagaaaaaaaatgaaaaaagaaaactgttagagagagaaagagagggaggcaaatggtgttttaaatgaaacgtgggaggggttcacttggtcgaagcaggagctgatgaggattccagatgccttctcttggccagatgtggagggcgggggaggc

SEQ ID NO: 1296 - DNA, 1149 bp, Homo sapiens
ttcagtttcatagatgattttactgaggtaaggagaagatatatattttagatagataaccaggaaattaataggattaatatttaaaaaggtatgtctggtcctggtatttgcactattaattgcaagagttctgcttttttggtgtgcttgataatatttctcagagattttttttttaattcctgggatattaagggcttttgtttttgtattttctatgacagtgcagcactaggcatcctgatatattcctttgtaaaacatgttgatacattgttagatagataccttaaaggtcctttgctgtgtcaaaatgatgcacaattcctgcttgtttgtccttaaaaatggatgtgacagttaactcttctgctcatggtacataagaccactcatttctgtatattaatgctaaccacaagtagttgccaatctgatgtttaaaaatgtattttctctttctgttttgtctttttttgatgattaggttgaatgccttttcttgtatatgttgttttatgaattgcctgctcacgtttctgtattttttttccaactgtttgtccttttcattcactaatagattttcttttttattctgaatactaatcctatatcactatgccattttttcaagtatttctcctaacttgtggttacttgtagtactttctgtgcctttgaatatttatattattttatgtctagtgtctttgctattatgcttaactgctattttgatagattttccactatttatttcaaaatccatttcttccttatttgttacgttttgttttgtttttgtttgagacagagtcttgctcttgtcacccaggttggaatatagtcgtgtgatctcggctcactgcaacctccgcctcctggggttcaagtgattctcctgcctcagcttcctgagtagctgggattacaggtgtctgccaccacgcccggctaatttttgtaattttaatagagatgggatttcaccatgttggccaggcaggtcttaaactcctgagctcaggtgatccgcctgccttggcctcccaaactgctgggattagtggcgtgagccatcgtgcctggcctttctttcttgtttgtgatgcttctctgtcatagttaccttttttattgttt

SEQ ID NO: 1297 - DNA, 1231 bp, Homo sapiens
tcagcaacttgaagcagtgtacaaggtcaaagaagaactgttgaaaactgatgtcaagctgttaaatggcaaccatgaaaatggagatttggacccaacctcacctttggaaaacatggattacattaaagacaaggaagaggtgaatggcattgaagagatttgttttgatcctgaaggaagtaaagcagaatggaaggaaacaccctgtatcctaagtgttaatgtaaaaaacaagcaggatgatgatttaaattgtgaacctttgtctccccataatataactccagaaccagtctctaaactgcctgctgaaccagtttctggtgatccagcccctggtgatctggatgccggagatccagcctccggagtactggcctctggtgattccacctctggtgatcccacctctagcgagccctcctctagtgatgctgcctctggtgatgcaacctctggtgatgccccttctggtgatgtgtcccctggtgatgccacctctggtgatgccactgctgatgatctctcctctggtgatcccacctctagtgatcccatcccaggtgaaccggtccctgttgaacccatttctggtgattgtgccgctgatgatatagcctctagtgaaataacttctgttgatctggcttctggagcaccagcttccactgatccagcctctgatgatctggcctctggtgatctatcctctagtgaactggcctctgatgatctggccactggtgaactggcctctgatgagctgacttctgaatcaacctttgatcgtacctttgaaccaaagtctgtaccagtttgtgaaccagttcctgaaattgacaatatagaaccaagtagcaataaagatgatgattttcttgaaaaaaatggagctgatgaaaaattagagcaaattcagagtaaagactcattggatgagaaaaataaagctgataataatattgatgctaatgaagaaactctagaaacagatgatacaactatttgttcagatcgacctcctgaaaatgaaaagaaggtagaggaagatattatcacagagcttgctcttggagaagatgctatatctagcagtatggaaattgaccaaggtgaaaagaatgaagatgaaacttctgcagatcttgtagaaacgattaatgaaaatgttattgaagataacaaaagtgagaatatcttagaaaatacagactctatggagacagat

SEQ ID NO: 1298 - DNA, 1099 bp, Homo sapiens
tatggtttttaaataagacaaattgcaaaaaacgttgccagacagcgttcgctggtttgggccgtcactgggtatggctcgtgtccgtctagatattcagaggccgagcacagtcctcagtagggctgctcggcaggtacacagctgacgctggtccttggacttatgggagtgggaacaactttcaactcggccgcggaccaggaaggcgttctgacccgctagagctcggggacagggaccccatcccggtgcctagagcgtctcccttagtcggcgtgggccagcgccagttacctcacgagcactgaactagcgcctgcgcccttctatacttctcgctctttcttcaagtcacttctacccggcgagcccgccctcccgccaatcgtcatttccggcgggtgctctgcgtcatttacgtcgtcacttcctgccgatgccggtgtggacgctgtgaatcgtggctggcccggttctccgcttctccccatcccctactttcctccctccctccctttccctccctcgtcgactgttgcttgctggtcgcagactccctgacccctccctcacccctccctaacctcggtgccaccggattgcccttcttttcctgttgcccagcccagccctagtgtcagggcgggggcctggagcagcccgaggcactgcagcagaagagagaaaagacaacgacgaccctcagctcgccagtccggtcgctggcttcgccgccgccatggcaatgagacagacgccgctcacctgctctggccacacgcgacccgtggttgatttggccttcagtggcatcacgccttatgggtatttcttaatcagcgcttgcaaaggtgagcaaggccgcaatcctggtcctcgacggctgggactgggctgaaagggatcgggacccgcacgctccagtgccgaagcggtggtgtggtgaggggggagggggcgatattaacatctgagatgagagccaacactggtccggtggagaaaggagtgtgttagggaatccgcagctggagccgagaggacgcttttgtagaaactattacctccaactaagacctctctccttattttattt

SEQ ID NO: 1299 - DNA, 1130 bp, Homo sapiens
gaaccggttcctcttccccctccttgctgtgtgtttgatgtgttgaagcaggagggagaacgccgcgagcagcgccgtgagcaacactaccatcgtccccagcactgcggatccgggccctagcggcgggcccagtagcggaggtggtggcggcggtggaggcggcggcatcgaggtaataggtgactgatctccccgggcgctagctctgagcagatgcggactctcttcggtttcctaggcaagatcgacgaaccacacctcttcccgccggataattcacctttgccaatcgcaatctcgttaaattccatgatccagactcagcagttgtcgcaccatgtctgacaaacactgtattccttgacagagctttgataacgtaccatatgcagaaggagttattcctgataaggctaaggcttgtctctgttggcaccagctaatgcaatggcaggtcttctgcttggtgttgggctcctgcctactcctaacccacttactcagactggcgctgttccaccggctgctttgggggctcctactcttgttcctgcccttgctgcgcttgggcttcctggagcaaacttgaactcaatctgttgccacagatagttgctgaagcttatgagcactgttggtcccaagttgaagcatgtagctgctggtcttgtttcaccaagtctgaaatcggatacctctagtaaagaaatagagaaaggggccccacatggtggctcaggccagtaatcccagagctttgggaggctgaggagggtggatcacttgaggtcaggagttcgagaccaacctgaccaacatggtgaaaccttgtctctactaaaaattcaaaattagccgggcatggtggcgcatgcctgtaatcccaaatacttaggaggctgaggcaggagaatcgcctgaatcctggaggcggaggttgcagtgagccgagattgtgccattgcactccagcctgggcaacgagcacaaaactcttggctcaaaaaaaaatagaggaagctatgaaaagagtacaagaagcacactgcctaatttcggctgctatagaaccagagaaagaaaaaagaaggcattcaagatcacattctaggaggaggaggactctc

SEQ ID NO: 1300 - DNA, 1176 bp, Homo sapiens
ccttgtggaaatttgagaacagcaagtgctacgtgactatcattgatgccctaggacacagagacttaaccacagagacttcatcaaaaacatgattacagggacatctcaggctgactgtgctgtcctgattgttgctgccagtgttggtgaatttgaagctggtatctccaagaatggacaaacctaggagcatgcccttttggcttacacactgggtgtgaaacaactaattgtcggtgttaacaaaatggattccactgagccaccctacagccagaagagatatgaggaaattgttaaggaagtcaacacttaaattaagaaaattggctacaaccccgacacagaagcatttgtgccaatttctggttggaatggtgacaacatgctggagccaagttttaacatgccttggttcaagggacgaaaatcctcctgtaaggatggcaataccagtggaaccatgctgcttgaggctctggactacatcctaccaccaactcatccaactaacaagcccctttgcctgcctctccaggatgtctacaaaaattggtggtattggtactgttcctgttggccgagtggagactggtgttctcaaacctggtatggtggtcacctttgctccagtcaacattaaaactgaagtaaaatctgtcgaaatgcaccatgaagctttgagtgaaactctttctggggacaatgtgggcttcaatgtcaagaatgtgtctgtcaaggatgttcgtcatggcaatgatgctggtgacagcaaagatgacccaccaatggaagcggctggcttcactgctcaggtgattatcctgaaccttccaggccaaataagtgctggctatgcccctgtactggattgccacacggctcacactgcatgcaagtttgctgagctgaaggaaaagatggatcgccatgttggtaaaaagctggaagatggccctaacttcttgaactctggtgatgctgccaacgttgatatggttcctggcaagcccgtgtgtgttgagtgcttctcagactacccacctctgggtcgcgctgctgttcatgatatgagacagacagttgcagtggatgtcatcaaagcagtgaacaagaaggctgctggagctggcaaggtcaccaaatctgcccagaaagctcaaaaggctaaat

SEQ ID NO: 1301 - DNA, 1186 bp, Homo sapiens
agtgagcggagatcacaccactgcatcccagcctgggcaataacaatacgctgtctcaaaaaaataaaaataaaattcaggaatccagtcattgccaggatatctaattatttgttgcaaaaacagcttagtgcttctgctataacaatgattaattcaaaaccagatttttctgggaagaagatcccattatttttgtattgcatatagtggaaatagcagtaaactgggaggtcgtgaaacttgttgcattttcaagctttgtctaatgtatgtcatcttacttggcaacttacttcgtaaagtgaaaagactactagtcccttatgcttcctttctggaattagttctattgtactacttatttacttccgaaaatactagatattcactcattgatattcttctcgtgccctacacagcatgcctgacgttatttctgttttattttcttttagtgtgttgttggtggctgcaatgccagctttgcttctcagggagggctagctcgtcatgtacccacacacttcagtcagcagaactcctcaaaagtttctagccagccaaaggccaaagaagaatctccttctaaagctggaatgaacaaaaggaggaaattaaagaacaaaagacgacgctcattacgtaagtgttacactgagaaaatctggtgtatttcatggttttaaaagatatcttagacttttatgcaaatccactttgaacttcaactcctcttctattaaaagtaacaaacaggtaggatgcctgtctgtcagtgagagtgagaattcagtggcacatgtttgtagtagctaagggagtatatgtggccttcaaatataaactgtataaaattagatttgggggctactctgattctcttccaaaataacatttaaaatatagtaacattggtatttctagaaatattttagaaaatttgaacatgttaaaagtaaatatcaagtgaaagttaagtaatctatctactccaaagtagtgtgtgtacctgagctgggaggtagaggctgcagtgagccgtgatcgcgccaccacacttgaacctgggagacagagtgagaccctgtctcaaaaaaccaacaacaaaaaaaaccaccacaaagcaatgtgtgtggataacaaagcagtgttgctttttttttttttttttttttgagatgga

SEQ ID NO: 1302 - DNA, 1229 bp, Homo sapiens
ctcctgggttcaagcgattcttgtgcctcgttctccggagttgatgggaatacaggtgtgcgccaccatgcccagctaatttttgtatttttagtacagatggggtttcaccatgttggccagtgtggtcttaaactcctgggctcaagttatcttccccccttggcctcccaaagtgctggaattagaggaaggagccaccgcactgggcccttttatttctctcttagtaaagaaacttgctgtcagatttccagcaagtcaaaatcaagtatgaatttcactcattgagttaaaagctagccagtgtgttctgacaaatttctaatttgataagatattgccactgaaaatgtttaatttattcctcaattcatgtttaaaatttaacactgccatttcttatctgggactccaagtcctgctattaaggttgatagctgagcttccctggcttctgggaaacttgttcacttaacgtggactgatcaaagtagcagaaaatgccagaatgtgaaggcacatggaagtgtaaatctaaaattaatgttactttattattgacttgttttttaattcatagtctgcctgatgtgtgggtgaatgaaagtgaacgacatcagttaaaaactaaagtagttcatttatcaaagctacccaaagatactgccttgcttttggacccaaacatatacaggtaatttaattcttgcctttatgttttactttttgatttgtaattttctctccccaaattttggataaattaggacttagttttaagtgctgaattttaataccaagcatatctcattacttcctggcttttttttttttggatgtggactcacaaagagttaaaaattgtagaatccagaaaaacagtattttgctaataaagtttatatgcttgtttaatcccagatttatcttaagtatgttagattgtaatatacatagtaatttgaaaataagtgccctttaacaaggtaattctttttataataacagacttttgtggacctaagaatatgttgcatgagtctgaataccaaaactgtttgattttttttagcttaccctttctccaaactttccaaaagagcaattcaaatattatttgttttttaagacatagcttagagtgttcacatttctagtaattttatgttttgagctttttttagtgtgctgtgcttatgaaggtatgtgggggaaggagaagagac

SEQ ID NO: 1303 - DNA, 1199 bp, Homo sapiens
gtcactctgatctcctcccattctgctcttacctttctcccatggagcaggttataaaacccaggaaggattttctgatgttcctctgaagcaggtcataagcccctcatgggagaggtatcttctctatacctggagaaaaggagcattcttatttccaaaggcacagggtcacaagagaggaatctgcatgaacaggccttgtttacttatgctatggagcaaatgggctcactgcctgatgcatacagaagtgaagaactatggcaccagtttttgagaaaagaaggcctttattgtaagaccagtcagcaaaggaggcaggagggggctcaaatctgcctctctaatttgaggtctggggcaagttttaaagaatcagagggcaagggaaaggattgaagagtgttggctgagcggggtctgattggaggccttcacatttcaccatttacagtaagatatgttacggcagattttagccctggatcttcggggccaacagacctcttgcttctgaaagagctatgtgtttaggttctggtcatgttctagaacttcttggttctgaggggagggaatcattggttccgggtgtgttagaggtaaaagctttttctattgcacatgcccgtgctacagaatttgtagtttttggctctgttatacccaaaaggtaacttgacaatttgttatcaacagaataggcccagtttgggctggtttcatggttacacttacaccctttaccctatcacattattctaccatgactctccatttttcttcaaaaacctactataaaaagcactcagatttaactgtttctttgggtcttcgtttcctcatgaagggtctcatgacacataaaacttatattaaaagcatttgtatgcttttctcttgttagtctttcttttgttagagggtccccagccatgaatgtagaagggtaggtaggggagaaaaagtgatattctttcttcccccattgcaaggttcatggctgacaccaccacaacaaaagatggactaacaagataaaagcatggcacatttaaaaaatactagttttacatgacctgggagtcttcagaaatgaagacccagagacccagggaaaactgtgtttttgtgcttaggttcaatgagcagtggacacttgtgtagaagaatgactggataaaaaagggggtatg

SEQ ID NO: 1304 - DNA, 1202 bp, Homo sapiens
tggatttttagatcttagtttactggttcaaagggtatgaatttttaataatatatgtattatatatattttatatgtgtgtaaatatatatatacaatgtgtataaatatatatttgttatatagtagcaatatatatgcttagtttactccctgttttccaaatattcaacattattaatttgcaaatataataggcaatagtagtatcttgtcattgtttatattgaatttcttttacttccaataaagttaaatgtctttccatagatctatttattttgtaagttgttctcactcttccctcagttttttactagggttgggattctttcaaatttgtaagaacccttgatatcttgaagatattattctttacctaagtttactacagatattttaccaatgtgacatttgtgcaaatactctaaagttttatatagccagatcaatttgtcctcttttgtaataaaaaaaaaaagtctttaaaaaaagatttacggacaggattgacagattgatagctctttctcgattccgtgggtggtggtgcatggccgttcttagttggtggagcgatttgtctggttaattccgataacgaacgagactctggcatgctaactagttacgcgacccccgagcgggtctgcgcctgccacctgtgcgggggccggcaggaccccgacaagcagctcatgtgcgatgagtgcgacatggccttccacatctactgcctggacccgcccctcagcagtgttcccagcgaggacgagtggtactgccctgagtgccggaatgatgccagcgaggtggtactggcgggagagcggctgagagagagcaagaagaaggcgaagatggcctcggccacatcgtcctcacagcgggactgggacaagggcatggcctgtgtgggccgcaccaaggaatgtaccatcatcccgtccaaccactacggacccatcccggggatccccgtgggcaccatgtggcggttccgagtccaggtcagcgagtcgggtgtccatcggccccacgtggctggcatccatggccggagcaacgacggagcgtactccctagtcctggcggggggctacgaggatgacgtggaccatgggaattttttcacatacacgggtagtggtggtcgagagctttccggcaacaagaggaccgcggaacagtcttgtgatcag

SEQ ID NO: 1305 - DNA, 1366 bp, Homo sapiens
tatatcaaaatttattaaagtgtatttaaatagagcagtgttcaataaaatacgtatataataaaattaaataagtacttgttacttacaaatatctaattttctcatagtgtatgtttgcatattctatgtataaaacctaattcaaaacataagtattggggaaatgtggacctgtaagtgatgaaaattagattagggaatgagttcaggcctatcaagttttctacaattctttctgttggaacatcggacctttgattattctcttttttcccccctttagagattagttcttgctctgtcacccaggctggagagtagtaccgctgtcatagctcactgaagcttcaaactcctgggctcaaacagtcctcccacctcagcctcctgtctttgatcatttttacttacagtttcatgtcttaatctcgatgctttgttgttctggcaggggatgtatggcattgagaatgaagtcttcctgagccttccatgtatcctcaatgcccggggattaaccagcgttatcaaccagaagctaaaggatgatgaggttgctcagctcaagaaaagtgcagataccctgtgggacatccagaaggacctaaaagacctgtgactagtgagctctaggctgtagaaatttaaaaactacaatgtgattaactcgagcctttagttttcatccatgtacatggatcacagtttgctttgatcttcttcaatatgtgaatttgggctcacagaatcaaagcctatgcttggtttaatgcttgcaatctgagctcttgaacaaataaaattaactattgtagtgtgcttctgtttctgggattccttccttaatgattcctgaaagatttcagtcagtctgccaagtcattcttaccacacgtcataaatgtccctaaattccaacatcatctacactcctccctctggatgagacaaaaattcttttttgcaacaggtgccacggtttgttgttgttgtcctgagaatatgattatctttttaaggttataactgaagaagttgtaacggatgtcaatgtatatgacatttacaaaggaagcccgttttaaaaggaagaacccctaaaatggaaactttgttagaattctatttaataatgaaggaaaatgaaagtttggtctggattattcagattgagtctacttggagatagcataacatgtgaatttacagggaaacttaggtagacttcctttaacaaagagttccaaatttacatgtcatatgtaggggtcaatttaggtagtgtttaaaacatgagttttggtgtcatataaacctggacttgagtgctggccttatcgttgattaactgtgatcttagtca

SEQ ID NO: 1306 - DNA, 1168 bp, Homo sapiens
gagtattagaaatccaagttttagtttccagacaaaaccaaacacttcactgccttccttcccttcctaaattttaactttttaagataaaagtaacttaaaattggtttttgtttttgtttttttttttttttttttttgatgtctacctattggagtcactgtttacacttcattttattcctgacaattcattgaattcatagccaaaaacatactttcgggtcatctttattttctgaggcagtttgatgtttggattattgcagtgtagctcaagggagaaaaaagaagccacaggaacattaaacttcaagcccttacaatacagaaaacttaattcacatatatgttctagaagcttatgtatggttaggcttttagagcatgtcatataggttatgttataatgaagagttgcatttaaagtacctgtttttgcttttctttttaaagattattctgtgactgccaattctaagattgtagtggtaactgcaggagtccgtcagcaagaaggggagagtcggctcaatctggtgcagagaaatgttaatgtcttcaaattcattattcctcagatcgtcaagtacagtcctgattgcatcataattgtggtttccaacccaggtattattgtatactttaagtctctgttctgttaagttcagtgttttggtgtttctgttgttattgttttggactaaaatcagtcccagtattcatttacagaagcagtttacatgtcttctttcattggccctaaatagtggtgtttgcaaaacaaatgcctctgtcccaggccagatgttcaaaaaatgtgacaagagttttagctaaagcaatttcatgtttttgcttcatctggcttggttatagattctgaaggcttttaaaacttttttataaagattatcctgggatggagaatgaagcattcgaacatagtttcaatttgtaagaaacattttgacatatttgaccttttattttctggaaaatcccattatacagaattgaaacagatcaactttgaaaagaagcatataagaaagccattaaacaattctgttttaaagatagaaatagactgaattgatggacaaatatatgctaacaccaaatgctctgacttaaaaattgctttccttgctaacttgacatctac

SEQ ID NO: 1307 - DNA, 1202 bp, Homo sapiens
accttaatgaattcttccattaaatgggtctcatggttcttttttttctttttttccttttgagacggaatcgctctgttgccaggctggggtgcagtggtgagatctaagctcactgcaacctccacttcctgggttcaagtgattctccttccttagcctcctgagtagttaggactacaggcttgcaccaccatgcccagctaattttcttttttttagtagagacggggtttcaccatgttggccaggatggtctcaatctcttgacctcgtgatccaccagcctctgcctcccaaagtgttgggattacaggcatgagccaccatgcccagccgggtctcatggttctttaaaatatattctgctttctagaatatcattaggctcattttaagttgtacttcagttcgaaattgcaacagtaacattttaaggatgatttctatttggatttcatatgcagatatacgtgtaatgttttgattctttccttgcagtgcaaaatggcaactcttaaggaaaaactcattgcaccagttgcggaagaagaggcaacagttccaaacaataagatcactgtagtgggtgttggacaagttggtatggcgtgtgctatcagcattctgggaaaggtacatttcaagaacaccatagatgatagagaagttcagcatgtatacacagtttctttgggcaccttggaattttattatatctttaaaagatttctttttttcctgagcaatttgaagttgtagatgtaatcccacttcactttcaaatatttaagcatgtatctcctaaaagaattatattctccctatgtgaccataaatagttactacacttagagaatttaacactgatgcaatactatcatccagtatacactattaacatttaaaattctccatgttgtcaaaatcatgccgtttatagctattttcacctcagtccaagatcatgtgtctcatatacttacgtctcttcattctttaagctggaactgttactcaacctttctttgtttcttgtgtcattgacatttttctagcatccaggtgagttctgcagaatgtccctcaatttgtctgtctgatgttttcttgtaattcagctcgggttgaattttttgggtgggattggaactaggtgatgtcatgtccttctttgtgcagaccatcaggagacacatgat

SEQ ID NO: 1308 - DNA, 1205 bp, Homo sapiens
atcagtcattcagttgatagacaaagttagcgatgctttatgctaggaaacttgttgacagtaacctgtgcgactttatgcagaagacaaatgctagtaattattatgcacagaggaaaaatcattttaagtatgtggtaaagcagcttcatctttcaaaattgatttgctctggtttttctttagtccattagattccagaatgtccttttactgggaatttagttatgtattaagataacctgttttcagttctttttgaaaagaagacattatttatattgaaccaccttattttaaaatttttaacttttatataccacttgtgtgattccagtgtcatgtcttgggtttgatgtcgttggacagaaaagtgtatcaattattttaaatgaatttttccccatgtttgaggcttagtctgtaaatgtgttgctgtaacagaaaatacttgggtatgcattacttgaatacttgaaaactgaaattaataagatgtattacataatgaattagatttctctgaacagtttttacactgaaaatcttcatttctggattgcagtttgaaatggaatgaagacctgaattatttgggtagaaaaaattatgatagtgcttataagaactgtaaactgttttaaactattttgtgtttgacgcatcaaacttcaagttttttgtaagtttctctcctgaaattttctttctcttctatactttatgcacttactatactactgatgtaataaaagagcagggttaaaaatattgtatctgtattcattgtgaatcctgtagcttttctagttaacaaaaaatcgctttctaaaatactcttaatcccattgttttggttaacatcttacccatttgttgtatttcaaatgccattaatcattttagtacaacacctatgtttataaaaatttgaaaacattacatattgtatttaaaactaattagtgaagagtaagaaaaaaactagccaacagaattgtaggtgatgcattagttaaatttcaaaactcataataaaggaactttcagagattggttgaaacccagtggtatccctgtaaattagctcctgtgactggaaaagaccccaaaaaggcagtagaggagattagtgtttacttgctgtggttgtggtgtgctgctacttaattataggtagtgacacactgaaattcttatttgtc

SEQ ID NO: 1309 - DNA, 1194 bp, Homo sapiens
ttaattttgttattccactgaccatttttatacaattcctcttcacctcactctcatacattgctttacaagtagtcttccttcctgattctgtttttaaatttatctcctgtgcaatgatcatgttttcctaaaacaaagcctttgtttcattgatcaatgaaaacttttttttttcaaaaaatttactgagatcttgcctttgccaccagccctgcaaccattctgttctaaccaagaccccagatcttttcatttgccatgtccaggaacaaggatgcagcccttgttttacttggtgtctctgctgaatgtgaggtattgactaattcctccttttcacaatttttacctctattggcttttaagaaatgttaggttagttttttctttatctttctagctaccctatcttaagctcctttatatcatcttcttcctttgcgcttgccttaaatgatgattatcttgccggttctgttgggcgttttaccttctattttgccagttttctttgagtaatttcattcaggtcaatggctttgactgctactgaaatgctcgtggtcaccaaatttttatcttccgtccataaactcatctattacaacttttcactcaccattttcacttgaagctaccacaaacagcttaatttcacattttcaaattaatgatattttcctcagtccaaccaaaatctattcttctgtagtctacatccttgtaagactcttcattacaaaagtatttatttagcaccttctgacagccagtcattatttttttggcattgagaatgtaacagtgcagtaaatagagaaaatccaggttgcaaggagcatacattttagtaaaggagaaaaacaaatcatatacatattgtacaatgagtttctaacaactgtattgagatataactgataatgaactgcacatattcgaagtatacaatttggtaagtattgacatatgtatggatccaaaaaatagtcaccattatcaaaatagtgaacatacccttcacccctaaaagttttctcatgtccctatctgttttctgtcactatagattagtttgcattttctagaattttatacaaatgtgattatacacatttatttttttcaatgttcttttttgtgacggaggcatctggttttactcaccataattatttaggtttatccatg

SEQ ID NO: 1310 - DNA, 1106 bp, Homo sapiens
agtctcgctcttgtcacccaggctggaatgcagtggcgccatctcagctcactgcaacctccatctcccaggttcaagcgattctcgtgcctcggcctcctgagtagctgggattacaggcgtgtgccactacactcaactaatttttgtatttttaggagagacggggtttcaccctgttggccaggctggtctcgaactcctgacctcaagtgattcacccaccttggcctcataaacctgttttgcagaactcatttattcagcaaatatttattgagtgcctaccagatgccagtcaccacacaaggcactgggtatatggtatccccaaacaagagacataatcccggtccttaggtagtgctagtgtggtctgtaatatcttactaaggcctttggtatacgacccagagataacacgatgcgtattttagttttgcaaagaaggggtttggtctctgtgccagctctataattgttttgctacgattccactgaaactcttcgatcaagctactttatgtaaatcacttcattgttttaaaggaataaacttgattatattgtttttttatttggcataactgtgattcttttaggacaattactgtacacattaaggtgtatgtcagatattcatattgacccaaatgtgtaatattccagttttctctgcataagtaattaaaatatacttaaaaattaatagttttatctgggtacaaataaacaggtgcctgaactagttcacagacaaggaaacttctatgtaaaaatcactatgatttctgaattgctatgtgaaactacagatctttggaacactgtttaggtagggtgttaagacttacacagtacctcgtttctacacagagaaagaaatggccatacttcaggaactgcagtgcttatgaggggatatttaggcctcttgaatttttgatgtagatgggcatttttttaaggtagtggttaattacctttatgtgaactttgaatggtttaacaaaagatttgtttttgtagagattttaaagggggagaattctagaaataaatgttacctaattattacagccttaaagacaaaaatccttgttgaa

SEQ ID NO: 1311 - DNA, 1179 bp, Homo sapiens
ctttttatctttgtaccctaaaggtggtccgttcagaaaatgattgaggcttgctcatatggagacacagggagctggcactgctgtggccttcactgtagtgaaatagaagatcagatcttcaggactatcaatccaatacctttcattggctatacatttacttaagaaatattgttttcaaacaaatgtacttgctcccaggaggctgtgtggttgagtcaatttgctttgcctaatacttacgatttgctctcagtgattttaaatgcacaggcaccattcagtgtaattgatcttttgagtagaaggattatggcaagccatgttcttctttgtcacttatagaagttaaaagcaaatgcacatacaagctgatgaactggatattttccatattctttgcaaacatttcacttttagaagcatacatctgttttatacttgctaaaggatatacaacccaaagctttctatttctactaataattaagagcccttttttcttttacaacagcatgggtatattttattctactggagagtcacttaaatagttgaggacaaatgtgaatcccacttacacatcttctgtggaacagcatgatatgtgtataactctgaatcattcgagtatcatctccatgtgaatatgcatgtggttagaatagaggagtggacacagtctggaaatggtttgggtctggtttgttatttagttatcctgttaatatccttctacctatctgtgcttgctgtttgaacgggactggggttcaactttggatctccaacatggaacaataaagtctacatcgttcagtgaactttgggcataattactgtgtctaggacaccactacaatttcttttcactgttgtcttcctgcccatccttgaactcaccataatttgaaaaggcagtagatcatagaaaactaccaaaagaccaaccaagagctaaatagtttcttcatagcttctctcattttgcttttgctcaatttcaaattcttgggagtttccatagctaagcactgaaatgtgggcctattcccagtcaggaaccagataatcctttttgttggtatatatgttatgatgtagaaaatgaggagtcacttaaaaaaaattcaatggagaattccatttatttgtaggatttctttttctttgagg

SEQ ID NO: 1312 - DNA, 1099 bp, Homo sapiens
cagagtttaagtttcaggagaaaacaggaacaatagaacactctgcctgttatttttgttgtaatcaagcttttccacagttcttgaaaagtactatgtttcaaatttcaggaacaccagcgttagctgtaaaagttgcagcaatttattggctagtcatagaaaatttttgaacttttaactgtattttaattgatgtttattaaaaacactttgctatcagatatttggcataaatctgtactcttcattatagttttggggggagagaagattcagtcagaaaacttattcaaagtacctaagtattataaaggagtcaaaaaggtacaaagagaaaaggtcaagacatttttcaaatgagggaaaactaacaggatttatcactagtaaacctgctctaaaagaattcaagggaagctttttaaaaagaagggaagttatagcagaaggaaacttagaatggcaggaataaagaaggcataatgtatagggtaaatataatagacttctcttgaggttttaaaaattacatttgttatttgaaagaaaaaaattaacgttgttgtatgtgattctctgtagaggatatacagtttttttttgttgttcttgtttctgtttttttaaggtgaagtctctgtcacccaagctgaagtgcagttctgtgatcatggctcactgcagcttcaccctgggttcaggtgatcctcccacttcagcctcttcagtaactgggactacaggcatgtactaccacgtccagctaattttttttttcttttttttttagagatggggtctcactctgttgcccaggctaatgccaaactgctaacctcaagatattaatactatacagtagactataagaaattaagtatttgtatcatccctagagcgacacagatttttccctaaaaaactacagattattttcaaaagcattaataaattaaggtggaatactaaaaaagattcaggtaacccaggaacgagaaacagaataaaacaatagtaaacctaaattttattttatttcattaatacagcaataattaaatgtcaatgatctaagctgatttaaatctaaaaactg

SEQ ID NO: 1313 - DNA, 1154 bp, Homo sapiens
tgctcaattaactttcctggtcattctcaatgcaaacatatgacctggaaatcatgattaacaagagcagtcacagattttctgaaagaaacaacagctattttggtgaccttttctcatctcttccctggtcctgctgtatgccagtaggtaacaatagagactagactaaattttagtttaatatattacaggtctagaaggaataagagtagtatgtagttcttttgccttctttttttctaacttacttttctaaacatttgtttccaaagaaaaatcatctccaactttgcagagcatctaacataagaaagtttttgagttggctactcatagcactgtattttataaaaaaattaataattttttttggctaagaaatctcttttaaaagaaattattcacaagtaactgtcttttataaatgttcataaggctagtaatgctctactttttagtaaactaataagagcagagacttttcaaaatgaatggctatcttcttatatataaatatgtatgtatatatgtatatatatgtgtataagaatataggcacatatatatatatgtctgtctgtgtgtgtgtgtgtgtgtgtgtgtgtgtgtgtgtattctgatttcttccttttccccctccaatgtaaattctttacctgtactgatttgaaaggactgtatcatgacttgaccttgcaatttctaagaagttagtcttagtttggtattactacatgtattttattttattttctcattgtagcggactcaaagtttcagaatccatggagtttatttaaattaattctttggtttgtttgttcatttgtttattcattcactcacttagcatatatttgaaaatttactgtgtttcagacaccaaatgccatgacccgtgcaccttatttcattttcagtgatgccatataaaggctgtcatctaaaaggacaggatgtctcatgaaatgtgttgttaatattggcaaacactttcatcagtaactttaagttcaaatctttgatagcagctacatgaaaagaatattatgtcagaaagtgttgtcatgttgccattgtgtacaatgtgggtggtgctgttttagaggcaaagaactgttcactttttatgtttaactgtataaatataa

SEQ ID NO: 1314 - DNA, 1291 bp, Homo sapiens
cagagttctaatattctaatacatggtaattaagaaaaaaaatatagaacagagttatcaggtgtccaaatgtcctagatgttgttgtataggaaaaacaggaagcaaataaacacctggtaaaaagctttctcctgtcctatagcagttagaagttgtaaatttctttcatcaaaatttcagtcttggctctgtcactaacagcggccttagccaaatcactacttgtctctgatcctcagtttcctcatctgtgaataacaacatctacactatttatctcccaaggtttttgtgagaagatactgaaatatgtgcatgaaatgctttgagaattgttaatataaagtctaagatgtaaattataagagttgctgatatattaatagtaaatggtattgacagtatctaagactgataaggtcttttgtgtgtgtgtgtacagactttaatatctatatctatacataattttatacatgataatagtaattttcatttaaattacatttaacactccttggaggacttattatgtccattattttatgtgagtccctgagtaaccttgtgaggtggaccaagtgttgtcttatctttccatgttgataatgcagatctctgctttctgaccaaaaggaaagcctctcctctttggcaatttccatagcttctgtcagtccttgttgctgttgcccgtcacctccagattattccctgatatttatcaaatatgtggctcacatatgtcctctcctttcctacttctgagagtattcttaacattgaagtccatgtggatgaacattcagcactctgatgctttgacctcacactttcatcagttttcattttaagcactaaagcacccgatttttagaaacctacttccaaggcaagtcctcaggctttgacattgctccagacagctatatctgaaatctctaaatctgacagttcactcttggacagtgaccttctttacttccagctctcttagtttctttctccccctatagctatggttccagttcagcaggactttcattctttaaactccccacgatccctgcccctgatacagataaacatatgcactttctcatagtcaatgagcttcctctggatcttgcttccttctctgtgtagcctaggtcaattactttaagagtacccttgccaactgcttctattcctaccctttttatttgttactcccaatttggatcttgccaataatcgatttttcctgctccaaccaccagcagtcaggcgttgctggagaaaaacc

SEQ ID NO: 1315 - DNA, 1199 bp, Homo sapiens
aggaacctaagagcgcacaccaggtggagcaggtgctgctggcatattccaggtgcatccaggtgcgggcgtcatgctgggcttgggtctgagatcgtgtgggggtggcagctggaaacgttgtgggtgtcatccaagttttggctcagcaactcagcgtctgggtttctcctacaggcctgtggccaggagagaggccaggtgacaggggccctgctcctctctgtggttggaggaaagatgagtgaagggatcaacttctctgacaacctaggccggtaagtagtggttctgctcgtctcctgggccgtgatacatggccggccctcactcccagcagctgggcccctgcctgctctctgctgccattagagcccacagctgggctgcgactgctcagaccagccagctggagggaggggctcagcagctctgggtttggtcctgggagagcagttggattttaggctacccattgctgtatcaggacccagtcaattggcctagacgggatctctcagccgaacaagccctctccaggtggtaggtacagagtggagagaggctgagttttgatcacagtcggagaggctgagggaaggggtagaacggagcagctggtgacgtgggtgatgacccgggaggtcctgacgtccacctgctgggctcttgtctcccccgcccaggtgtgtggtgatggtgggcatgcccttccccaacatcaggtctgcagagctgcaggagaagatggcctacttggatcaaaccctcgtgagtgaccccagtgtcacagagggtgacaggagagtaggcagtgggtgggagtggcatcacccccagggctgatacagccaggccttccccgctgcgctggcgtctcctgccccctccggaagcttggatgcccctccacaccctcttgatcttccctgtgatgtcacctggacccctgctgctggcattggccacgaagcctcctggtctggctccaaagcctggcagggtcttttcccagggggagctgcaggcagggaacagtcctgatgggtcttccccttcactcccagcccagagcccccggccaggcacccccagggaaggctctggtggagaacctgtgcatgaaggccgtcaaccagtccataggtgagcctggctgcctccagctgggtggacagatgggggctggagaaagggag

SEQ ID NO: 1316 - DNA, 1199 bp, Homo sapiens
atttgtagttattaggaacaaaggtactattaaacatttatataccagtctttttgtggacatgatttcatttttcttgggtgaattcccaagagtgtaattgctgggtcatagggtagttatatgttacttactgttttttatctagtattaagtcactttacaaaattctttaagaattacagttttttggccgggcatggtggctcacgcctgtaatcccagcactttgggaggctgaggcgggcgcatgccttgaggccaagagttcaagaccagcctggccaacatggtgaaaccccatctctactagaaatacaaaaattagccaggcgtggtggtgcgcacctgtaatccgagctacttgggaggctgaggcataagaatctcttgaacccgggaggtggagattgcagtgagctgagatcacaccatggcactccagtctgggcaacacagctagactcagtctcaaaaaaaaaaaagaatgacagtttctaaaatatcgtgtctttgattttctaaattattatacaatttgctgataggtataattttgagttagatctttatctgttgatctggaggagtttctgggactttttttttttttaaagaagcacacaagttgcccagaaatgtatatagtataatccaaattttgtaagacaaacaataacatgtatgtatatgttcgcgattctataggcaaaagaaaagatgtgaaagatgttcactggcatgctaaccatggtttcgtggctggagtggcggaggtggttaaggggaggtgtagagggttgagtttacaaaaaaaggaaacagggataaagaaaacacattattaaagttaaatgatttagtagagtataaatatataaatatatttatatatttatataaaatatatataaatattttaatatatatttaatatataaatatttataaaaatataaatatttatataaaatataaaatatttattgcaaaaactttttaatgataaaaatattggaaccagcataaagatgagcttaccaaagttatttgcagctgttaaaaatagtgatatacgtgtgtttagaatgtatgttaaattcaaattcagattgcaaagcagtatgcattctatggccctgactactttgtgctaatatgattgtgattatgggcatttttgtttactttttaaaatc

SEQ ID NO: 1317 - DNA, 1200 bp, Homo sapiens
gggggccttgcaggaggggcagctaggaaccaaaacaatccctccaaggccaggaggaggacaggaggggatcccaggaccatgggcccaggaccctcacgcctgggagcacaacccgtcctgagtgggtccgatgtggtggaggcttgggagctcaggagactggggaaggactggagcgtcggaggaaagggggcctcccggaaagctcaaagtctgagcaggggatggaaaactctggcgtccccactcaacagcagggcggtgctgcggcgatccagtgcacgcccttgccgccggcgatggcgggaggctcttggaggccggaaagcgcagcgcagcggcccacagtgctccggcgtggagggggagagcagcccggcagggggcgagtggctgaggggtccctgatccgagccccgcggcctccgagtggggatgaagcctggagtcaggcaggcgtggctgggccaggctcttgtgtcatccaggcatcactgccggtgtctatggccataccaccctgaaggcgcctgatcttctctggtctgtgaaactaagcagggtggggcctggttagtacttggaagggagactgactgggaataccgggtgctgtaggcttttggcttcccgctccctacctctttcccttttttgtcgccctgcttcccaaccaccccctgactctgctaccccttttccacctgcctgcgcccccaccacagctggagacttcctcctggggctccgccactgcagcaccgccaggcagcagcatcctacctcttctacctcactgcagctccaccagatcccccactctagccagagcagggcgggccaggaccagacccagaaggcgcaggcccaggttccctgccatcctggttgccttcctgctccacgaacgcccaggcaattcaattcactcatctggtgccaccacaaacatccaagcctggggaaggggcgggcaggggcagagggtcccacagacaccagccaagacctcctccagaatgcatgggctgcattttccagggaaggacattgccttcaccagctgtgaggaaaacgtccctgtgcacccggattcccattgccatggacttcatgtaaactccaatcccgaggacatgagagagacccaggcctcaggcaccattggcacgcttggcgccatggctcccgccagaa

SEQ ID NO: 1318 - DNA, 1217 bp, Homo sapiens
tgggtgaggcaagagggggccttgcaggaggggcggcgagggaacaaaaataatccctctgcggcaaggaggaggacaggagggtatcccaggaccgtgggcccagggccctgacgcctgggagcacaaactgtcctgaacaggtccgatgtggtggaagcttgggagctcagtagcctggggaagccctggagcgtcggaggaatggaggctgcccagagaacccgaagtctgggcaggggatggaaacctctggcttccccactcaacagcagggcggcgccgcggtggtccagtgcgtggccttgcctgtgatggcgggaggctcttggaggccggcggaaggcgcagcgcggcagcctacagtgctccggcatggagtgggagagcagcccagcagcaggcgagtggctcaggggtatcccaatccgagccctgcggccctggagtggcagtgacgcctggagtcgggcgggcatggctgagccaggttcttgtgtcagctaggtatcactgcctgtgtctatggcagtgccctgaagatgcctaatttcttctggtctgtgaagctaagcagggtggggcctggttcagtgcttggaagggagaccgcctgggaataccgggtgctgtaggcttttggcttcccgctccctccgtctttctcccttttgtcgccctgcttcccaaccaccccctgactctgctaccccttttccctaccgcaccccagggcctcctcgtgggggtccaccgctgcagcaccgccaggcagcagcatcccacctcttccgccttgctgcagctccaccaggtccccaactctaggcagggcggggcaggccaggaccagaccccaaaggcgcaggcacaggttccctgccatcctggttgtcttcctgctccaggaaagcccaggtaattcaattcactcatctggtgccgccgcaaacgtccaaacctggggaagttgcaggcaggggtagagggtcccacagacgccagccaagaccccctccagaacccatgggctgctttttccagggaaggacattgcctttgccagctaccaggaaaacgtccttgtgaacccagattcccattgccaccgacttcgtgtaaactcccgtcccaaggacaagagagacccaggccacaggcgaggattctctgacttgcacccagggtgcttgtctcgcccacgggggcactgggcg

SEQ ID NO: 1319 - DNA, 1187 bp, Homo sapiens
atattataacactatagctgtggtgtgtaaactcattctatgtaggaagactaaataataaaccaatcaagagtaataactacaagaacgtttcaagacatagtacaaaaaaatataaatagaaacaacaaaaagttaaaaagtgaagggatgagcacacccgtcctgagcgggcctgatgttgtggaagctcgggagccgggtgaaggcctggagcatcgccagaagggagatcgcccgtagacccctaagcctgggcaggggacggaggcctctggcgccccagagcaacagcagggcggcaccatggcggtcctgcgcgtggcccggcagccggcgacggagggaggctctgggaggcaggaggaaggcacagagtggtggccagcagtgctcgggggaatagagggagagagcagctcggccggctcggggatcccggatccaagccccgcagccccggggtggcgatgatgcctggagtccggcgggcgtggcagtgccgggctcttgcggcatccaggcgccactgccagcgcctacagccatatcaccctgcccgatctcatctgacctcggaagttaagcagggtcggtcctggttagtactcggatgggaggccgcctgggaatgctgggtgctgtagggtttggcttcgccctccctctttccaccttttgtcgccgtgcttcacgaccttcccctaattctgctcccgcttttaccgtcacctgcagccccgaagcagcctgggacctcctcgtgggagtccaccgctgcagcaccaccaggcaacaggatcccacatcttccgccttgctgcagccccaccaggtgcccagctccagccggggcgggggcggtacatgttccctaaggtgcccggtgtcttcacgctcccgggacgcccaggcaattcaatttactcatcaggctccatgcaacagctcaagccaggggaagtggcggccaggggcagagggtcccacagacggcagccaaaaccactgctccaggacctatgagctgctttccccaggggaaggacactgccgtcaccagtcacgaggaaatctgtccctgtgcaccccaattcctattgccaccgacttcgtgtaaactccagtcccgaggacacgagagagacccaggcctcgggccccgtcagcacgctccatgccatggc

SEQ ID NO: 1320 - DNA, 1131 bp, Homo sapiens
cctgaaattgcttactgtactatttaaattgctacttaatatttcatttggttaatacttatgtattttttgtccatctcttccatcaacctttctttgtcttttgtggacaatttaatgctagattttttttttttgtaaatcaaatctaaatcagtcttttgatgactaaatttgaaaaatatatgcttattgtatttattattgtatggaggcttatttctcccatcttattttagtttttattcatcgtactttattgtttattttttcgatcttttctatgttctgtcatgttgacaactcagattttaaactttttgtttttaagttacaaggtctattgttctcttatctctaacttaagattcattgcatttgtttttttcttccaatgtgtaaaagttaatctgtcttcccctgcaataagaaacctcagtagtctttcaactcactcctctactatgatctctttttctttcatgttggcatcatctggagttttcattctatatgttttttgcttactcaggtaacaataaatttactaaggtatttactctccattggttaccttatctcttggctttctctggaatgcacttctcttcttgttggaacacatctttcaagatatctttcaaagaggactcatcattatgtgatatactttataagacaaagaagccactagtacttcttcctacgccataaatctgtggtcacatataaaactattctgtttctttactcatttgttcaacggctatgttgtatgtaggccacgtacttgtcctagacctgagaaaagaaagtcaacaaaaatctttgcctactaacgtttacacaagacacagcagggaggggcagaggatactcgaggccagatcagcagttcctggcaatggccccacactatggcagggctccagagctgccaggatattgccatgtagtttctggatggcactgaacaggttctgctgctttctcattataataactgggcaagtgatatttttactaggcaactcagagaaaaacaggccaactagagagctcttcccaatccatccctaatctgtggctactgaatcttcctcgattataacttttctatccatattagga

SEQ ID NO: 1321 - DNA, 1203 bp, Homo sapiens
gtttttagtaatttctcaataaacatattcaacagattttaatggagtatctttgatgtgttaggcatcatgttatatgatgtggggggtatagaaaaaggaatgagataatctgctgttgaggagcttgtaatttagaaattccctccctgaataaatctctttgatttaccagtacttatgctactgctacaatatgtctggacatggtagatacttaagaaatatgtatgcaataaattaataaataattttaaattaccattcatcttcccttataggattactttgttatatattcttcaaagaaaatgtaatgcatttcttggtcttcgaacgggttttgaataaaaacagatgtctgcatggttaaattgcacaatcattgagattaacttatatatgtttcaaatataaatacttgaacagttttaattgaattgaagtgaatttaacataaaattctcttatgttctttctagaaatgagggcctaaataattttggtatgaatcacttatcagtttaagtactgatacaatgacctgtattcaatgactcttttacctaaaaaacagaatgtcaatgattacatcatgctcccaggaggactgtaccttccatgttgacgtctcttaatctgaacagcagctaataggagttatgagatcatcagtctcattctcccttcaggggtggtctcgtgtcagaagacactcagaagttttgtgtacctttagatttgtgaagtggaataaatgcctgatattttaacaaagatattcagatactgtgcagcatgcagcagcctcgagcatcataatcctatgcagcagcattaggtagaacgacttagagtggaacctcagaaagcacagtggcagcagtgatgaagccttcttattagatgtgggcatctccacagtggagtaaggccatacaaagggattattacagcacaggaagtctttaaaactctcagggtacattgagtgagctcttggatctggcactatttctttacaggtcttatccttttatgcttatatgtgagagcaaaagagaaaggagtttgaacattctatcctgctgacataggatttttttctgctgtattaaattcaaaattctactttggatctagatatgattcacaggtatcacaaagcatatttcttttgtagtagtctaccaatctcagatc

SEQ ID NO: 1322 - DNA, 1203 bp, Homo sapiens
acctatttttggaccatggttgaccttggattactggaactatggaaagcaaaactgctgattgggggtgaggggactactgtatagtctttgtgagtggattaaaatttacttcattaaaaccaaaaaaaatggacaactcctgtcacttttatctagtgattgtttcttagtagaagtcaaagaaaagggcagtgcagatactggagaactgaaatgtgcaggttggtgataatatgctgttatattgtcatctccataattaacctatgatggtagtgattgtattgaggataatgagacctgatttttgtacagatgtcttttaaaggttaatgtgcttgggaaacagtctttaaaatatataacagcagtgttacttagggatagggattttgtctttcatttattattttaatcatacaatccccttgttagagtggtaaggaatgttttctttcatggtacctttgaaataatcatttatggtatgtaaattccttgccagcaaatatagtgtatttcctcccattgaaaactttcctcccattgaaaactgctttaaggtttttttttctgaacattgtcctgaacgtatccactccattgtcttttgctgttaaagagactgtactgaattgtgttgcttatttctatctttaagataattgacgattatttatctattatgtgtctgttttcattagtttcattgtcttctattgggggtctcaattataattcttgccccagagttctgacagttttatattgttctccagttttatattatatctctgacagctttatattgttcttcagaagtttcagatcatatgaagtcctaattttatattgttctccagaagtttcagatcatatgaagtcctaatgataataaacattttttaaatctagagggtttaaatagtactcattgtaaatctctaattatctgctttagaaattctttgtagctttggaaaagcttaaagaaacacttaggattctgtcagtagaggctttcttacatacaaatatgttttcattccatgtttttttttttgcagtacattctctattgtgattgtcaaaactgtaaggaccccatgtaaagcaaaagagtaaataatgttaaattgactttttacttgaatctggcattaagggagggtagtttgaagcatgtctgatttttttaaa

SEQ ID NO: 1323 - DNA, 1193 bp, Homo sapiens
cttgtggtgagactgatggaaataatgcagttacaactaaccaatatcataattggaaaggaaatcactataggtgctgtaaaaattaaaaagataatagaatattatgaacaattttctgccaatattattgaaagtttagataaaatggaaaattcatttaaaaatataatttgacagtattatgttatgtgaatactataatgataatcctgtaatcattaaatgaaccagtagtttaaaatttttccatatagggaaggtcagggccagatgtgttcaatggttggttctactagacattcaaaaaaataataattcaagtctacacaaactttcctgagattagaaaaaataaagaagagtccccccacctgtttcttactttatgagaccacacctaaaagatagaagactgctttgcaaccaagaaatccttcatgaacacctctttaatcacaagtcctcaactccaaggttagctttatttcaacttttataatacttttcttacttttcttgatagctttaccacccatgtattcattcctaaaaaatacacagttttgtctgattttgaattttatgtgaatggaattgtacatatctgtgtttgtgtcttccttgttttactcaatactgtttctgagatcaatcacattatttgttaatattttgtttaggatttttgcatctctatttcagtgtgtgtttggaatgtaaatttccattctcagactatcttttggcctgaatttggttacatgagtatatgttctaaaaatattacttacactttcaataaattttaaggacttttatattgttatgtatcaaattttttagaatgcaagaataaatattataaaacatcctttggtttgaggaaactactaaatctgttaataatcctttcagctctattgaaacagattcgtttttaaaagctgccctgtttttgctttggggtttggggaacacacacacacgcagatgcacacaaacgaacacatatattgaacttgcatatatatatatatatatatatatatatatattttttttttttttttttttttttttttttttcttgagacagagtctcactctgttgccaggctggagtgcagtggcacaatctcggctcactgcaacctccgcctcccgggttcaagcaattctcctgcctcagc

SEQ ID NO: 1324 - DNA, 1170 bp, Homo sapiens
ttgcagtaatttggaagaagtccattgaaatgcaatagtaagaagtgtagattagtctgggcacagggctcatgcatgtaatgcagcactttgggaggccgcagccggagaattgcataaactcggtagattgagacaccagcccgggcaacatagggagacctctctctactaaaaataaaattagttgagcatagtggagccttcctgtagtcctagctactcaggaggctgaggtgggaggatcacttgagcttgggagattgaggctgcagtgagctatgaaagcgacattgcactccatcctgggcaacagagccagacatgtctcagaaaataaaaaaagtgcagctaggtcaattaaaatactgattcaaaaatattttggcaatgatggccaaatggtatgtacattttggtattttaataccttttcaagaatgtaattttaattagtaaacctaagaagttttaaaagttgaacgttttgaacctctaatcagtttatattttatatatatatatatttatattatattttatatatattatatatatatatttaaagctgtgttctgtattcaagggatattcaccataaaggtatctgatctttgatatacttaaggtattttttttctttgttagattatctgcgtcaaagttatgggctgtccatggactttaattcgccaaatgattataataaattggtgctttcactgttatctggactcccaaatgaagtggactttgctattaacgtatgcactctcctatcaaatgaaagcaagcacgtcatgcaacttgaaaaagatcctaaaatcatcactttactacttgctaatgccggggtgtttgacgacagtaagttttaagctgaatgtattatataattcttctgtaaaagttttttttttaaggtttttaaggagaaagtactttttgtttgtcaacataatagcattctttattttctgtttttatattatgcattatttaagataatgaatgtttggggggttttaaccttaaatatttgaatagtaattttgtctcagtgtttttgaagtaaaagtcctggtttttaagttggagtaatatatagatttcctgagttgagacgattgcttgctacaagattttgacaaagaaaactaggatctggaa

SEQ ID NO: 1325 - DNA, 1169 bp, Homo sapiens
aaattaggccagtctgggccgggtgtggtggctcacgcttgtaatcccaacactttgggaggccggggtgggccaatcgctttgagctcaggagttcgagaccagcctgggcaacatggcaaaacccgatctctacaaaaaattagctgggcatggtggtgcgtgcctgtagtcccaactacttgggaaactgaggtgaggccatcgcttgaacctaggaggttgaggttgcagtgagccgtgatgccgctgcactacagcctgggcaagagggtgagaccctgtttaaaaaaaaaattatgatggctgagtctgtgtcaaagaaaattaacttattttttggtgttaactaaattatctttaggtaattacattttatatagattgtgatgatatatggcagtagttttcctattactactacttttttttcttgtttttcctttgtgtttttgtaataccagtggagccttttcttaaaatgaaactaggcaaacctaagacaattatgcttaaggaaaaaaaagggggggaatcttactcagaactgttttttgaaacggatcaaatggaatggctcagagcaggtgtgatggctcctcctgtaatcccaacactttgggaggctgaggtaggaggatcgtttgagcacaggagttcaagatgaagcctgagcaacatagtgagaccctgtctctatgaaaaaagttaaaaaaaaaaaaaaaaaaaaaagctaggcacggtgatacatgcatgtatcccagctacttgggagggtaaagtggaagaattgcttgagccccaggagttcaagcctgcagtaagctgtgatcaggtgactgcactccagcgtgggcgacagagtgaaaccctgtgttaaaaaaaaaaaaaaaaaagtaacagcttagattaaaactgtcataattcaaaattgtaaaggaaggctgggtacagcagctcacgccattaacccctccaaggcaggttgatcgcttaagcccaggagtccaagaccaccctgggcaacatggtaaaaccccatctctatgaaaaatacaaaaattagctgggtatggtggcatgcacctgtagtcccagctactcaggaggctgacatgggaggatcatctgatctcagtctgggaggcaaaggccttagtgacccatga

SEQ ID NO: 1326 - DNA, 1109 bp, Homo sapiens
ggggtagagatgccaccagactacaggtgaccagattggcctgaaacatggtgtccagtaaaaacggggaggaataagtccatgactgctggagagcttggtggtaggaggagggtgaaggagggtgagggggcctctcatgggtcagaaacctccagggacatccctcagctggtaactctgctgttgtccggagggttcaggcttggtgtgccttcttctgtttgtctgacttttggctcctatggttcatctcctgccctgcccaccacagaaaaggatgctgctgcatagcttctccaatgtaccagtcattgaggccagcgcgcagcacttttaatgtttttagtgctagtaactgtgttttaactctccaggaataagctgggaggttagaaaacaagaaaaaagggggaaaaaaaaacctctccacccactttccttttttacagttacagaccctgttgagaaaaagaagcacccagatgggtgatggtgatagggcttgtggtggacacagggttgtggtaagattcctcagtgcttcggcgagcacctaagactattaccctggaactgactgctttctagagcttgattcatgcctctaagccagtggttctcaaagtgtggcccctagaccagtagcatcagcatcatcggggacctcattagaatgcagattctcagccccctcccagacatggtgaagtcagaagctctcagggagggactcagcaaatgattctaaagcgcatcaagtttgagaaccaccctaagccaatgagtctcccttttacttcccattagtcctccctcaccagatgattcctaggactcatggtgcaacatacaggagccaggctttagggaggggaggaaaggagcctggcggcaggggtctctgcaatggcaagaaagtgagtgaatccagcgctgccacctggttatccccttctcgttgaaaatagcagcgcaggtgcaaattcctaaacacaggctgcctgcactcggtgttacctcgggctgaggcatgataatattttattttttaaagctgtgaggaaatgaaagtgaggctttggttggggcgaggcagttgtgaaaga

SEQ ID NO: 1327 - DNA, 2202 bp, Homo sapiens
ttttttcctattttcccatccttgcagaatcagattcataaaattttagaaagattctcacagttcagccatggttgtgacaaactctgaataccagaggacacaaagggagaggaaaaactgttctattttttttccccaggtacatgtggaaaaattttgctgcactgaaaataacccttgcctttctcttgctccaggctgcccttttcttgggcctgggggtgttgttctccttggtcagcattcccttggtcatctatgactgggcctgctcatcgagtagtgacgaaggccactgaaacccgccgagaaaaagaaacatccctgttgtctgctcagtcaagtccccacacatcagcaatctctcaccacttcttttgcaagtttacagaagcaaacagaaatgtacaggatacttaaaatggaataactttttggttgcaaaacagagacatggttctataatgcttcatgtccctccaagatttgagatcaatttagggattgtgaaatttttttttcaaatttcatacaatcatatttcccagtacttttcacaatcattttttacccatctaactctatgttttgtggcttcccggtctcttagaactttgaaaacatgatatacaataatgtttatttattatacatccagattctgaaataattttcctactgatgttcagctcacactatctgtacctttttagaagagaaaagaatcttgaattgtatatatttattttgctttacagaaaaaaatggtttcgtaaataatttgcctattttggttaacatagcacatggagataatcatctgaaagttatagggcactgccactgctgaatcagagcatgcccaatatttgaggtggctctgatttcctggcagctgaactcgggtagtccagtggcctagctggtaccacatctattcccatccagagacattctctggcaagtgttctcagctgaaaagtggttggggatgattcttaccttggtaattaaatgaagctacacatttgggtaatctagcaaatgaagtattttttccctcttggcaacttgtgtcagagttactctggtctgagtcaactttcgctggggaaaacctatggaacctactgcaaaaagattgtccaaaatgcctaagaaaatactcctctgatgcatttagccttcaaccctacctgtcttgctgaagggagaaaaatgttttagtacattataggcccagcagcttttattcatgtccaccagctagttgcacagagaatcatgtgtacctaactaaggatgatctaggataagtaactcctgttttatattgagtattttagggaagtctttaaaagacttgttttatatctataaatctaggttattacaaatacaagaattttgtaccttaaataagcctcatttctatttcttcttcattaattctccatctagtcttgtgaaaaaaaaaaaaaaaaaaccctcagagatagtctttgtgaagagcttctgacagaatcactgagtaccttccttcccccagatgaggaagacaagggggtctcagtgtctgtgctgtctcctcttctcttccccaaccaaggactgtgccattactgcccgtctcaactgtccatgcaggaggacagagttgcctggtactcttacccttgtccctctcctaaagggagcacaaggaaactgaagagactgaaaaagaagagagtttgtagctgaaaaagaatagggatagcaaggaaacccagaactgcattcccctaagtggggccatcccatgtgattgaattgtccatagcttgcctatggtgagaaatgtgcatgctccgtgagctggtctcttgaaacaggacttatgcttcctctatattctggttaaattttccaaacacataagttcactgagcacagatttcttatccagagacaagtagaatctaaccgcagactgttggcagagtttccaggcacttagccatgttcccttcctgactcaaatccccaaaggccttcactctcactgagaatcacactactgtcccatagataaggcaggcattgaagcacctgtcgtgatcctctaggggggagaatgaaaggttatttcctgcattgcatcatcatagcttttaatataatgctacagaatcatatccacattaggttagagttcag

SEQ ID NO: 1328 - DNA, 1146 bp, Homo sapiens
cgagctccccgccgcccctgccacttcggtccccttcccgccaacccgggccatctgcaggctgtgcccagggccagccctccgctccaacgctgcccgtagtcccaggcgctgcccgcggctctccgggctgcgctcggacctgccactcccgcggccatcctcatgctgcgcccttcccacaatgcaactccctcgctccttcggccccggcggggctctggcgtacccaaaatgcaggccccagcggaacgcacagccctcctgtcctccgccggtgcccctttagccgccccacccccatccctaagggctctcattctccagctgcagccgcagctgggttccgaacacgccgccgggccccgggagggagaggggcaggtgccagggcggcgcgcagcctctgctcccggtgccagcttcagtgcgccgggcacacgcgcgccccgcaacccctccctcaccctttccccgttgctcaatctccgccagccgcggtcgctgcatcgtcagagagctgcaagagggaggcagcaaggtgcggccgccagcagtgacaccatgtgaccggcacggctcactgacacgcagctttggttaaagagcgggcgcacaggaggggaggagaccgcgcgcgggacggggaggaatggcctgtccgcgttaaaccatcacaagccatggttgcggaagggccacgcgtcccccagtaggagaatgactccgattcgtgaccctcagcgccggtgcatgtcgatgtaagtgcgaggccggcgagcagagtgtgagtgggggttggtggtgaggggagattctgatgcaatcggcccggaaaggaggagagccaggcgagcgcggactggggcggccacgccactccgccagaaggtcgccaggagcctccgcccttcaccttcctccgaaatccgccaggccacgccaagctccctgcccaacccttactgacgggggccacattttcccggcctccgcagccagaccttgacacaaaggacatcaaactgccgagggtaaaaaccccggaagggcggacacctccacatcgccttttgccacctttccctttatttccggaggtaaggtgattatccgttcccggggagggctgggcgagcggcaagg

SEQ ID NO: 1329 - DNA, 1133 bp, Homo sapiens
caagttaaatattctttctatagattatatagtggatagattttagtaattaaagcacatttcaaaaaatagaagaaatgtttagcatatatgttttattacttgctgatcaattttctctatgctctttgcaggctttgttcttcctgttaagtggtgtactggtgatgaccggaagcatggccttgattgttttggattgggtacacaatgcacctggaggtggccattaattggcaccactcaaactcaaactcagtccatctgatgccagtgttgagtaaactcaactactatgaaatttcacctaatgttttcagtttcacttccttttgaagtgcagattcctcgctggttcttctgagtgcagaataagtgaacttttttgttttgttttgtttttttaagaaacttatctgtatgttagaaatggatatgaacaacaaaaccacgagtctcgggttaagggaagtgacaattttattccattccagagaatggacaaactcttaacttttatcaagccacatgcttggctgtgtcattgtttaacttggatattttatgattttacttgaatgtgcctaatggaaccatttgatgtgagaaacaattctttttaatttacagcaaaatattgaataaccattgacaaaaacactattattttttgtaccaaaaatacttaaagacctcagaagcactcttttacttttaagaaattgcttttttgaactttattcagaagcagttatcaataaattccataaaataatgtcattggtatttaaaaatgaatattaatataatgaaatggtttgcctttttgtaggcataataagccaaatacttttttacccaaaataatttttagagaaaatgatgtaatgaaaaattgtaccatgaattaggagcatagttttttccatttaaacgtcaccattacttaaaagatgattgattattgctataccaaatcagatgaactctgttcatcacttttcttctctgtccccaaacaatttggttcattcagactgaaatgtttgtgtcttcaacttattagaatggaagataatgcagatatttctgtgggaaataaaataactaattttgaggtaccaaatagtgca

SEQ ID NO: 1330 - DNA, 1148 bp, Homo sapiens
ccagtataaaattgaaaaagagtggtgaggggaaatatcttgctttgttcctgaccttagagggatgctttcctcaaagtttcttagaattaagggtaatgggaattgtggttccttgtagaagttctttaccaaattgaggctattcccctctattccttgtctattgagttttgttttgttttttggtatgaatcagtgttggattttgaaaaaatgttttttctacatctattgatatgatcatgtgttttttttctttagccttttgatgtgatgaattgtactaattgatttttgcacattgaaccagccttctatgcatgggataaatcccacttggttatggtatataattcattgcatacattgttgggtttgatttgctaatattttgttgaggatttttgcatcagtgttcatgagatatattttttttcttgtaatgtcattatctgtttggtattatgggaatgctggcctcaggagttaggaaagatatattagaaaagaagacagacctaacatcaattatccaagctgtcaccttaaggaactagaaaaagaagaaaaaataaatccaaaataagcacaagaaaagaaataataaaacttattgcataaattaatgaaattgaaaacagaaaatcaataaacaaagtcaatgaaactggaatctatttctttgaaaacattaataaaattgatgagccccttgccaggctaagcaaaaagagagaaaacataagtgactaatatcacaaataaaagagggacatagctgcttctatcttctgaaagagatttttcagaattggtttaatttcttccttaaatgttggtagacttcaccagtaaacccatctgggtctaatactttctattttgaaaaactattaattattgattcaattcctttaatagatattggcctattcagatagtctgtttcttcttgtgtgacttttgacagattgtttctttcaaagaattaatccatttaattcaagttatcaaatatatggccttaaagttcttcatagtattctttgatcatccttttaatgtctgtaggatctgtagtgatgtccctttttatttctaatattagtaatctgtctttcttttttattagtgagcctggaaga

SEQ ID NO: 1331 - DNA, 1179 bp, Homo sapiens
tactcagatccttcggcggggaaagaggtcccttggaggggtctctggctgggaggtttctctgagcattgccccccatccttgctcacccatcagggtgaagagacacctgtgccctggtgagctgtggaggtcaatgccggcagcggcgcgggaagcggggcgccgcaggctgtgtgaggggtgggggacaggatgtgcaccccccaggcctggggtctgttggtgttggggagtgtgagagcaggcggcaaatttggcggatgggctgggttcccacgaccagagtttctaggcctgtgggccaggagagagccctctggggcccgcaggccacccagtgccccacccccattgcttcccgctgtggctgcccgtttgggtctgacctccccagccacggctgctcctcactccttctccccgctggctgtcttgcgcacccaaaggcctccccctgcatctggacactggctgtctcgctgccaacgctccctgcccactcccctaggcaacatctgcctgaggcccagctctgcctgccgctttctagggtgagaatggggcatcggccctcagcggccctgctgggagctcaagatcaacttctcagcctgttccctggacttgcatctggacctgtgggaccttcctcaggacccctattcagctatagggctggcaggagactgtgactcaggtccctgccctccaatgagacgctttggcggccctttccccctcccaggactccataggctgctaggctgccgctacccatgggttattaagtcattttcttcttctctgcagtcatttctgagggaaactaaggcacagagtagtcccagtgagtggtacccagcccagtgaacctagactggaaccaggtcttggacctattgggactggtcctctgcctttagtcccctgatgtccctccttgcccagcagggccaggctcagaggcaagctcagagctgcctcctgatgttgcacctggaatggtcctggtgcagtgttctccagaggcctctgtgtcccttattcggcgggtgtctctgtggccaccgggtcttacagtgggttttggggcagggaagtttgcatgtctaagctgttcactccactttgacactgaagttcagtttccccatcagtaaaatggggagaaaattc

SEQ ID NO: 1332 - DNA, 1267 bp, Homo sapiens
tctcctgtggggtaaaatcattctcgattgagaagccttgtttggaaggccacctcctggcacagtatctctgtgaaagtggaaagatcttctggcctcctggttacataaccatgaggatatgtgcctggggcccgtgggtattgttctctgaacttgcaaaaaatttcctgggacatttttctggcttatttcatcccccaaacataattaattcttcttggttttcttttccctagaacttcagtgaagatttcatacattggcctcatgacccagagctccttggagacacatcactatgtggattgtggaggaaattccacagctatttaacaactgctattggttcttccacacagcgcctgtagaagagagcacagcatatgttcccaaggcctgagttctggacctacccccacgtggtgtaagcagaggaggaattggttcacttaactcccagcaaacatcctcctgccacttaggaggaaacacctccctatggtaccatttatgtttctcagaaccagcagaatcagtgcctagcctgtgcccagcaaatagttggcactcaataaagatttgcagaatttaatacagatcttttcagctgttcttagggcattataaatggaaatcataacgtggttctaggttatcaaaccatggagtgatgtggagctaggattgtgagtgacctgcaggccattatcagtgcctcatctgtgcagaagtggcagcagagagggaccatccaaatacctaagagaaaacagacctagtcaggatatgaatttgtttcagctgttcccaaaggcctgggagctttttgaaaagaaagaaaaaagtgtgttggctttttttttttttagaaagttagaattgtttttaccaagagtctatgtggggcttgattcacccttcatccattggctggaacatggattggggatttgatagaaaaataaaccctgcttttgattcatctgtgtctcctctgattgcctgggtgttttgtagggatctctgggggaaccgtagaatagttcccttccaagtgggtcaggatggaataggaggaaagagactgcaccctgattgtactcccgttcccatgagttcctgtcacagcaagcagcctcattttcttccatctgcctcttgcggcagggggctaccctgttcccttccaggacagagcactcagtgccccatggaggttggaattcagtcttgaataagacatcctggtttgaggttgtaagtt

SEQ ID NO: 1333 - DNA, 1212 bp, Homo sapiens
atttggttccatatgaatttcacaattgctttttctaattctgtgaagaatgatgttggcatttcgatagggattgcattgaatctgtagattgctttgggcagtatggtcattttgatgatattaattcttctgatttgtgatcatgggatgtttttccatttgtttgtgttgtctacaatttctttcatcagtgctttgttgtttctcttgtagagatctttcacttcctcggtttaatttgtcactataggtattttgttttacttttgtagctattgtaaatgggattgctttcttgatttctttcctagttaaattactatcattctatagaaattctattaatttttgtacatttattttgtatcctgaaactttatttaattcatttatcaaatctaagagttttttagtggagtctttagatttttctaggtataagatcatatcatcaactaagaaacaatttgacaatttgacttcctcttttccaatgtggatgccttttacttctttctcttgcctgatttctatggccaggagtcttacagtgctatgttgaataggagtggtgaaaatgggcatcctcgtctttttccagttcttagaggaaagtctgtcagtttttccccattcagtttgatgttggctgtgtgtttgtcatatatggccttgattattttgaggtatgtttcttctaagtctagtttattgagagtttttatcatgaagtgatatttaattttatagaattcttttctccatctattgagatgatcatatggcttttgcccttcattctgttgatataatattatcacatttattgattttcatattttgaaccatccttgcatctctagtataaatcccacttgattgtggtgcattatcttttttttttttttacttttattttaggttcaggggtacatgtgcaggtttgttatatggataaattgcatgtcatggggctttggtgtatgattattttgtcaccaaataggtagtttttcagtattatccctcctccctccctccctctgctctcaagtaggccctggtgtctgttgttcccttctttgagtccatgtgttctcatcatttagctcccacttataagtaagaacatgcagtatttggttttctgttcctgcattagtttgcttaggataatgtcctccagctctatccatgttgctacaaaag

SEQ ID NO: 1334 - DNA, 1240 bp, Homo sapiens
tctcttttttctaggacttggatgttgtgggtgatggtatgcagtgtcctccttcacctttgctttttgatccttcactaacccttgaagatcatttagtcaaagaaattgctgaagacccagtggatattttggcaagtgaagaacagtcccacctgtttccctcatgtagtgacctggccaggcagagggttccctgctagatagcatgtgctcctggaggggagtggggtgtcatcactagtataaagatgctccacatgtctctcacttattgaataccatataagcaaagcacttttaaaaatgccctactctgctcctgtgtacccttgttgctgtagttctccagatgggctcttagaacacctaatggcccgtgatcctcatatcccagagtaggacatacatttatttaaataaaagcttgagacaaggaatctagggaaatcataccttctgagggagagttcatcactgaaattgttctcattgtagaaggaccagtaaagtaatgtgatttgagttctgtccgtgagccttgggtagaattccagtggccctgactgaagaccagcagttgtactgtggctgttggtttcaagcagaggcctaaaggactgtcttcctgtggtctgttggctgttctgggacctcagtagggaatggctatttcatttggaagaaacaacctacagctcaccatcccattggaagaggctcaggaataggctcttccaagggactaggatagctaatatgggaagagcatctgtccagaattaatttctgttgtattgttcttattgctagtttaagtggccactgataagtcagattcatacttcagaccacagtgaatgaattactaactgaagtgcctttatttcttttaacagggccagatgcagatggctggagatgggtgcagatcccagggatctcgaaattctgagaaagcctctgcaccattgtctcagagtggattggctactgcaaatgggaagccagaacccacttctattagttgatagtttggggaaccattttactttggtggatttaaatttctcgttcttcaaagaagtatttctgatcatctctcacaaaacacaggcaacccagactaccttgtttttcttctggattgagtattatagtcaaacgtaaagccaaattttgaggacgtggaccgtgggtttcttcccactcagggcaaggaagagaaagagagataatc

SEQ ID NO: 1335 - DNA, 1240 bp, Homo sapiens; identical to SEQ ID NO: 1334

SEQ ID NO: 1336 - DNA, 1240 bp, Homo sapiens; identical to SEQ ID NO: 1334

SEQ ID NO: 1337 - DNA, 1211 bp, Homo sapiens
gcctcagtgtcctgagtagctgggactacaggtatgtgccaagacgcctggctaatttttgtatttttagtagagatggggtttcaccatgttggccaggctggtaattttttgtggagactgggtttcaccatgttagccaggatggtctcaatctcttgacctcatgatccgcccaccttggcctcccaaagtgttaggattgcaggcgtgagccactgcacccggcctgagcagctttaagtagattttaaaattatatatattctttaatgtgaagatgttgtgattctcatttttggtgattagcacaccaacaaatgggaaaggattgcaaattcttagatttatttaaaagcgtagaactaagcttctcgtgaagctagatgaatagaaacacggagcatctataaactggattaaacataggggggtacaaacctcctggatatttttaattcttaggaagaaggagaatttagcaccagactcttgaaaagcagtggcatgaaagttagtttgatatattgtttgagtttgtattgccttaggccctgaatcaagaccaatggtttgctgtagctgttggtttcaaacaggagctaagagtgatgtcttccttgtggtctgttggctattcagtattccagtgcgaattgccaattcagttggaagaaacatagtctagaatgtaatgtcattttttttttttttttttttacagagcaaaactatgttaggcttaagaaccagggagttggccgggcgtggtggctcatgcctgtaatcccagcactttgggaggctgaggtgggccaatcactggtcgggagatcaaggccatcctggctaacatggtgaaaccctgtctctactaaaaatacaaaaaattagctgggcgtggtggcacacgcccatagtcccagctactggggaggctgaggcaggagaatcacttgaacccaggaggcggaggttgcagtgagccgagatcacgtcactgcactccagcctgggcgacagagcgagactctgtctcaaaaaaaaaaaaaacaaaacaaaaaaaaccaggttgttgctctgtcgggatagggacttaaccaaaataatatttcctagccattcagaggaactgtgagttttctgttgtccttcctttcttcctaccttctccctttcccttgttggagcttgtttgcttgctttgtggc

SEQ ID NO: 1338 - DNA, 1181 bp, Homo sapiens
ccagtctgctaagggagcagagacattgtatcgcttgactcttttggaagggctgtttaggggcattttcaaggctatttgcatttgccactacatgtttcttctgaatatgtgtgtgttcctaggagtgttactgctacttgcttaagggagaatgggatggtgtctagtttaaatgaccaggatcctgaaaaggaggttggggacaagttttaaattactggtagagctagaatttgatgctagtaaatgacatttattttgagaagtaactttaaaaattgctaactgcatttggtattctgtatcaaatgtagttgtaatttatcttatatagtccacaccttgagttttatgtggcagacaatgctatttgtattttatgctttcgatagattgtgttttatttcccttgaccatttttctacagatatttgtcaggatacgaatcaggttctcttcaagtgctgccagggatctgaagaggtaccctgcaacaaacctgttcctgtaagcctctctgaggatccctgctgcccactgcatttccagttgcctcctcagatgtataagcccgagcaggtactgtctgtgccagacgatctggaagccggccccatggatctgtacttgagtgctgctgagcttcagcccactgagagtttacctctggagttcagtgatgtaagttagagaagctctgctttggttcaggcccttgagacaaagccttatttattaatggtgagaataggttagtctttgtggttaggagaatcgacaaagtttttgaagtgatatatacgtatagttgtatttatatgttagcatattcatttagagaaatctaccctaccttatatttttttccagactcttcccatacctttttagggatacaatttacatactataaattgcactctttgaaagtgtataattgagtgatttttagtatattcgcaaagttacgcaactaccaccactatctaatttcagaaggttttcaccatctccaaaagaaactcagtacctattatgacactcttcattttcttctcccctcagcccctggccacgatgaatctactttttgtctctgattttgcttattctggacatttcatatcaatgtaatagtatatgtatccttttgtgtcttgcttgtttcacttagcata

SEQ ID NO: 1339 - DNA, 1172 bp, Homo sapiens
gaacgctgtcctggctgccgccacccgaacagcctgtcctggtgccccggctccctgccccgcgcccagtcatgaccctgcgcccctcactcctcccgctccatctgctgctgctgctgctgctcagtgcggcggtgtgccgggctgaggctgggctcgaaaccgaaagtcccgtccggaccctccaagtggagaccctggtgaggagatagtcccgaccctcagcccccgtgggccgagccttgttgggtggtaatactggggtctcagcgaacctgggagccgggaggagaggaagtgcgggaactgagttgggggtggtgccgggtctaggggcgagaacgggatctttggaagagcatccgtgacccctgtagtccgatcgtaggtggagcccccagaaccatgtgccgagcccgctgcttttggagacacgcttcacatacactacacggtgaggggtctggggggccggggcggggcctgggagggggcggcgccctgctgaaacacgtcagctttggcttggacacgtggcaagcggttcgggagaagaaactcggggctctggggtcgtcgagcacgtggcgaggggagagacgttgctcttccgtgcctcttttccctccttgcttttctgccagttcctacctggcacggagaagtgcagggtggagagatctccgagaagcgccagccttctggggcttcctgttccttacagcggtaaggggaacgctaggctgccgcactaagggggctgccgccgcccagcggtccaggtgtgtgttgcgcgcctgctgggagggagagggtgctagatgtatgctcttgatgctctctccccccagggaagcttggtagatggacgtattattgacacctccctgaccagagaccctctggttatagaacttggccaaaagcaggtgattccaggtatgtgacctgtgcctcccattccacctcttcccaacctaagccctttcttagcctcttcggctccaaagctgccctggaaatcccccctgaaatgagtaagaccctagggctctacgagttacctcctgaggttcaaacctcacttctagtactccacttgtcccatatcctattggaagccagagatttaagaagtgagggaaaggtcaattgaggatggaggaggaaga

SEQ ID NO: 1340 - DNA, 3175 bp, Homo sapiens
atcatgtccacatgcccagcaagagccttgcctcccctgcctcccctcctttttcctgtccacctatatgaccaatccctaattgctgtcctgatgatgagtcattccaatttactggatttaaaacaaaaagttgttacggtttcatggggtggcccctctctctctcaccctctgggtttcgggaggtcgagtggggtattctctttgtttggcagtggttgctgtcctcttggcatctgagtcctttccctgtccccacaagcccttctactccctgtttgcctttcctttgccaccctctccctgttttacatggaaattgcacgggcctctctgtgtttgcgtgcatgtgtgcgcctgtatatacatgtatagagagatatatttgtgggggccggggggagcggggagggggtggagtgaagctcagggcttgcagccaggacactgcccactggagcctgtcatctgccccttccgtgttggtgagattaagggaagaaggtgggagggcattagtcaagccggactgccccagtctttgactggttaccctcctctctgcaggtaggtttttctggatgataggacagatgatggattcttcaccaccattttccttgtactcttctctccacccttcttagggctggaggatggcatttatctctagatgactgttcccaaggagatgccactctgctctgccttactgttgggaaggagagaggaacccactcactcttatcagcttagagtgttcaactgatccttccccaccatcttcagatctgttcctctggagcttgactggggggtggggatggcaagtccatggtgtgtgttagggacccagggcattgggggaagggaggcgaaggcctgaggttttccatcttcattctcttttgttattaggagaaggtgaggcatgggccaatcccattcctgccttccagtgccccaccacccttctgatcttaggggttggatgggtcatctgtccttggtcagaattttctcaccctagtactcctactggcctgaccagggctgactgggtattctaatgaggagctgggaagtggggtgacatagctgaccttagtatcaacccccctcttctccaactcttgttttctagtccaggatatgctaaaggacgaagattttctattgtttccaggccctcagaccatccttgctgtcccttcaccctccatgcccctgccatcctcactcacttctcataaatggatctgggggttagagtggaggaaataaaatcctgaagtggttgtcagtgcttgtgggatgcagtggtcttcaggattctccccgcattattatgtagttgttcagaagctgttgctactgcgtctctctgtctgcagggggcacttgttcctgaggtcctcgcctgggtcctgacttctgtagtttctgtgaagacgtggctgtcctgtgggctcctgtgtgtgctggctgcgccctgagctccgagacagctgcccataacctgctaaggtcagggcccagggccccccacagcatggctgagggaccccttcccagtagggctgtcccaagccccactccatggggccaggtttcctggccacttttgttgatagcagatggatcaatattagtaaccccatccaagattgaactgtgaaagagaggttccaggggtatctccctcagtgccagttacttagtgatgtgttacccaggatgcagcaggtgtgtgcaggtatcttgctctctaggcctgtgtgtgtgtgtgagtgtgtgtgtatatgggtgtgggtgtgtttgtgtgtggtggttgtggggggggtgttggaggttctatttcatttaaaaatgtattcatttccctggccccacagatgcttccctccatactttttatttgctctgtttcctcagatttattttgtcttgccccattgcctctccttccttgaactctttccttttcaatctcaactcattcactgctgttgctcatttgcccttttccatgtattttttcctacttaggattttccactctatctttgtggttcatgaggactttgcctcttctcctgcctcattccctgactttctctagttagatgtcagtcctaaataggttttcctcacttcaggcctcacccctcaccttgtttttttgggggctccagggaccaatctggggctggaaatgttaggaggttgccttggtgctgccccagatctgtccagcagggggcagtaagtgatcttggtagtatccctggctgctaagcccttggcaggggtggtcctttctacattcccattcacttaacagctcttttgggattgggtgtttcattccatttctgcccactccctctcctctcctctctggtaggtttaattttatgctttccctgattccagctttctgcttcctgaggactcccgctccccccaccccaaagtttgtctgtggtgttatagtggtaactgcagttcctcctctggaatgtagactgtatatgtttaataactcaccttctctatccttgctcaaaatgtgggataacgcgatgactgtgaccctggttggaaattaaacttgttttatgcagctttggagccgaccttcatctttgctgtgcagcagccgtgggacagtagtttcatggtgaggggagtcctgtttctggtccctctctccatagtgctccttctttcagcaaaggggtaaaaggcacacttgattgatagagagtaaggttatggaggaacttagtgccactccacactggttatttcttcccatcataccccgcggcgggggagcccaaatgaattgggcatcagagtgtgagggcttcgtgactttcctcctctagttctaaagggtttaaacctgaaatcagctgtatttctcacctgttggtagactgtatggacttcactggctgaagggccctgaacttggagggccccatgtgcctctactctcagatctcctcagccttgcacatgaggtgcttctagtttgaacagagaccccctcactagtctagttctggactttggcagtgaataaacatgaaggataaacgtctgggcagtgtaatgaccttaatccttcttacaactgatggccctgcatcagctctacttc

SEQ ID NO: 1341 - DNA, 1211 bp, Homo sapiens
atcagcacaagatcccctgccactgtggagcctggaattgtcggaaatggatgaactaagaagctttgaggctaccaggcaggggagtccccctacccacaacctcttccctgaaagggatgagggggaagagaggtagcagccagagccaggacccagggttggggctgccggctgacccggagcccctggagcaggaggctggggcagagggccctaggccaagcccaccctgggcaccagggacaatcctcttccccaccaccggccctcaggctggcatctctgcccccagctccaggaggggccagacagaagcagccattgggcatctcaggtttgagggggatatgggccgggaactacccagaagcatctgggaggcagcagggtgggggaagaggatgtgtggccgggcctcacagccctgctgctcccactgacctctccggcccaactcacggctgcaaagagacttgactaagcttgacaatcccaaaggccgggtcccacacctggccctgcctgccgggtcctgcccccaccctcacccccatccccctccctcttgatctgtctctgtttccctcttttcctctgtgtttctgtctctctatgggttgtgtttccttgttttccactctgacaaatgcaacatgaacgggaaagaggcgcccagctgcctaggagggcaagctgggcaagccgggcaaggagaccccgcacccacacctacctcatttaagtgttggattttttgctgttttgaaatgtgagaccctctccaagccccctactgccccaaccctctcccccacctcactgccctcttctgagtgggtggaaggggggtaggaggaggaagaaaaacaacaacaaaaaatccatctttgtttttaattatgggcatgggatggtggttgaggcaaatgatgatgaagattggggatgactggcccctagttgctctaggacttccttctccatctggacatgggggcaggagggagctaaacctaggaccaggatatctccctcctgttttcccaacctcatcatgagcctgtttgccctccagcccctggacgggttgggtggggggtagggtgagggctatccctgagtggcatgcccatacctagtgaggcagggtgtggcccggagctcccactttccctcagtcaccaaactgctgctggtctggtgggaag

SEQ ID NO: 1342 - DNA, 1155 bp, Homo sapiens
ggagtcctggactgttcctggccatgatcatttgtagacctgtggtgtcacctgaacttcccagtcttcctcaacagtgtccttcattcccccacagaactgcccaagatggaatccaaggacctgcagcagctcttcaaggatgttctgggctctgaacgagaacagcatctgggttgtggaacccctggcctagaaggcagccgtacgccactgcagaggccctttcttcaaggtaatacaggtgggagtggtctgaagactgacataaccaagcttgcctccaggatgggccagttgctcttttctctgatcctgtccgtcttgtaggtggactccctttgggcaatctgccctccagcagcccaatggactcctacccaggcctctgccagtccccgttcctggattctaggttggtgtctctgcgtaacctttgtgggcagtcctcgttgtcctttccctccatctgagttcatgctttgcctccctcggactcctgcagcacttcccctgctcctccccattcccttgttagtgaccctcctcttttggggcagggcagtggcctggggctctaggcagtttgtctggggtgggacttggcatccctgcgccctgtgactctctgcccctgcgccccagggagcgcgggggcttctttagcccggaacccggtgagcccgacagcccctggacgggctcaggtggcaccacgccctccacccccacaacccccaccacggagggtgagggcgacggactctcctataaccagcggagtcttcagcgctgggagaaggatgaggagttgggccagctgtccaccatctcacctgtgctctatgccaacattaattttcctaatctcaagcaagactacccaggtacctgtgggatgagggcaagggagacagcctggcaacatggcaggtggaggagtcgcctgccaagtcttctctgactcactctctctgccctccagactggtcaagccgttgcaaacaaatcatgaagctctggagaaaggttccagcagctgacaaagccccctacctggtgaggcagaaaggagcatggattagcgtgggaactgagagggagggagggatctttgggtaatttacctcagttctttccgctccccactcctaa

SEQ ID NO: 1343 - DNA, 1233 bp, Homo sapiens
aggattacaggcatgagccaccatgcccagcctgcctcctctttagtacctgacaggaaagtctgattttttaaaaaatccatacttaacctacataggtatatttgttttttgttttttgttttgagacggagtctcactctgctgcctaggctggagtgcagtggcgcgatctcagctcactgcaacctctgtctcccaggttcatgccattctcctgcctcagcctcccaagtagctgggactacaggcgcccgccaccatgcccggctgctaattttttgtatttttttagtaagacggggtttcaccatgttagccaggatggtctcgatctcctgacctcgtgatctgcccgcctcggcctcccaaagtgctgggattacaggcgtgagccaccgtgcccggccaggtctatttgttttgtttgtttgtttgagacagagtctcgctctgtctcctaggctggagtgcagtggcatgatcttggctcactgcaacctccatctcccaggtttaagtgattctcctgcctcagcctcccaagtgagtaactgggaaaacaggtacgcgccaccacgcccggctaattttacatctgtgtgtctgtctgtctgtctgtctgtctgtctatctatctatctatctatctatctattttttgagatggagttttgctcttcttgcccaggctggagtgcaatggtgcgtgatctcagctcactgcaacctctacctcctgggttcaagcgattctcctgcctcagcctcccaagtagctgggattacaggcatgcgccaccacgcccagcaattttttgtattttatttttagtagagacagggtttctccatgttggtcaggctggtctcgaactcccgacctcaggtgatccgcccacctcggcctcccaaagtgctgggattaaaggcatgagccactgcacccagcctattttttttatatatatttttagtagagatagggtttcaccatattggccaggctgttctcaaactcttgaccttgtgatctgcccgccttggcctcccaaagtgctaggagtacagatgtgaaccaccatgcccggcctctgttttttttttttttttttttgagacagagtcttgctgtattgccaaggctggagtgcagtggtgccatctcagctcattgcagcctccatctcccaggttcaagcgattctcccacctcagcctccttagtagctg

SEQ ID NO: 1344 - DNA, 1241 bp, Homo sapiens
cctgagtgacagagcaagacttcacctcgggaaagaaaaagaaaatttacacctttaaagtgtacagttcagtggtttttttttttttttttttaatttttttctgtaacccaggacagtgccaaagttcagtggtttttttgttttttctttgtttgtttatttgagacagaaactcgctcttgttgcccaggctggagtgcaatggcgcagtcttggctcacagcaacctccacctcccggattcaagagaatctcctgcctcagcctccaagtagctgggattacaggcatgtgccaccatgcccagctaatttttgtatttttagtagagatggggtttcaccatgttggccaggctggtctcaaactcttgacctcacgtaatcctcccacctcggcctcccaaagtgctgggtttacaagcgtgagccaccgtgcccagccaagttcgtgatttttaacacatttatagagttgtgctaccatcatcacactctaattccagaacattttttatcatccctaaagaaactcattgcccaggctggagtgcaatggagtgatcttggcttattgcaacctctgcttcccagttcaagcgattatcatacctcagcctcctgagtagttgggactatagatgcgtgccaccatgcccagctaatttttgtatttttagtagagatggcgtttccgcatgttggccaggctggtctcgaactcctggcctcaagttatctgcccgcctcagcctcccaaagtgctgggattacaggtgtgagccatcatgcccaaccctgagatggcttctgaggggcttgatatggagggagagggcctaagtagcttcagaatgaaaagaacaagccaggattagagggttagaactttcagccccatcccccaagacctcagggaagggagtggtgactggagattgagtttgatcaccaaaaggtcaagccttaattatgcttatgtggtgaaaactccggccaggcacggtggctcacgcctgtagtcccagcactttgggaggccaagacaacggatcacctgaggtcaggagttcgagaccagcctggccaacgtggtgaaaccccatctctactaaaaatacaaaaattagccgggtgtggtggcaggcgcctgtaatcccagctagttgggaggctgaggcaggagaatcgcttgaacccgggaagcagaggttgcagtgagctgagatcttgtccccc

SEQ ID NO: 1345 - DNA, 1163 bp, Homo sapiens
acttccctctggccacatatgcccctgtcatctctgctgagaaagcctaccacgaacagcttactgtagcagagatcaccaatgcttgctttgagccagccaaccagatggtgaaatgtgaccctcgccatggtaaatacatggcttgctgcctgttataccgtggtgacgtggttcccaaagatgtcaatgctgccattgccaccatcaaaaccaagcgtaccatccagtttgtggattggtgccccactggcttcaaggttggcattaattaccagcctcccactgtggtgcctggcggagacctggccaaggtacagagagctgtgtgcatgctgagcaataccacagctgttgccgaggcctgggctcgcctggaccacaagtttgacctgatgtatgccaagcgtgcctttgttcactggtacgtgggtgaggggatggaggaaggcgagttttcagaggcccgtgaggacatggctgcccttgagaaggattatgaggaggttggagcagatagtgctgacggagaggatgagggtgaagagtattaacctgtgtgctgtacttttacactcctttgtcttggaactgtcttatttttgttctgtaaatgtctattgccgtaaattgttaataaaattgaagtttccattttaaatgtcgagctgacttaaatacttgatccagttaaagttggatgtatgaggctggtagatgaaaccacctgagtcgagggtcttgctctgtcacccaggctggagtgcagtggcatgataatacatagctcattgcagcctcgagctcctggactcatgtgattctcctgcttcagcctcctaagtagctggggactgcaggtgcacaccaccatgcccagctatttttatttcttgtagagatggggccttgctatgctgcccagggtggtcttcaactggcttcaagtgatcctcctgcctcaacctctcaaagttttgattataggcatgagccactgcccagcttcttggtttatctgtttaatttgggcctgaattaagtggttatagaatcattttgtaagtgaggaaacgggttcagattgagccagtgcttctctaactaaaatggatgtgaatcacctgtagatattaaaatgcaggtttggggtcaacctggtg

SEQ ID NO: 1346 - DNA, 1228 bp, Homo sapiens
gaaacttacagttagatgtaataacaaaaagaagtttatgcgtatcactttttgtgccattctaagtatttttggtttcttgtctccttatttcctctttaccatttttggaggggaagctattttttttccttgatctttcccagtgatatggattgaatctggttggtcatttccaccaggaatcagaggcagctgttaccaggtttcggccttccagttgatccctccactgtccaggctgtctcaggaggaggtgaatcagagctagtctgtcacctttccaatctaagccgaagccacaggtgcctgacaggttcccttctaacaactatttgaccaagagaggcaatcagggggttgtatactgcactggattcgccagagaagggaaaatttaattagtgaaaaggaaagaacactaggaaacatttgagaacctgcctctatcccagaatgtgctggagatttgacactcaaatcagtgtttagtcttctgcttggcaccatagcttaacctgcagtttcttcaaaatgcccaatgccttgtttcctattaccttagattgcaaaccagtctagggaagtctatgagaaagtagcatttaattaaagtttaaaaaaaaaaaggttgggcgttgtggctcatgcctgtaatcccagcactttgggaggctgaggcgggtggatcactaggtcaggagttcaagaccagcctggccaacatggtgaaaccctgtctgtactaaaaatacaaaaattagctgagcatggtggcgtgtgcctgtaatctcagctactcaggaggctgaggcaggagaatcgcttgaacccaggaggcggaggctgcagtgagctgagattgtgccactgcactccagcctgggagacagagcaagactcagtctcaaaaaaaaaaaaaaaagcatttttctgttttaatgtttggagacttttttttttgttctctccctttcctgaaccctattctgatcctgaaccaaatttatagcaatataattagtgttaatctaaggcattactcatcaaaaaaattgctgcagtctttacagttgaataaataaaaacaactgcataaatatgcccacttttgtttcatagcagcaagtggtttcatttcattatgtttttctttgggcctcatgggggtagaagtcactcagacagcttgttccaggattaaatgagggtatctgattcccaagtc

SEQ ID NO: 1347 - DNA, 1206 bp, Homo sapiens
cccacatcctcctgtatatattaaatggtctctagattacttataatacctaatataatataaacactatctaagtagttgttatactgtttagggaataacaagaaaaaaaagtctgttcatgttcagcacagacacaaccatctatttttttctccgaatatttttgatctgtggttgattgaatccacagatgcagaacccatagatacagagggccaactgcattaggggatttataagttacatagagacaaaatgtatgacaacagtaggacaaaggccgggagggaagaaatagatgtatactattgtaaggttcttacacatgaaataatattatttgaaagtagactatgataagttaaagatttatattgtaaaccctagagtgcagtggctcacgcctgtaatcccagcactttgggaggccgaggtgggcagagcacatgatcaggagttcgagaccagcctgaccaacatggtgaaacccagtctctactaaaaatacaaaaattagctgggcgtggtggtgtgcacctataatctcagctactcaggtggctgaggcaggagaatctcttgaacctgggagttggaggttgcagtgagccgagatcatgccactgcactctagcctgggcaacagagtgagactctgtctcaaaaaataataataataaaataacaaaacaggctgggcatggtggctcaagcctgtaatcccagcaccttgggaggctgaggcgggtggatcacatgaggccaggagttcgagaccagcctggccaacatggcaaaaccgtgtctctactaaaaatacaaaaaaattagccggacatggtggcgggtgcctgtaatcccagctactcaggaggctgaggcatgagaatcgcttgaatccaggaggcggaggttatggtgagctgagatcgcaccaccacactccagcttaggagagagagaaagactctctcaaaaaataaaaataaaaaataacaaaacaaagaggtatggctaatatgtaatatgtcaggagtggagataagatgaatttacttgaaaagctcagttactccacaagaaggcaggaaaagagggaaaaaaacaaagaacagattagacaaatagaaatgaagagcaaattatatatttaaactcaactgcgttgataatcacatcaaatataaatagcctaaaaccacc

SEQ ID NO: 1348 - DNA, 1219 bp, Homo sapiens
gttacttttaaattatacaaaatttcttgcataaattctttttttaataacatttttctctttcacaacttttgcagacaattctttgacatgcttcaactttctgacttattacaaatatttctttctttaaacaaccagttaatttaattcaggacaaaaatttaccatataatactctttttacataaattccgccccccccccccccccttttattccttaggatgcttctgaactggtgaggtgtgctcagaatgaggtttcctgtaagtttttttttacttttttctgttagcaaagcagttgccgctacagattgaatgcatttgggccatccacgggttactgggttaaggatttttgataggaaggcctcagtgctttcaagatacgcccttgtttacactgtcaacaaagtggtattggagtgttatagggttacggagaataccttcaattatcaattacaggttttaaatttaccttggcttttaaaggaatagggtacacttttcttttaactacttgtatatctctctttctttgattttctgtctctttttctctttgacttttcttttgcctctgtctctttctctctctctgcctctctctctctctctctctctctctctctctctctctcctggtctttccttgcctctgccagccacttatgctgccgttctatcaatcactgtcggggatctaaaaccagctgtaaccaagtgtctatgtatgggaactggtctgggtgctttggcttataggttaccttgtgccatacctttgaaacaagggacctgtccaggcttccttctgatggccaacccacctctaatgctggccagtctatcttccacaaagttttaagttttcctggtgtcatagtactccatagtctcccttaaatttcttgaaatttttcaacatagttcctagtggggtgggcttactttgtgcctgacccatgcttctttgagacaaaacaccatgctcacaccacacgcacaccacaaaacaaagaacaggtaaaaagggcacacacacacttttgcagtttacaccaaaccaaaatcaaaaccaaaatcagagtatcaagaaatccaagccaggtcaaaaccaaaaccaaagtatcaagcaatccaaatcaagtcaaaaacaaaaaccaaagtgccggtacaggcacaccgtgggtgatcaggccacgcttcca

SEQ ID NO: 1349 - DNA, 1201 bp, Homo sapiens
ctatctttccagaaagtggtttcctaaattctggttttcctcctggaatcctgctatttccttctcgcatactctagagaaatcgaagtgttttcaaaggtgctctgaagcttacgctccactagtttcacagtaaatcgccccttgcgagggcgctttttttttttttttaatgtgttctctgaatcgctttccccctttaacactgcatgacaagactaaagccagaatcccaagactgcagcgctaccccttcacaagccgtcgggctgtcccgggcggggccggcccattttcactttctccactagaggcagcagcgcaccgtgaccctggcttactacggtaagaaagcggagaccttttgcttcgaggcggttggtggccagtagtcttgatcgacaagctcaggcctctgaactaagcagccgctgtttatgcacgtacagccaatggaaaggcaggagtgcggccaacggccaatgaggactggtcttaagcggaccacagggcggggtttccctcgagaggcgaacgccgggtaaaagatcgggagcggaagtgggcgagtcagagcacatccggtgttagaagcgctggtaggccttggagaggcgggttaggaaggtacgtctgaacctagtactgggcgaactgggagtgagaaatggaaagggagttagcagttactgtctgagcaagagtggcagtagcttccttctgcggacagatggcaccctgaaggaacgaggccctgctcggagaccagactcgggaaaacagggtgtggagggaagctagggaactagtgctgcgcgtgcgcaacagtgctgaagcgggggtggggcggaggcgagtctgcgggggttttggggggtgtcgaggcctctattctgccccagagcgctggcgaaggccccttctcagcccgccttttcctttctcccgctccttctcctctactaagtgtagacgcagggccccttggcctagcttcgatcgttcgaattcagagcacgtccttccgaggtgaaggaacgcgaaactccacccatccgattgctgttcggctgcgggcgggtcctttggtcgggctgaccctgggtgagcggcccggagccaagactcgaggtagggcctggcgggcgggtgatgtcacactcctctgtgacacgcgaggctcctcagttacttagccaac

SEQ ID NO: 1350 - DNA, 1163 bp, Homo sapiens
cacacccagctaatttttgtatttttagtagagacagggtttcaccatgttggccaggctggtctcgaactcctgacctcaggtgatccgcccacctcagcctctcagaagtgctgggattataggcctcagtgagccactatgcccagccaagggaattctttagcatcttgaaacaatgacataaaattgctttatgtgccaatgtctaggttcctttaactagattgttaattgagaatttcttttataaacttactgccttttaaagtggcaaatcacctgaaagaatagaaatcagatgatagtaacaaaatagtttgagggagaagaagatgcattcaattcctctgtcgtctttaagatggttgactatgattgcaaatatattgtaggacacataaaaataaaaatggttgtgttagggctgtagaattttaggcaagttttcatctttctgaacttacatgttgcttttttttttttttataagctgttcgtgtgattctgtatgacttaatgactctaacctttctttattctgcagagtggagactgctgcacggactctggaaccatgaacatatttgatcgaaagatcaactttgatgcgcttttaaaattttctcatatgtaagtgttttgaccttgactggttttgtactgcatttcttttcatatctctttgtcccttttctgcatttataacttttgtgtgtataagctaacaaattaacttggccagaatccagaggacctgatgaaaatgtccaaattctacacgttgctgtgtggttattggaaaggcatttattctagtttgggtactgattattcataattttgggcatttggtcttcctcagcatttaaggttctgttaacctattttcaaaatattattttttattgtaatatgctttcctaaaagtatttcaaactatttgtaacagaacttttacatattcccaggaagggaaagagagaaatgattcttcttagcttaaatatgagattgatctgggactgattgctcttattcacattcttttcttagaaccccgtcaacgcagcagcacctgaagaaggtctatgcaagttttgccctttgtatgtttgtggcggctgcaggggcctatgtccatatggtcactcatttcattc

SEQ ID NO: 1351 - DNA, 1255 bp, Homo sapiens
tggagcacttctcgcgcctaatggttggttggtggtcttggcctctagtttcactctttgaggatagagtgccatctgcagccttcactgttgggatctgagctgtagtggctgtgaatagcctagagtggtcaggcagcccacctcggcactcctggggtgggggtggggacagctgcttaacctttattcttggtcggtctgtcggcaactttgggaaccaccagtaggatgtggttaagattcagttcttgctgagctaaggaagcatttctcatttctttttaattgtctggctcacttctagtccctaactaaatgctcactcaagagttttagcttgaatgtcaaatgtcaaaaaattaattgggtgatttttctccatttctaggataagaagaaagagaagaaatgaagtgaccatccagcctttcccaattagacttcctctccttccacccctcatttcctttttgcacacattacaggtggtgtgttctgtgataatgaaaagcatcagaaaagcttttgtactttgtggtttcctctattttgaattttttgatcaaaaaactgattagcagaatatagtttggagtttggcttcatcttcctggggttcccctcactcccttttttgtcaaccccatctgtagcctcttcctctactcaggcagtcgacccgccacgatgagaagtgggaccagcagagggcgccaacttcaggagtccgctttcccaccaggcttcattcacccagtggacctgaactgtttggtagagccacccggcccttccttcctcattgttgtttggtatgcgcacagttcctgtgggactgggccgtgagttttccattggaaagaagttcagtggtcccattgttaactcagcctcaaatctcaactgtcaggccctacaaagaaaatggagagcctcttctggtggatgctttgctccctctgagctgcccatgctggtctggcaaacacacctttctgctttgccttcacaaaagtaatgtgttccctttcccaccccttgcctgaccctcagggagtcagcctgcttccatccatgggtgggaagacttcagcacaaaggaaagactaattcttgtcaggcatttttgaaaaggctgattatgtgtatcaaggtacagcatcgtagggttcccctaaacttgccctgtttttgtttttttagtttgttatccccttactgagcggcctctactaggtggctgtgattaaat

SEQ ID NO: 1352 - DNA, 1097 bp, Homo sapiens
tcctaatagtccttcagtgcattttagtctgtctccaactggacaccagtaggtagtgtcaagccagagattcggggcagtagataaatgttcattttactgatgcactttagtttttggtctgttacctgttttccagaaatttgtggccttttaggcgggagttaggcgaccaaaccagtgagagccccaatccctgcagttttgtggcttcaagtgtgggtggacagtcctaatggggatctccagctccttcctgtgggctgccacagacagctacccccagaagggtcaatgttgggagtggttgtggctctgagctgctctacagagcttcagtgtgagaggatcgagccattgaaagctcattaccagtaggacataatttttggctctccctattcacaaccagtgcacagtttgacacagtggcctcaggttcacagtgcaccatgtcactgtgctatcctacgaaatcatttgtttctaagttgtgtttattcctggagtgacatgccaccccgaatggctcactttcactgaggatgctgtcctctgatttagctgctgcctccagcctctggcttgagaacttactaaaggcacttccttcctgttaaacccctgttaactctccataaatttggtgattctctgctaggcctaagattttgagttaacatctcttgaagccaaactccaccttctgtgctttttgcttgggataatggagtttttctttagaaacagtgccaagaatgacaagatattaaaaaaaaaaaagaaagaaaaaaaaaaaaacacctacttttaaagaaaatacctaacagatttttaatatagttatctctaccactttcttttctagtttcttgattttcagctcaggctgcattctaactcatactgtgaagacaaaggtgtttttgattcagaaatatatgaaatctgcatagtcttaatttgtaaaaaataaagaaaattccttaacctttcctggtgtttgtgttaaattcaagggtacagctggtcatggagcttgtgatactgccagggtttgctactgggggctgggagtgggacacgattgagttcgt

SEQ ID NO: 1353 - DNA, 1204 bp, Homo sapiens
agggctggagacctcggagtctctcagtgactcactctacgactcgctgtcctcttgtgggagtcagggctgaggggctgcgccacgccacggccccgctggagctggggaccacagactggaccggctctcttcatgcccagcccccggagacggggacccctccctgaagggaccaaggaggcaggtggataagaaggtgaaaagggggtccctggcacaccccaccacccactgcttcggcggatgagatgaccgtgctcagctcagggagagaccccgcccttggtcccttctctcacccagagtaaggctcttcctggaagggactgggggttaaaggccactgtgtcgcagccctccagtccctacttcaggctgagccatcttgtggtgctgggcttcctgcccaccagccgtgccatctctgcccaacccggctgctcctctgccccgaagccctcgcgaggccctcctggaggcccccgtgctggtggagtttgggggccagggggacaagttgccttctctctctgccctggtcctccctgctgtctggatggtgctgccctcctctgccccatgcctttggggtctgttcgtccgtcttttttgttgttgtttttatatattgaagcgcctggcccagcccccagcccccagccccgcactgcggttaatttatgtgttgtttaaaatgcggctgctctgcttcctgcctctgcttctgccgtatccctaataaaatgtggaggccccctccctgcccctgagtcggcttgttgtgtgggaggactcaggcaggccaggtcgggggacactgcatgggtgccaggttgagggaccccaggcccccttgtgacacagccccctcaccagggcaactggctggagtcatcccagaaggtaactgagggttgggagagtagggcctgcttaggcccggaagggtatctgggctcggagagattctcctgggccagggcttgggcacggcgcgaggctgggtggccccttggagagggagctggggaagatggctgtggacatgcactcaggccccacgtgtcccaggctgggggggacatgcagactctgagtagagttgcatctcttctccagaccttggttttcctcctctatagaagattagaaagttaatccagacgagctggtcccatcagccagactttcttctcagcat

SEQ ID NO: 1354 - DNA, 1228 bp, Homo sapiens
aatcccagctacccaggaggctgaggcaggagaatcgcttgaacctgggaggtagaggctgcagtgagccgagattgcgccactgcactcccagcctggctgacagagtgagactccatctcaaaaaaaaaaaaaaaaaaaaagacattattagactgaccaggaccaataagatgattcagataagggagatcagtgagactagaatctctggggaaggcttcatggaaaatttgggatttgaagacgttcccagaaaggggagcacagtaagctcagacaagaagataggaatgggcacagagtatgaactcatccgttgtcacccctcctgtgctgactgtgacgagttagagaggctgagcagaggagcaaggaaaaagggatgccaggaaagatccctgaacaaggcaacgacttgttgattgcagaggtgactgggtgttgtatcagtttgctgaggctgctgtagcaaactaccacaaactgggcagtttcaaacaacaggcttgtctcacagttgtggaggctggaagtccaaaatcagtgtgggcagcactgcttccttccgcgagctgggagggagactctgttctgtgcatctctcagcttctggtacctcaggcattccttggcttgtaggtggtggtctctgtgtgacttcacgttgtcttccttctgtatgtgtctgtctccatgtctaaatttcccctctttataagggaacctaccggtcatattagggggtactctaatgacctcatcttaacttgagcatctgtagagaccctatttccaaataaggtcacattcacaggtactaggggttggttagacttcaacattttggggaaggatacaatttacccaataatgggtgtgaaggaaggaaacaagccttttctcctctctcttcctccaccctgcatctccatttccctcagacaatgactgatgtggtgggtaacccagaggaggagcgccgagctgagttctacttccagccctgggctcaggaggctgtgtgccgatacttctactccaaggtaagtacatggggtgcacgggggaaattgacaaaaggcacggggttttcacccctgatgggggtcagtggtgttagataccaacttctggtttgtctcatcttccactcccttcactattttctccttaggtgcagcagagacgacaagaattagagcaagccctgggaatccggaataca

SEQ ID NO: 1355 - DNA, 1330 bp, Homo sapiens
gacggtgagactctgttattccctgcagccacgccctctcacccctccccgctcccccctccaaaaaataaaggtactgatatttgcagttgcttgactctgaaatactttacttggctccatggttatttctttattgttaccttttatccgttgcatctttttggtgacagccaggaatgacagtcaagttatctttacttataaggaagtatacctatggttttgaaaatacatggtgtgtttagtacatttttgcatgttacttaaaaccacttgtgtacagttcttttccatatatttgaccaatacaggttggtaatttttaattacagaaataattagtgaatactttttctaaaaatgcaaataaagaccttctggaccagcaacccaaatccttgtttccttcttgcttctaaaaagtgactacttctaaaaagtgactactgccaggcatttattattattattaatgttaacagctaaggacaaagtcttttttagagagccttttgcaatttttatattaacctgtgacagcccagtgatgatcactattcctacttagagagaataggactaactttcagaaatccaggcatttttctacctttcatactatctttctttcactttacttctcttttctgtcttttatcacttctttctttcttcattctttctctcttttgcctggatcgagattgttaagtccctctcagtgaagggtaagattatgagatctgagggctgtataaatgtagtaagttgtcccttaagcatattgaaatgtagtgtgaaagttggatgaaggacattttctaaacatatgcaaataccatatctatcatatcagttcattttcaagatgtaacaggtaatataaatttttttttttgagacggagtcgtgctctgtcaccgggctgtagtgtagtggtgcagtctctgcttactgcaacctctgcttcccgagttcaagcaattctctggcctcagccttctgagtagctgggactacaggcatgtgctagctaattgttgtatttttagtagagacggggtttcatcatgttggccaggatggtctcaatctcttgacctcgtgatccacccagcttggcctcccaaagtcctgggattacaggcatgagccaccatacccggcctttttttttttttttttttttaaagacggagttttgctcttgttgtccaggctggagtgcaatggcgggatctcggctcactgcaacgtccgtctcccgggttcaagcgatactcctgccttagccttccaattagctgagattacagacgcatgccac

SEQ ID NO: 1356 - DNA, 1194 bp, Homo sapiens
tttctctacaagcccccaaatcctgatccttcacacagtagaatcaggtagagcactacactgtttgtcataaatggactttgttagtagtcacattgatcatcatagtttaaaacacagacatgggcttgaccttaatatcatatagaaggtggagctaagccaatattaaattgcactggctatgacagttcctcaggaagagttgctaaattataaactggctgcatattgcctgcagtgttatctctgatactgatttgtcagtttaataggagcagccttattccaaggtgtaattttaaatagtgtcagtgaccttttatgggctggatgagcattaatttgtccttgaaatatatcaaaccatctcacagggacagtaaaatatttgcgtggaattaacaatatacaatatgagttctcatgagaaataagtatgtcagctttctattctttaccattttcctacagtaatgaaaagcataatttcagcttcaggttgatctgttccaactccttagggtccgtgtcatcctgtgatgccttcctgagtctgttccaaagtcatggactgaagcctgaggccatctgtccgtgcgccacgtctgctgaagccatgactgtagcaatccgcaggtactgttcaggatgtcagatgctcttgatgtatgttacaacttggatgaaatgtgcagtatttaccaggtgatgaccaacggatgttaactaattttctaagcagtttcaagcatctcatttttcccactcttgctcaaagtgtatgcagtaaactgaaaaatttaattgatatcatttcgtatttgtgaattagctctttttctgtgccattttgctcttcggaatccatagcaccttagattaaaaatagactgttcttgattgtagcttaagtatggatagtatatctatagtatattcaagaccattatgtatgtaagtatcagtgaatgtgtgtgtgtgtatatagatatactttttttttttttttttttttttttttagataggatctctctttgtcacccagtggcatgattatggctcactgcagcctcaacctcctgggctcaaacagtcctcctgcctcaacttcctgagtagctaggactacaggcatgtaccaccacgcctggctaatttttaaatttttttgtagagataggttcttgtt

SEQ ID NO: 1357 - DNA, 1224 bp, Homo sapiens
ttgttacttgttaggaatacttctaacacctaattattatgaatctttgataattggggaaataagtttgaagatgatggctaaaatgaagttttggaattatttatgggatacatttaatcttgccttattatcttttaccataagagataattgaaagttggtacagatgcctactccaattttaaaaagtagctgtattatagtccaagcatttaacatgtatttcacatagccatattgaaacttgaaatagttaggctaccaaatgtgcgagtatattgtttggttgcaatgtttgtggttttggatttatttaggctctatgtctgacctactttttaaaggatttaattaaggtagcttaaatatttaaaacgtaacaattaagaataaaagtaggtattagttgtagagggaatacatataagtagggccctaagataagttaattactaagttcgaataccaaatttgaattttgcagctaaggctaaaaaaggaaaaagatctttttttaaaagaaaaaaaaatcttaacatccacatagatgatacattctacttataggtaattccaaatatgatatagggtttaagagctgtgtttaaaaatttttctcttctctttgtcgtgtacttcatactagttaaactttttcttccataaaagtaggcattagggaagagggacaattcatagacaaagaacgtataaagaaaaacaggctgggcgcggtggctcacacctgcaatcccagcactttgggaagccaaggtgggcagattacgatgtcaggagttcgagaccagcctggccaacatggtgaaaccccgtctctactaaaaataaaaaaattagccaggtgtggcggcgggcgcctgtaatcccagctacttgggaggctgaggcaggagaatcgcttgaaaccagagggcagaggttgcagtgagctgacatcatgccactgcgctccagcctgggcaaacgagtgaaactccgtctcaaaaaaaaaaagaaaaagaaaaactggagtgtggagataacccttggatcataaattaggcagcactaatttttggggctactttaaaaataattttttttgccgggcgcggtggctcacgcctgtaatcccagcactttgggaggcggaggcgggcggatcacaaggtcaggagatcgagaccatcctggctaacacagtgaaaccctgtctctact

SEQ ID NO: 1358 - DNA, 1099 bp, Homo sapiens
cttcatttttttcttgtctttcaggtcaatatccaacacagccaacctaccctgtgcagcctcctgggaatccagtataccctcagaccttgcatcttcctcaggctccaccctataccgatgctccacctgcctactcagaggtgcttccagtttgccagatttgaactagctgggaatactcttagggtggtcctttagtccttagctaaatctgacttcacatatttactcttcacaaatgctaacatgaataatctaaaacactatataatttggcaatttttgtcggagttgaaagtgcattatttgatgattttgtgttatttggcacaggctaaggtgcagaagatgaatttgcgttctgtgagcccaacattagctatagcagaaagtgatccaggagaatattgaaggccagtggaaaggcaacttgtataatcttacaaaaagtataacctgcataaggagaattaagaattagctcattaaagagatctcaaataggaatgtcataaagtaacattttgccttctcttctgcctcttctagctctatcgtccgagctttgtgcacccaggggctgccacagtccccaccatgtcagccgcatttcctggagcctctctgtatcttcccatggcccagtctgtggctgttgggcctttaggttccacaatccccatggcttattatccagtcggtcccatctatccacctggctccacagtgctggtggaaggagggtatgatgcaggtgccagatttggagctggggctactgctggcaacattcctgtgagtatgacctcatcagaagaaactcagcccttgtgtattttaactttctgaaatgacttcatattcattctcttaccatttctggatgatagttgccagtgttggtacaactactgacatccaatactcaggcagaaagtgtttgagggggcagaactgtggcaagtgagtagcatctcactgggggctgagttaaccagattcttttgttttcatgtctgtcgagtcctgcttgctgcttttccagttcattgtggtacactgaactggtctagtaatgctccttattcattccata

SEQ ID NO: 1359 - DNA, 1070 bp, Homo sapiens
catattaacctgaagttgcagtttagacacatgttgttggggtgtctttctggtgcccaaactttcaggcacttttcaaatttaataaggaaccatgtaatggtagcagtacctccctaaagcattttgaggtaggggaggtatccattcataaaatgaatgtgggtgaagccgccctaaggattttcctttaatttctctggagtaatactgtaccatactggtctttgcttttagtaataaaacatcaaattaggtttggagggaactttgatcttcctaagaattaaagttgccaaattattctgattggtctttaatctcctttaagtctttgatatatattacttgttataaatggaacgcattagttgtctgccttttcctttccatcccttgccccacccatcccatctccaaccctagtcttccatttcctcccgccagtctccattgaatcaatggtgcaggacagaaagccagtcagactaatttccttctttcctcgcacttctccccactcgtcatcttttaactagtgtttcacaaggatcctctgaaaccctctctgtgccccaagtacagatgccattacttctgctttcgtatctcctcaggcaaaagtggagggtgccttatgggccctcctcataggttgtctctgcatacacgaacctaacccaaatttgctttggtgccagaaaaactgagctatgtttgaacaaagatgtcgtgcaaactgtactgtgaacaacagttggtttaaaatatgaggggcaaggaggaggatgcatttcaaaagcttgattgatgtgttcagagctaaattaagaggagttttcagatcaaaaactggttaccattttttgtcagagtgtctgatgcggccactcattcggctccccagaattcctagactgggttaatagggtcatattgtgaatgtctcactacaaaatgacttgagtccagtgaaatctcattagggtttaagaatatttcagggatccttaatgttttgatttttgttttctgaaattggattttattttattttatcttataatttc

SEQ ID NO: 1360 - DNA, 1216 bp, Homo sapiens
cccccacacaatgaacagcttgttgagaatttgcattttatgaaaatcatgttgaaagacaaaggggtctctctgtgctgcccagtccttcctccctggccgtttgggaactgtccccacccctgaggccaatctggttctgaaccttctcttccttgccttgggcagctttgggggagggttagcaaaggcacagaacagaaaggccctgggctgtgcaggctccaaagaaaagggctgctctgggactggacctcctcccaggaccaaaaagttagggagggtgagagactactttagtttatcaaggaccctgaagagacaggaaccttcatctctcatccttcctccacaccccccaccaccacccctaaagaactcccagtctcggtcctttagtgagacttgctgacaagtttgacatctaagatgttttgtcccagaaagcacaaaatatatggcaatggagagagagacccaggtatagctgggcacagctggtcacctgcagctgggatccacaactggtccttgaaacggcctgtaccttaggagacctggcacctctgaccccacattctggctgggattgccagcccttcgggacagggtccctgaccccagccctcccaagccactgtctgtagctgagaaattagatggagagacccaactggcagaaggtcctcggagcaccttgataggtgagcccaggggacacctatcctctgaatcccactggggaagagcccctgcctcagctttgggagtctggatggcctgagcctctacagacatgggccctaggggtggagaccattttagaataatgatctccccacctgctgccagtgtggaaaccagcaagggcttagaggttcatggatctggaacccaggaggatggttgtgtccctgcagtcccaggtatgaaggtaaggcctgtagagaaagttgaggagtggtgccagtagtggcacttggcaaatagttccaccagcaccaaaacaggtgtggatgtggagctgggaaggggcagacaggaagtgggtcgctgtgtccagggtaacctctcagtgtctgctcaaggacagtcccgccttacctgctccttctgaccatcttactgcccagggctcaggattccgctggaagaatctcagccagagtcctgaacagcagcggtgagtcaccaacacccagcccctgccatggtc

SEQ ID NO: 1361 - DNA, 1149 bp, Homo sapiens
tgaatctacagtaacagttttcaatcagttttgccccacaggggacttctggcaatgtttgaagacattgtagttgtcacaattggagggagtgctgctgacataagtagaatccaggggttaattctatagggaataggacagtccccatcaacaaagaattatgcagcccaaaatgcatgtcaagattgagaagactgattgatctagatgaacattaaatagatgataaatagattagctgcctaacagcacgttggtcacaaaggggacctaatttgtatatgtttcagggactcctggcccatacagaatttgagatagctaagcattaaaccaataggaaaaaacgggaggaaaagagccacctggggttgaattggagcatgtacttatggggcctgaggtaactgggatgacagtgtgacgtgaaagtgaaaaatagggtaaaatgggggttttctatgtgtgagaaatattgggcaaagtttttatgagataacttacggtttttgttttaatgtatctgtagacagggatgatcgttcttttggccgtgatagaaatcgggattctgacaaaacagatacagactggagggctcgtcctgctacagacagctttgatgactacccacctagaagaggtgatgatagctttggagacagtaagtttgtttttatgaagttagcttcctctgtgctttgggaggctatttagtaataggacaaatgtgttacagatgatcagatcacattaacagatagaaggaggaaagcagattaagaaaaattttggatagtatctgaaagaactgatagatgcaggaaacgaatttgataaattaataattttttttgaaaacttaaccaaacaaagggacagacatttctctttttttggagacaattgtttataaagaaacccaaactgggcatggtggctataatcccaacgctttgggaggtcaaggcaggtggattgcttaaggccaggagtttgagagcagcctgggcgacaaaacaagaccctgtctaccaaaaagaaaaagaaaaagctgacgtggtggtacgcacctgcagtcctagctgttcagcaagctgaggcaagaggactccttgagcccaggaggtctagactgggtgacag

SEQ ID NO: 1362 - DNA, 1235 bp, Homo sapiens
tggatatcccatctaggaatccggtggttcgtaatgggggcattacatccccaggggcatttgggaaatttgtgtcgttatcacattagtggttgtcactgatgggcatttagtgggctgtggccaggggtgttaggcagtatgcagtgttagggacagttttacacaatgaagagttgttccctgtccattacaaaagtgtttactattaaaagctggtattgtatctaaaaggctagagacctactataataagtaattgccctgaaaaactaggcctggtaatgagtggcttgtagaactgtgttgattagtaaagaagggcagtattgtagattatgtaggatactgttcttaaccatattagttgattcttgctgaagtatttagggccaaagtgtgtcttaatgtctgtagctttcaaatagtttgagggaaagataaatttatatgcatatacacatatagatgaagtaagtgatggttcttgaggggtcagcatgggtctaaggtggccttcactgagccaggcataatgtgtattttgtgaatctctcgtacagacacccaagctggcgaagtgaagaaactcaggaacgggaacggtcgaggacaggaagtgagtcatcacaaactgggacctccaccacatctagcagaagtaagtcagaccagggtgggtatcgtgttattgccgttttccataaactatccataaccaaattatgcagagaccctgcaatatttaaattcagtcatgaactctttatttgggttgcatgggccgattggagtttcatatcttctgctccaaagaatctgaggaatgggtaccagagtagacctagatgatctgcttaataatctaccactgaagtgtatacttggttgttaggtttgtctctctcttttttttttttttttttttttggtatattttcattttatgtcttgacatctttgaatgttgtttattcagaacagtcaacggcttggagtttcatgtgagctgtcccaagaccagccttttttgatgttatcatcaccagagcagtgttctcaagcagtgttattactggttgatcaagcacttttagtgttttggaaacctaaatggttcaattgtaatacctcccttcccttaccatgatgtgttttttttgtattttgttttgagacagggtcttactctgtcacacaggctggagtgcagtggcatgatgatggctcactgt

SEQ ID NO: 1363 - DNA, 1265 bp, Homo sapiens
ggtagatttagcctcaagttgttctagtctccaggaggctgccagcccctcctcttatttaattctgagttttgggggccagcctagagggaattccttttttttttttaaccccccaggggggtagttgggagtgagactataggccataaagaatgggactgcattggaccaaaataaatgggaaaatcgtggtttgaaaagaagcttttgggaagtgatgagtcattttgcaccaggtaataggggaaaattgtgtgacctccagcaaacacatgaatggttatttcctggagccggaagcacttgggggtcgtggtaattcccagtgttttctgtgtcctagttttaccctttctaaacactgtcctttttgaaagttttgaatatatccacattctattgaaaccttgaaactaaaaatttagactcttatcatcatcttaagttcttcatgctactcttaacctcccaaaaagcagtatctaagtcacatacatgatgtcttgggcattttctcagccatggagaactctgaaaggaagaatcgctgcttttctcaagcaaatcggtttcttgatgtcttttggttctccttgcctgctcctgatgcttggaccccttttattgatcagagtgctctagaataatggatggtcttggatgatggataaatagggacagggacagttaaattgggagcctttcttacaaccttgatgggatttttccccccaagtttccttctccactgaaatgccacactaatgcttgttggattcatgaggtggccagaccaatgtgttgttttgttgttgtttttttaagcttcccttgagagaataaatggtaatggagagaactatttaacaaggtcctggtttctcttgcaacacagtagctaaacttgcctgcttttatatgcatttttgtagggatcagcttggtagacagtattagcggagaaacaccttgatcttggtttgcaagcccttctcccatcagtcctagattaggccctgttcagccatgcaggggtgttggtttatgcgtgctgcagcagtgggcataatgaatataatttacccagtggacaaaggtgtgtaccaagtgaatttaaataattggtgtggattggccagtagctaagaagtgggcttttaaagagtattgaagattgaaagggtttttctttcttttttaaaaaagaaaaacaaactattgattgtagataatgaaaagctagggtttgccctcttcatgtc

SEQ ID NO: 1364 - DNA, 1356 bp, Homo sapiens
gtccccagacatcctctcaccttcactggtctcacactccccacccagacccagcaaggaggtgcccaagcagtgagctcggtgaggggtggggtggtcaggatccactgtggctgtgagtccctcccatcctgtggcactcgcacctcggaagggaagcagggatgggatccctatgagccagtcccgaggggaaaagtagctcacttgaggagggctgggaaggcatcactagaccctcttggaccctcaccctcctcccgcctgtaacattccagagcctgtcaacctctcccccagccgggccccctctctctccgaagtcttgggtttgtttggagaaacccctccacccacacccccctttctggaaatagctgtggttggaagggaggctgggagcccggccgccgcggaggaggggtaaggcccagggaaggagcgagggagggcggcggctctgggggtgttcccagaagggtctggaggatgggggcagactggagggggccgcagagcggggctggcgagtcgaatcagcctcatctgtgcccgcttacggcctctgtcccacatgtgaagcaggaaaggaaaacgttcgcccgcaccctgccaggccggggcccgagcgccgctgccagctgctgccgggtcccgggcctgcgtgtgtggcacggcgtgcggccccgtgcgccccgggtgctggaaggcgtggcggcctgatcgagtagggccgcggccgcgccccgccccctagtcactgtcccggcctcccgctgctcccagctctccgcggccagccagagcccccggccccagccctgggccgcgccccgcgccccgcgccctctcgacctccggcggccccgcgccccctggcgcccgcccctggcactgcccgcgcggccgtgacgcagagaccgccgcccgcccagcgcggcgcggccactcacctgcggggggcgcccggccgggcgggggcgcggcggggcggggcagcagcagggggagccgccgggccagcccatcccgcccgtgcccgcgccgagcggacgcggaggaggaggcggtggcagtggcgggagcgggcggccgggctcggctgggctccctcccgcccccgccgcgccccgcgcccgcgcccgcgcccgtggcagcccgctcctcctcctcctccctcccggctccaatccccacgttccgccagctccccacccctcggcctcctctcctccccaccttctcccgcgaacccacactcacaaagagccgaggggagagagggtgcgcagacggccagccgggccgcgccagggacatactggagacaggaagtggctgagagggggagagagt

SEQ ID NO: 1365 - DNA, 1128 bp, Homo sapiens
ggatatggcaatgatggcaccaaagtgccatgcacccttgaacatggattccaaactgttccacagattacatgctatgtttagatacattcgtggaaaaaggcattccacagctaaataagtgggaaatgctgagttaatcaaggttagatgtttttatttcctgtaggactctcgtgtccttcagtatgcggatgtgccttgcaaatctccaaaagggagatctagtgtacagtgtttccctaagaatgttttcccacaggattcttttattgaggaatgcagtttgggaaatcctgtcccaaggcacaaggagagttgggattagagagaagtgtagagggttttccccagggagcctttaagtcagcttaagggagtgaatgccttttggaggcagggaaggactcaggtagcttggcctgggaaagaggcaaagagaaagactctccaggaaaacaaaggattcctctgattggttctcctctcctctctcaacaaggtgtgccctgttcctggtgctgaagggcgagctggagctggcccgcaatgacattgatctctgtcagtcggacctgcagcaggttctgttcttgcttgagtcttgcacaggtgagcagccatgtccccatgaccataggcggtgctgaaatgacacacactacagcacatctttctatgtaaaggtttcgttgcctttttttatttttgagacagagtctcactttattacccaggctggagtgcagtggcgtgatcttggctcactgcaacccctgcctcctgcctcctaggttcaggtgattctcctgcttcagcctcccaagtagctgggactacaggcatgcgccaccacacccggataattttttttatttgtagtagagatgaggtttcactatgttggccaggctggtctcgaactcctgacctcaggtgatccacccgcctcggcctcctaaagtgctgggattacaggcatgagccaccgctcccggcctttgttccctttttaatcagatactgacttctggtcccagggcaacattcccttgactttagtccaaccattggtctccctctttcagagagcctgtcccagacttaccctagttctagttttcagtg

SEQ ID NO: 1366 - DNA, 1200 bp, Homo sapiens
ctaaatctggagaaatgaagtcccctcacctgactgccatttcattctatctgaccttccagtctaggttaggagaatagggggtggaggggattaatctgatacaggtatatttaaagcaactctgcatgtgtgccagaagtccatggtacccattaacaggcataatattggcactggtgctagtgagcatcaggtgagatacaatttggaacacaacaggaaaggggtagaagtacagaaggacttgtttagacattggtcctttttgaggataccacactcccttgcccttgcttccatcccccatccctaataggctgggctttgcaggaaatggcatgaaatcagctcttctgagtgtacagaagaacctttcgagcattatttctacacccttctcccccactctttcctctttggaggcttccaagttagtgatgaatcccaacagctaatgatgctgggtttccagtttatttccttctgttagtttaatgtgcaagtcagtgaggttttgaatgctgtgcattgaatttgcttgctctcttctgtcttttagcaggtttggatgcatctgctcagactacttctcatgaactcaccattccaaacgatgtaagtgtagttaggttgcatgggatgaaaataagaaaatagactgtaaagaaatagatgtcgtttcagcagtgtcctgctaccctttttttttttttttttttaaacagcccaggctgtagtgcagtggtgcgatcttggctcaccgcagcctccgcctcccgggttcaaccaattctcctgcctcaacctcctgagtagctgggattacaggcatgtgccaccatgcctggctaattttgtatttttagtagagatggagtttctccatgttggtcaggctggtctcaaactcccgagctcaggtgatccactcaccttggcctcccaaagtgctgggattacaggtctgagtcaccgcacttggcctacatgtcctgctacttttaagccctagggaaagaaactgggaattttattattttatctttatttttgtttttgtttttcataccccaggaatggaaaatgggaatttttagacacaaaaataagttgattataatatacagaattgtgatgacaaatatgataagagaaaatagactattattgtgtgaggtatgacgagacagcagtaac

SEQ ID NO: 1367 - DNA, 1198 bp, Homo sapiens
attgatagaactccagggctttaaagtaaaggccttgagttgtctcagcattaaacccttgagactactctcagatgactctttctttcctaaactggtattctgtcagcagtttgggaggagccaaagtgagctcagcaataaagaaacattgcttctgtgtattgtgagcactctttagaggggcctgtttccagaaagtacactccttggttagcccaccatggaggtggaactaaaagagaacatagtttgagggacattggataacaagggctgtttcccttggttctgaggtaatagacctccacatgcttgaattgcaaggattaaaggatcatggtactggtaaatttaagaaaccttaaaatgtctcccttggtactccagcactggttatttactcttcacatttcatgaaccaggtagagatgaggtgcagctgagcactggggaaactaactgagttcttgtttctgtgttacaggctttcctcggagacgggtggcatggggagcagctagaacaatgcagattcatccataatccctttctgctgttcaccaccacccatgatccatctgtgtagtttctgaacagtcagcgattccaggttttaaatagtttgtaaattttcagtttctacacactttatcatccactcgtgattttttaattaaagcgttttaattcctttctctgttcagctgttgatgctgagatccatatttagttttataagcttctccctggttttttttttttggctcatgaatttttctgtttgtcatggaaatgtaagagtggaatattaatacatttcagtttagttctgtaatgtcaggaatttttcaaaaaaattaaaagatggactggagctttttctttgtgaatagaaactggatgccacagtgattcatgtgggttttattcctcttgtcttgctgttatttttgtaccttttatccctcaaaggacccttcttgggttttgaatggaagcctttattccggttaagatgttttcttctattttaccacttccatctttttttgtggccctcgatcctatttttccctgactccatgcttggttggcccttataaaacttgtgcccaaaagattgaggattagactttccgaggacttacctgtcctaggggagtaggcaagcacttccactagggagggggtgggg

SEQ ID NO: 1368 - DNA, 1175 bp, Homo sapiens
catgcatcttgctaatggacagaccatgcctgtgttgccagggcctccagtacagatgccgtctgttatatcggtgagctctgtagttggggcagccaaccctaccaacatggtaatccttcccttccacctgaatggtcataaaatacacatgagccccagggaaatgtgggctctgatctatattagctgagcatggcagcctgcctaaactcttcactaacctctgccaatccagcactatggaacactagataaagactcatctggacaattggctcctggtctaggaattgatcttgccagcccactgattagttgctttcacttggcacgtagcacctcccaaattgcccaacaatttcctcaagataacagccccaacccttcccacagaaattgccccaacactgaaggattaaattccctactctggtgctccatggagaaaggtatttcccaggctgtccctgcacgccctatgggcacattgcacacaacaggccctgatgtgccaatctcaaaagcgcttcattttagggaaactgttgccccaccgatggtattatgttcccttctctttttttttttttccttctctcgatccagctggccagacctgtgtccatggtgcccaacattcctggtatccctggcccaccagttaacagtagtggctccatttctccctctggccaccctataccatcagaagccaagatggtgagtacatcccagtctggggcaatgttggcctttctgaaagaagtgggtgataccagcctaggtctttcaagtgagccaagcaaaggaaccttctggggcttgcaaagctaaggactccctgctgtggggtctggaaaagaaaagactccaattcatagctcccatctcctctccccacctttagagcctggtacatagaccatggcagtgaaaagaggcagcacagattgtttggaatggaacacttgccgttttagggtgacagatggagggtgggcgagtgggcaggggagctggccaagaggtgaatagctgcgtaaccagcatttggccaggctccaggagagagctttcatctggacactattgctttaacaacccccagcccccaactgtgcccaggatgatagccagggaacagagtaggcattttagggatccaggtgcac

SEQ ID NO: 1369 - DNA, 1177 bp, Homo sapiens
aaataaggggcaggtagcatcaggaactctcttgttctggctttcccttttataaggagacaaaagccttacatcagaagtgccatcctccacccccaccacggtggatttcattgtcttattggcctgaactgtgtgacaggtttaataccagctgcataggaaaaaggaatatcttgcttttcagcctttatagtgaggcaagcaagagaaaatggttgaaaaatgggggttgggttaagaaaccaataatgtcttcctcaaacctattgccccttccctttcactgccttactctcccttctcctgagcaatccagttatacaaggcattaattgacaacagtcttctcaggactgatagtttatagtttatagctgatatactttggctgtatcctctcctaaatctcaccttgaattgtaataatccccatgtattgtgggagggacctaatgggaagtaattgaatcatgaggggcaggtttttcccatgctgctctcattgatagtgaataaatctcactagatctgatggttttataaaggggagttcccctgcacatgctcttcttgcctactgccatgtaagatgtgactctgcttctcctttgcctcccgccatgattgtgagacctccccagccatgtggaactgtgagtccataaaacctctttcctttataaattacccagtcttgggtatgtcgttattagcagcgagagaacaggctgatacaatagccttattgaaaaaagtcataagagagtactattaaaaagagaagggggccaggcacaggggctcacacctgtaatcccagcactttgggaagctgaggcaggtggatcacttgaggttaggagtttgagaccagcctggccaatatggtgaaaccccatctctactaaaactataaaaattatccgggtgtggtagcacacacctgtaatcccagctactcaggaggccgaagtacgagaatcacttgaacctgggaggcagaggttgcagttagccaatatcatgccactatactccagtctgggtgatgaagtaagactctgccccctgcccccctcccccccgcccccgcccagaaaaagagagtgtgagagaagaaagagcaaagaattatactttctgcttgactatggtgtttaggaatcacatagca

SEQ ID NO: 1370 - DNA, 1253 bp, Homo sapiens
aggggagaccaagccgttaaaatttccccactacttttgtaccattgcagtttggcttttagatgtttactatattggagttctgcttaaagtttgaaaacactgctctagatagacccttccatcctatttgggccctggatattaagtgtctgggccaagaggtcttaatttgtggtaatgagatgggtgaaccattagtgaaggtcatgattatacctgggccatgttacaggattttagattgcctgctcccccttcattcagttcctgtagagcctttggggaatcagggcaagaatttgggcatgatggtgttaccctaaaagcttctttattatgtgagataatcttgaagagggggattctccctgagcccatcttagatatttatccttttctttgtgtgaactagaaattcagtcttttctcttctccttctaccaggaacccttctctgaagcaacagctcttctcctacgccattctgggctttgccctctcggaggccatggggctcttttgtctgatggtagcctttctcatcctctttgccatgtgaaggagccgtctccacctcccatagttctcccgcgtctggttggccccgtgtgttccttttcctatacctccccaggcagcctggggaacgtggttggctcagggtttgacagagaaaagacaaataaatactgtattaataagatgtttcttgagtctcctgtgtatatttcttttccacagttggctgagtgccttcgtgagagtacaaggcccgaagggtagtgatggtgctaaactcaacatggatttggctgagctcactttttcttaattctgtttcaggaaagctttatttgaaatagcataacattttaaattattttcacctggcatggcctgctacttgcctgggaagattggggtcagtagcaacttcaagttctggcttaaaatgttggctaataggctttctgtttccactgtcactctcctggctcaggcccttattgtcatccacctcgtctattgcaagaacctcttaactggccttctgcctccagtctcttccctccagcatttacttctccttaccactgccaggtgaatcctccttaagcataagactggttttatcagttaatggttcaaaaagtcacctcaactttctctgctttatctgtttagtcctatacactacataaagtgactgtcatttttcagatgttttcctgtctttaccatatcttcct

SEQ ID NO: 1371 - DNA, 1212 bp, Homo sapiens
aggaggtcagagggaaagggcatctgtgtggacagtcaccaggccctgctcccaacccctgcccttcttggcctcagccaagaaaaggagatacaggtatggttaacaaggaaaatgactcactgctccaaatcccagatgccttcaggtaatccctacccctatcttatcaatgcactcagaggtcctgcctttaactggcttctatgttgttctagcaccatcttctgcagagcccaaattgccctgcttcccctctctcctgcctctaccccttccccaaccaccaggtaggtacctagggtcctccggggaggaagggaggtgaccatggcccccagggataggagcagagagaagactgggatccagcatccatctggctacaactgaaatgctttccctcttccctgacttccctgggtaacccttagggaagggaacctatagaggtgggggtttcaggtatcagattgtccccttctgccttcccttttattcccaggttcaagggggcaggcacagggaagagagatttgatcatctagtcccggttttgcctggatgtgagatgggctcagggcagggagggggtgatgctgtcatccttctcggctggagcaggaagatgaaggacgatgtcagactcattttcagcctcattaggcagcagacggagatggagggaggagagcaggaggctgggggatgggctctgcactgcagagaccagcagggactaaagaagagaggacatggggaactggaaaaataagccttccaggattgtggggagaaagacgctgtgggagaggccaggatgctgcattaggcacaggataacctgggaacccaggcacatgggtcctgctctccgaagtctgcaagtcaagaagggaacagagcacgccgaccctctccctttcccctctgtctctcttagtggctttacagtgggtaccctgtcagaaaccagcactgggggccctgccacccccacatggaaggagtgtcctatctgtaaggagcgctttcctgctgagagtgacaaggatgccctggaggaccacatggatggacacttctttttcagcacccaggaccccttcacctttgagtgatcttactccctcgtacatgcacaaatacacactcatgcacacacacactcacacacatgcatacacttaggtttcatgcccattttctatc

SEQ ID NO: 1372 - DNA, 1173 bp, Homo sapiens
gggatgcctggcttatagggacattacgaggatttaaaatgaaagctgcaggccaggcgtggtggtgcatgcctgtagtcccagctactcacaaggctgaggcaggagaatctcttgaacccgggaggcagaggttgcaacaagccaagatcgcgccactgcactccagcctgggcgatggagcaagactctgtctcaagataaaataaaataaaaagtgttaccacagtgtctggtacatggtacgcactcactacatggtaactagcattattatgattatgatagaggggcagtgggtttgggaaagaaaggaaggagagggacaggcagaaaggagggagaagagtatggcctgtgggaggtggagaagagaagaaacagtatatggaacaccgagcaaggggctggggccaaggacagtggattattggggtcctgggtccattcttcttcccacagccagctacctgcccaaaccaggagctcagctctaccagttccgatatgtgaaccgccagggccaggtgtgtgggcagagcccccctttccagttccgagagccaaggcccatggatgaactggtgaccctggaggaggctgatgggggctctgacatcctgctggttgtccccaaggcaactgtgttacaggtgagaaaagagcaacagagttattcccagacaagggagtgggagacagcattgcaagaggacccttcccaccttaccctcccctcatctgtggcgccaactaaagacctcgttgaaagttagacaaagtcctgcctccaggagagtctcagtctaacatagacatacacgaacatgtaaggcaggaaaggagaccacccacaggccagtgtaactcaggatttcataagaacttttgcagccttccttctccatgcactgcatcctgccctatgccctagaggaagatcaaagggtggagagaggctactccagggaacattcagagaaaggggagcacaggacctgcttctaggacgagtggggagtgagagcagataggcaaggccccagacctgtactgtccaataccaaaggctcttaactatatatggctcttgagcacttcaaatgcaattaatccaaactgagatgtactataagggtaaaatatactccagattttgaagacttagtattt

SEQ ID NO: 1373 - DNA, 1546 bp, Homo sapiens
tttgaagcagactcagactgtctcaggatcaaagcaaccctcaatggttttgatttatgtcattgcttaccactccccaaccaatcccaggacagctgggtcactgtacccctttgtggtatctgtacctgggcctctccttcctcatagggaccagctgattgaataaatgtgaccaccttatttccaccccccacccccaaaagctacattggaattatttttcctagaaatgtgtataacactcagaattgggcattgatccttaaagcttcatcccattcaccgtattcaacatctgtcatctcttagtgtctgcagtctgaacctaaccttgaccttttttccctctggtttgagaaaactttggacactatttctacttggccaggtgtgggctcaagagccttactctttccatctcagtttaggggcgcagccagctcctcttcccaatagggctctttctgctttccctctccttggccctagatttgtaatccatgaaaaagcacaaggtcctggctccttgcggtcacattctggttctctgtgttttgtggactctgctctcactgttcacccagcactagcagtaccagatggttctgtggagtcctggggaatggagagagcacagtctgactccctgccaagtagccaggagttgacttgcccatggtccgctggctttcccaccacttcctacaggatgggatctaagagactcaagagctgggtttctttcagcactctgtactgtcccaaatagcaaacaaatcactttgtagccagatttctgaatggaaatgagaaattgaattctccatggacttttaggtttatgggggagttttagctgtgtttcttggttttatttcagccaaacatgtctgcttttgattttttttttaaagtataagtggtctatatatatgttcaccttttaaatgtaaatgtttaaaaagtaagcatttatgtgtttccataactgacatctgatgcagacctcattctctccccctcttctaccctcctcttttcccccttttcatactcttgtattggttctaataaatggttgcttttcaaatatggattctgagtggtggtttaaagatctgggtcttatgccccttctttaatttgggccctggagtgtcagctcaatttctgaaagagcaacaagacttggagaacatgggcttcttttctaaggattattggtctctgactttctgcaaataaccacaggttggcgcaagcctgaggaaataagataatgcgtatcctgtttcctactcttatttccttaactggttcagtgtgtacctttcctggtttccatgctcttctctgctcctaatggttcagagaataaatattaggcttcagcaacctagggatccctggaagagtcatctcatggctattagaacttatggaataccacatcaagcaaatgcagtctaaatcaggtttgaaaatatgtgaatttgtaaactttgtattttatctttctgatttgcttcacaaataccaaaga

SEQ ID NO: 1374 - DNA, 1546 bp, Homo sapiens; identical to SEQ ID NO: 1373

SEQ ID NO: 1375 - DNA, 1462 bp, Homo sapiens
agacagggttcaccatcttggccgtgctggtcttgaactcctgaccttgtgatccgcctgcctcggccactcaaagtgctgggattgcaggcgtgagccagcacccggccacagtatctttattacagctcactgcagcctcaatctcctgggctcaaatgatcctcctgcctcagcctcccaagcagctgggactacaggcgcacaccacggtgtctggctaattttattatttaaaaaatgttttgtagagacagtctccctgtgttgcccaggctggtctccaactcgtgagctcaagtgatccacgtgcctcagcctcccaaagtgctgggattacaagcataagccaccgcacccggcccctagtgaacattttactgtatgtgttgataaatcatcttttgagtttctgttgtatgtggggacttcctacactggctgctgtgaagaggtatggaagaaaggagaggctttctgcctagaaattctttgagaacacctgaaaagacagtttaatcatgtcacaacactcttaaggctcaagtcagtgttctggtttccggtagctttaggattggattctaaacgagggctggtggtgagtttggtgtttgtctcgtgtcaccctcacccctcacctcctcagtttaggataagagacataatgatttctaccagaatccaaagtaaatccaaagggggagaaaagacataactgttttttcttctaccttttttttgttaaagagttacatctctcacaggaggaaagaattcaagagtctatatgattagttacagagaatattttcatcccctctccctgaatagaaaagcaggggtcaccatttgtatccttacccttgaggtgtttttgaagatgctgtaactcttgaagttgagctgaggcagaaaggttggaaaaatgcagccctctgggtattgtggggagggatgtgatgtagtaagagggtgttttgtggtgctaggattcccacgccaccaacttgcagctttataagagcgctaccaagaaccaccactggggaaaaggttcttattcattgtttctgttggaatgtgatcttgctttctggattttaggaattcaggttactcagtataaaactctgagaaatcagtgtgacttagtccttcacctcctaagataaagtgaatatttctttacaaaataattcatgtccttaatgttaaagatgtaattttattttcaaaacatctataacatgactttcagaagcagttcatttttccaagattcctcacattatactagataaataataggccctcagttaatacccttcagttattgaattaatctagtttgtggaatgaggtgtatcctgccaacttccctctgctcccaagtacactctgagaggtaaaatgctctgggaaatggaacaagaatcgagtggatgctgactctgtgtgc

SEQ ID NO: 1376 - DNA, 1093 bp, Homo sapiens
attgaattctgtgtgcttatataaattatgtcaaaaattatactgcataattgaggtgacagctgttgctgcagtgacatgacagactggaacaatgaagcttttggtttaagtcagccaggaaaatccttctgaatggtaatgtgattgggcaagagctcataaaccatacctcaagtgggtgggagttttatctctatattccttctctctctgaaggaattaaaggcctagatcaagtgctggataattgacaattgcttgtacttaatctgatcggtatctaaaagaaggaaaggatggtcaggaaacatttatcataaatgtagccaaggatatcaattagggtagacaagaataggacaaaaataggccagagctcctgaggaggtgatatgggtctcttgatttgcagaaaatgacagcctatccaagtggcccagtgtatgcctcccagtagcagtgggcatgtaaactgcagcgaccttatttttaaaaccaaaaacctagtatgtggacaaagaacatgacaatatttggtactgagattggttctgagaaacctggggcatgtggctgctgtggttataggtaatatttaagacattcataaaaatctgatattcttttaccgaaataaccccagtatcatctactacttaccatctgttaatagactttactctgtcttttttgtcttcggtttattgtactgagtgccgccaaaacaacttttgttctcttcctgcctacctgcagctggttctataggaatgtagggagccagaggccagtattgatttcagcccttagcacaaaggaaatcagatgcctgcttccagcatttgttagtgttgagtagatgttcttgccctagaagaattacagcctcaaacagaaacctgtttcatggagctttctcccctcagaagagttaatagttaagagctaagcactcttaaacacctaagtctcaaatgctaaaaatttatttttcttgtgtttagtcctctttcaagacatctttctaagcctttcagtaatcaacattaaaagatctccctttcttcagagttatagcacagctttgccc

SEQ ID NO: 1377 - DNA, 1204 bp, Homo sapiens
ggtggctatggcggttccagcagcagcagtagctatggcagtggcagaagattttaattaggtaagtaagcacctttttgtgtgttgacataattttttaaattgctgatgaacccaataaccctaatgtagctgagcagtgcaacatagttaacattataattgcagtaattgtggatataaagttaatattcagatcagcaaaatttgtgggaaacaaacttgatattggattgtagccttgagtcttaatatgtttagattaacaactttattccatattgttcaacaggaaacaaagcttagcaggagaggagagccagagaagtgacagggaagctacaggttacaacagatttgtgaactcagccaagcacagtggtggcagggcctagctgctacaaagaagacatgttttagacaaatactcatgtgtatgggcaaaaaactcgaggactgtatttgtgactaattgtataacaggttattttagtttctgttctgtggaaagtgtaaagcattccaacaaagggttttaatgtagatttttttttttgcaccccatgctgttgattgctaaatgtaacagtctgatcgtgacgctgaataaatgtcttttttttaatgtgctgtgtaaagttagtctactcttaagccatcttggtaaatttccccaacagtgtgaagttagaattccttcagggtgatgccaggttctatttggaatttatatacaacctgcttgggtggagaagccattgtcttcggaaaccttggtgtagttgaactgatagttactgttgtgacctgaagttcaccattaaaagggattacccaagcaaaatcatggaatggttataaaagtgattgttggcacatcctatgcaatatatctaaattgaataatggtaccagataaaattatagatgggaatgaagcttgtgtatccattatcatgtgtaatcaataaacgatttaattctcttgaatgaaatgacaactgtatggatttgggactggcagagatttggactttccctacccactccccctgataataatgttgaatgcttctatcacaattcaagttcaaagctctgccagggaatagaaactagctgctggctaatgccgctccataaatccgcagatttgaagtgtctgggaggccttttaaaaataactaatatcagaaagcatttt

SEQ ID NO: 1378 - DNA, 1204 bp, Homo sapiens; identical to SEQ ID NO: 1377

SEQ ID NO: 1379 - DNA, 1501 bp, Homo sapiens
cacattatttgtactgtgaatataaatttttgcccttttatttatcttcctttgacccatttccttaaaataatggctcaaagtaatagacttccccaaatggtggggggatgggtgggttattaatgggaggtatggggggtttagcttgagatgggacttggtcttagagctagttctaaaggttgtttacttttctagggaggagtctgctactagtcttatcagctcttaaaaacagaaactcatctgtccaagttcgtggcagaaaggtaagtttttacaaattagtgctcagcaaaagaatgccctgcgttcccaaagtaaaagaatgacaagctgtaccttaaaccaaaacacttcgtaatctcatccaattgcaaaaagagttattagccaaccaggtattcccagtagtgacagtggatataactgtgtagtcattcacctctgcttatatgaatactttacaacctcttttgccttttgcaggaacgtccttgtgaagacctttatctgagccactgtacttcgttatcactgccatgcagtttacatgagctgttctgcagctcaaattccattttgtgaatgggtttttttttttaataaactgtatttaacttagttctgcttgttttgtcctcctttgtgatatctatggttaataacatgttgaaattcaggttagagaggatatggttgattctaatgtgaatttctatatttagattcatcccattcagcttcatggtttaatgaaaatagaaatgggttctcactacaggagtaattcttggctcactataagtaaactttactattgatccaattgagcatgtcctttttctagctcccctggcaagggaaaatcaagttgtagcactgccattgagctcagtatgtctctattgggacttacgctcaccatctgttgcagaaggacataatggatttcatctttggcaaacaagttgggcttattggccagctgtctcatacttcagtagaattctcaagccaggagtaagaaagtgaactgaatgagaggcaagacttagcctctcaaagatagcctaaaaatgtaaggactattttggaagcaataattgtaccctctagcaaatgcttaggttcttgcgtgtgtgtgtgtgtgtgacgaagtgtccctctgtcacccagactggagtgcagtgacactctgctcactgcaacctctgcctcccaggttcaagcaattctgcctcaacctcccgtgtaggtgggactagaggtgcctggctaattgtatttttagtagagacacagcgtttcaccgtattgcccaggctggtcttgaactcctggccttaggtaataaacgcccaccttggccttccaaagtgctgggattagaggtgtgagccaccgtgcctggccactaaactgtttctgttattttcaaggaaagtttatccagcctcagttttgagcctaacaaaagtggaggtaggattcttgg

SEQ ID NO: 1380 - DNA, 1207 bp, Homo sapiens
ttataccaggtatacctcttctctcttcatcccctcagtgggtttgaatttttttggaattttccaaacaatctgctagggccttagagagcttcttcccatctctttacccttggggattttctattctccattcttctaaggacagggaagacaagtgaggggaaggagatccccagccctcatccttaccctgccctgtcagcaagctttcctcaatgctgctcttatctctgcaggtgctgcagtcagccaaagaacagatcaagtggtcactccttcggtgaagacctcactgttcctggctcttcatcctcttcaaaaaatttgcatgtctgctgtgaattttcatctagttccccaatcgatgctctcagggtcatctcggggatcacagggatccttaaatctccattctgtttgtggttgccccctcaacctcccctacacccttcctattctttttcattcttcttgcagttctgggagtaaagctcccagcatatttagataatagggcaggggaagcaccctctttctttctagactggattatgctcacatgctcccttgccctgacatttttgtaaattctgtgccctttgctgtagctacacttcagattaaagtaggagaaagaatgtgctgagtgttttcctccctttgcctctacctggccctcatcccaacagcccagcaaggggagagagaaagagaattcttttctatagaacgagtgggggcggggatgggtagggatttatccaatctaagccctaaccccacttagtgacctcagtgttttcttccattccttcttactgccctgtcctctgccttggaagaggctttgggaatagttcatagggaagggacaacatggaagaaacagcgatttaaattgtattgaacagggcatataaaatgcattctgtaccctgatctggcatatagcttcaaaactgcagtggcgagtgtccatctcttagttagctaccttaactgtccacccttactacctgtgggatcgttgcctggtttgtcttctctgtgtcctggagcaaagccagttcctaaaactaaaactccattctagtcttgggaagaaaagtttctactcagaactggggaaggagtggaacttatgacttgggcctctaggctgtctctgtcccctcagctccccgacatgcatttactctctgcc

SEQ ID NO: 1381 - DNA, 1154 bp, Homo sapiens
caggtcaattagagagagtatagagaccccagagtcccctgggtctggaaagcgttaggagaggtcaagaaaggagcagtaaggaggctgaaggttacagggcatttgaatccaaatcactgctctgggctagggaatagagccagcagaccaaggtgggaaggattctggaagggggacattttagtctcctaaccccaaagctcagggtggaagaggggagaacaaggaagcagagtgtataattattttttccttttatttttggaatctaacagtacctggcagcagggaggggaaagtacagtggggaaaagcatctgacaaggccagttagaacagaggatgggaaggatggagactcccgggcttggaaggctaggaagcaggcagagactggttgccatttcaagtcactagctaggcccattcattcctcccacaaccctgacccattctcctctggactcactgtgcctcagtttcttcccctcaatggaatgagaaatgacagcacccgccacagccaagagatgaattctgagcacttaccacgggcactttatggacataaaatacctctcgctgtgggacagataaccagggcaccagagtagtggtgaagagatgtgaggcttaagaggagtcacaggcttcagagtacaagttcccctctgcctcccagctggacagtgcctagaagccaaggagttgagaatctcctgatccacaccctatccttacttcaccaccaggcctcttggctccaggcaagagcttagaggatgtcaggagaggtgggggtaagaatcttcagcaaaactgtcactctaagtagagccagcagttacgggtctgataaaaacagtactgaactaaagtaaagcccaagctggtgagcaaaactggatggctcattcttcccaagagcatgactctcccccttggccagttggtggaaggggcaaaggtatgtgaccacccttgagaaggtgatgttggtgagctttaacatcttattcctattcttatagtgagaaagtgaaacaagatctttcagtagaggaatgggcagggctgttaggctcttcagcttgccttcacccatatagcagctatgctaaccccaagcctctctggccctgttcttcatc

SEQ ID NO: 1382 - DNA, 1177 bp, Homo sapiens
cacagtacccaagggagaagccaaacctaagcggcggaagaaagtgaggaggcccttccaacgttgatgccccttctctttcctcaaatcaatgtcagggagtcaaaagggctgtagcacaggatggagtttgatttatccctcctcccccaacacctaggaactgaatctttttctttttattttttgagatggagtcttgctctgttgcccagctggagtgcagtggtgtgatctcagcttactgcaacctctgtctcccgggttcaagcaattctcccatctcagcctcctgagtagctgggattacaggcacacaccaccacacctggcccagctaattcttttttgtatttttagtagagacggggtttcaccatgttgcccaggctggtctcgaactcctgagctcaggtgatccacccgtcttggcctcccaaagtgctggattacaggcataagccactgtgcccggcctgaatcttgtcttttgacaataccaaagaaatagggggtagctagagtaaagaacctagggcctggacctgggctggacagtgtatccctttaggtgtgggaactgggtatttccctggggtctgtatgcctttgtcttgtcatttgcttttagggcagatgacactttttcccacccttttaaagctacaagtctatcttctttcttgacccatttcaggagggagccctctcctttatcctgatataatatttaaaagagaacaagaaagcatgtagccctaatgataggagattatcgcatagagttcagagactggaaactgaattttccctcgactttcactttgtgggtaaatcacccaattttaggctcttttctgcaaggatggccaaaattaatcatttttaaaaagtagattcatgcccactgcccttgggtgagggggaagaatacgggggttcccagaagcccccatgtgatccaagggtttgtattttttttttaagtttgttcatatttgtatgtacatgactatttaaagccaggggattatctttctataaatgtataactggcaacctgtatcttccctctttgttgcccatatagccggagccctttttctcatttgagaatctcttccctactaagtgttaagcttagagtgaagggcacctcctactggaccaaaggaga

SEQ ID NO: 1383 - DNA, 1178 bp, Homo sapiens
tctccctgatggagccacccttcgctaccttctcccgtgatggtgatagaaattgaggggtctaaggtgggaaaaggcaaacaggaaagtatctagtggcttttctccgaagccctttgacaagtgaataaaacccactattccttctggctagagaagaatttgcagcctggctggccgagatgctgaagtgtctgctgtgtatgtaaggtgtatgtgttggaaacggagaatcacagcttttatcatggttttgtcccttcctaatggcctcatctttaggaaaatatgcatagtagtaatagctactcaatgatgatcaaataatatatgtaaaagcaatttataaaatactgtgcaagtgcaaagtgtttctgtttttgtagccctcatatgtgtagtctgtagtctgtagaagcaacagtgtgcctgtgccttggtacacacggtgttttaaaatgtgccattttgcttcttgctctgctgctttccatgttccttacacctcagcccacctattttatggtatctgatgacaacccaggttgctgctacttctccccaacctcacaatttaaagtggtactacctctttccttctgttctctacccagtagctccttcatgaattaccaacttttaatgtgtgttttgaaaatactacttatccagtatacttctctttactcttaatcattttctttaccctgactccgtgaaaatccaggtatcacatcttaccttaccttgtcactaaaagctgttttctgttttccgtgactatgtggaagagaaaaaggaataaactgcttttttgttttcctttactatgtccagatcattgatctaccactgtcactctaatcctcatggaaggtattgccatgcaattatagcagtttctgtaaaactttagtgtcatcatttactgcccacagggacccagacctattgcatcatatttttttctctcctttttttcttgctatcattttcagtgtctccagcaccattggaatattctgatttcatagttcctcagcatgagacggtcgactttcctttgtattttcaaaccagttgcacatcagaatcactacaacctggatctcatctaggacaccgctttttcttcagctgctccccatcactttagcctccttaccagtcacctattt

SEQ ID NO: 1384 - DNA, 1220 bp, Homo sapiens
atcctgtctcaaaaaagaaaaaaagaaagaaagaaagaaaagaaagaaagaaagaaagaaagaaagaaagaaagaaagaaagaaagaaagaaagaaagaaaagaaggcaaaccagtaaaacaagaatttctgtacagtccgcgcctatccatagcaaaatggaggacttctccagggaactgcaactcccaagaagcaatgcgagggaaggtggcggtcactattttttccccgtctgcacctctaggtccaatattggaaataggtgctgacgtttaaataacacagcgtcctcatactaaatctgggggggaactggtaactcgaaaaccaaatactcggtcttccgaaagaactaactcaacctacccttctacaagagggtccgaaaaccactgttacgcccattgggtagccccgcccttggggggggcaaagggcgtgaaagcggaagtgacgacacccggcgctccattaaatagccgtagacggaacttcgcctttctctcggccttagcgccatttttttgggtgagtgttttttggttcctgcgttgggattccgtgtacaatccatagacatctgacctcggcacttagcatcatcacagcaaactaactgtagcctttctctctttccctgtagaaacctctgcgccatgagagccaaggtgagcggttcctggtagtaagcttgggaggtaggagttggcgagtagtagcgaggagacgaaggcaagtccgccatacctcctgaactactgggtttcaagggtgcccaagagctggtgggagagagaaggtagtttgtgagagagctagcggttaagtgctatgggtagagagggtgggcttagaaaagggtggaattctgatcttatgttgggagggtgtccaagttactgatgtagttgttacgaccaatctttcatacttcttggttaagaatctgtccggttctaaagagtgcatttcatatccttgctaagcctactaataagcttcatcccttttttttttttttttttttaattatctgctgcttgtgatcggttgctagtggaggaagaagcgaatgcgcaggtacgttgagactttgccagcccaggaggagggaagttccttggacaaaacttaggagaaacatttggtttggaaatcttaaaagatctttaggagaaaaacgtttgagtgttttctccctggagccaggatttaac

SEQ ID NO: 1385 - DNA, 1205 bp, Homo sapiens
gaagcaaaaaattggattttaattgagtcttgaaggatgagtaggatttaaataggccgagggaagagaatgaggactttccaaatagtgggagcagaatgaacaaaggtggaaggggccatggattgggcagaggactataaaagatggctctggccgaggtgggcggattgcctgagctcaggagtttgagaccagcctggggaacaccatgaaaccctgtctctactaaaaaatacaaaaatttagctgggcgtgacggcatgcgcctgtagtcccagctatttgggaggctgaggtaggagaatgggttgaacccaggaggtcgaagttgcagtgagccaagatggcgccattgcactccagcatgggcgacagagtgagactctgtctcaaaaaaaaaaaaaaaaaaaagatggccctgagtggagcaggaggtttgtgattggtacagagaggaatgaagttggagccatgttatcattttcacagtatgcctccctttcccctaatcccttcactacagtccttcctcctgtgcctgtaggtgaaggatgattccagggccctgactttaggagcactgacgctgcctctggcccgcctgctgactgccccagaactcatcctggaccagtggttccagctcagcagctctggtccaaactccagactctatatgaaactagtcatgagggtatggaaatagaggaggtactgaggtgtgggggaaaggcctgttgattctttggtattaagagtaaggaaagggacccccctaagattaaaagagctaatacatgtagaagtgccaagcaggcacaaaaacatatattgatctgactggtggaaggaatggcttatgagttgagggggtgtggagggaaccctgtagagatgagcccagccagggcagcacctagttcccctgtcacagcccctcctctaccccaccccacatgctttgcctgctggtgacgagctgcacttctttgattcagcatcatactacccttcctagatcctgtacttggattcatcagaaatatgcttccccacggtgcctggttgtcctggtgcttgggacgtggacagtgagaatccccagagaggcagcagtgtggatgccccacctcgaccctgtcacacgactcctgatagccagtttgggactgaggtgagtctatatctggaaaggactaggg

SEQ ID NO: 1386 - DNA, 1216 bp, Homo sapiens
tctagaatgggccctgaggttttacttatgcggccctgggtgctggtgtctgggaactctcaccagcctgtataccagtcttgctttagggtgaccttctggccctggagcatgggtagctggcatagaggggtatgggttgcctgccccattctgctgctatagctgaacagtcctttccccttccctcgctgggcagcttggaggtaccctaacccaaaactctgtcctctcctcccgccagtggctgacagtagctgtaggtgtagtggagaacttttctgcctctgctgtgttcttgctgcttaggtttgggtgggggactaacagctgctgggaggggagctaggggcatggagaactggtcagactcaaggtggctcctctgcaaactgaccccagggttggttgctgtgggcatgttcccgcttatgctacctttgcagtctggtagtcccctggcccttggcgtacccctccacagccctgttccctggctcatcccacctttcctttccacagagctcgtccgcatggtgctgaatggctgaggaccttcccagtctccccagagtccgtgcctttccctgtgtgaattttgtatctagcctaaagtttccctaggctttcttgtctcagcaactttcccatcttgtctctcttggatgatgtttgccgtcagcattcaccaaataaacttgctctctgggccctcggttcggttctttctttcctgaacagggtaaaggggaagaaggtgagatggtgatgatttctgccctgaggcagagtccaaggtcaatcaatggtgcaggggttgaggaaagctgggggaggccctgtactagccatctgggcttcatttaaaaactactggccccattcatccatcttacacaagctacctcttgggagattaggaaagccatagatcccagtaggactaaggctggccatccctgttccattccatatcaggctgtcttctcctacccttccagctccttaaatctggcccccgccctcccaagctcccaataaggccttttgtggggaagcctgtggagtgtttattggagctaaagccaggccattattagcactgcctaagcctgtccgtcacctcagcagggtgaagggccaattataacaaaagtaggtaaggggcttgcctcctctctaataagggaaggagtgaaaccactacttctgaagg

SEQ ID NO: 1387 - DNA, 1175 bp, Homo sapiens
taaaatggctaggtgcagtggctcatgcctgtaatcccagcactttgggaggctgaggcaggaggctcacctgaggtcaggagtttgagaccagcctgaccaacatggagaaaccctgtctctactaaaaatacaaaattagccggccgtggtggcacatgcctgtaatcagagctactgaggaggctgaggcaggagaatctcttgaacccaggaggcggaagttgccatgagccaagatcatgccattgcattccagcctgggcaacaagagggaaactccatctcaaaaaaaaaaattgtatgaaatatccctaagtatagccaaggagataattcatttaaagaaaaccccatcaaggaaaagtaagacatatttgaaaccctttcatctagcacatagcaggcactcagcatgtagagtcaaataatctacttttttccatctttatcatgcaggagaagtcattagctctcttaccattttttcctttagccctttaacaaacatttatttttcttcttcttgtttctctctctctttcttctaagctacctggcctatcgaaactttatgattgacacttaccgactgaacccccaagagtatcttacctctaccgcctgccgccgaaacctagcgggtgatgtctgtgccatcatgaggtgggtcttgtggctgaggggaagggggtacatgaggatgcctgcctatggatgtgttttggcaacagtagagatgccagcaaggaacacagaggagcagacagaaaaaagcacctctagagaaaggtgaagtacaggtttggggaatgaatgacttgagggattagcaatggcattctctgaagtgtagaatataggacaaagaaggagcatgtctgtaattgaaagatactggttcaggccaggtgtggtggctcatgcctataatccaaacattttgggagaccaaggtgggaggattgctggagcccagaagttcgagaccagcctggacaaaatggcaaaaccccatctctagagaaaatgcaaaaaaattagctaggcatggtggcacgtgcctgtggtcttagtgactcaggaggctgaggtgggaggatcccctgagccctggaggtggaggctgcagtgagcggtgatcacaccactgcacttcagtctctcttagggaa

SEQ ID NO: 1388 - DNA, 1126 bp, Homo sapiens
cctgtctcccgccgaaagaagatttcagccaagacactgacagatgaggtgacaaatcctgttctttttttcctggcgcccttagcataagtctcagaacaaatcttcagtggggattgtaggctgacatttgtcctgattctccatcctataggtgaacagcccagattcagatcgacgggacaagaaggggggaaactataagaagaggaagcgctccccctctccttcaccaaccccagaagcaaagaagaaaaatgctaagaaagggtgtgccagcccctagcctgcccccgtgttcaccattctctccacatcatgttgaaggaaggaaagacaaatcccttcctataaccacctggccctgacctgggtgtgccataatactgcaggtgtcctgagagggaagatgaggagatctttagctgctcagttgttagttctggttctggccccactagtacatttaaagagagctttatcaagtgaaaagcctttgccacttcccattactgtgtgattactggtttctgtttgtactcagctctacccttggaattctctgtcacttcccttcccttgaacttcaacttccagggactccttgtccaaggatgactgggttctctttcactctctttccttcccagtccctcaacaccttacactaagtcaaagcgtggccacagagaagaggagcaagaagacctgacaaaggacatggacgagccctcaccagtccccaatgtagaagaggtgacacttcccaaaacaggtacaggccaggctgagctcctgggatccacccccactccccgtcttgactctcctttgccaaaccccaagtgagctgatttctcaggtccacctcccagtctacaggatcttttccttaaatttagctggttattggaattacggtcattaccctggaaaatcctctaactgtatattcatatctgagttgtggactgtgctttgtgcctgatagtagttgtctccaaactctttgattatgtgtttctgacagtaaaatatatttgagcatggccaggcacggtggcttatgactgtaatcccagcattttgggaggccgaggcgggcggatcacctgaggtcaggaat

SEQ ID NO: 1389 - DNA, 2088 bp, Homo sapiens
tgtttccaccactgtctgcccacccgagcaccttcttactccctggacctagaaggggagaagaggctggaggtggggtggatggggccagagtgaacggttctacagctgtatccccagaacctcctccagggtcttggaaggagtcctgagaggtgggattggggccgggctggcagggctgagtttgcgcactgtgtatcttatgcacatgagtgtttttgtctaaatgactccagtgactgctccagcggggaggccccttcctccttccctctcagccatttctcacccacttcccatacccagtgttcatcccctacctccccttcccaccgcaaaggaaaatagccttacagaccctagcccagaaaccctactcctggggcaaaccagtatgggcccccatcccgcctagtttgaaccctaccttttaagaaggagggataaggaacaaagcagccccttcccctctaattgtggtggctccagccttctgcagccttgacccaggttgggcaagggcggaggtgaggaatctttgaggaccaagcccagtggtctgggaatcgggaggtagagagggaagggtctgccttgggggctccctcctcccaacccaacccctagagaagcgaccaaatcccagagatggggtgaagctggggtggggagggtctgctctttgaattacttgaaggtactgactccaaggctgctgttgcccacttaggtgtgagggggacactgtcactgcatttgggagggcagagggtggcgggtaaccagaggatccaccttggccctcacccactcctgctaggccctttccctggggaatctggaagcctgactttgcccccagggaagttggggaccgccttccctcccttctccacctctcactctgggcaccctctccaattgcactaaagtagctgttgtgccagtctgccccccacaaggggggaggtctctgcttccagtcttcttcccccgctgcctccgctcccaccctggacaatctccttgtttcccttgtgttcctggatagctcagctttgtatgtgtgtttggggggtgggggtgggttctggcttgagtgggtttggcaggggtttgggaagggttaggggaggatggaggatgaagtctcctacccccttctccagctccaggccacagaagcctgggaagggagggtgcctactctcgctgctgtgtgtcttgcagatgtgccaaaatgggggtgggtgggaggggagggtgcctggcagagcagcccctggggtggctctctcaaagcaatatagttcccctgcgggggacagcaagacaggggagagggttggggtggggacctgggggttccccatgtacagctatgtatattcaggggtgttctccgtctggtacccgctgtgggcatctatgtgtgtgtgaacctccccttccccatgccctgcatgacctgtgatgctgcagacaccaccatcctgtgtgcaggtgtgtgttggggggcacggaggggcatgttccatgtcctgttgcaccctccaccctgtgacccatgtactcggttgtaggaagtaaagagaactgagcacaattcactggattctagtggaatctttctctaagcaattttcccattcctgcctctccctgccccggaaccacctgtggtgctagtgttgggatcgggggcgtttaacgctggtgggcagcaataaggggcagatgtgcccagatgcctgcatccccagggtgccgagggcagcaggaaaaagtggggacctcggtgcatttgccccacccctcccctccctgggctaaagcacaatgttctccccgcagattaatgaccctgcaccctccaggcccctactcacatcctcccccaaccggcttcgggtcctcccaccacactctggttttctatgctgttttggtgcaagtacaactgtcgtagtcatggctttgggatgggttctgtttattaaaatcctattgctcctactggccctgtgtcccgcctccattcctgtggttggggggaaggaagggcaacccgacccctttccactg

SEQ ID NO: 1390 - DNA, 1164 bp, Homo sapiens
gggagctcgctccagccagaatccctagagtggagcccctccacggacgccccccactcaaacctaggtgctcccccacccccacccccacaccggttccgctccggctccagcccgctctcagaatgccggttctctctgcagccgcccctggtccaggccatctttagccgagatgtggaggaagtgcgttccctactctcgcagaaggagaacatcaatgtgctggtgagttgggagcagggaggatggcgagaccggaatcctggctcccgtgttctggacccctccccaccggtggggcggctccgtgtctcctctgctcagatgaggccgcagttctttccatcctggagtgaaagcctactctgcatttggggatggagagcaggtcaggcttgaagcccagatcacttgggctgggaatgcccaggaacgttgttctcttctcaacctccggagtctgcagcgcccccacccctcctggaaaaaggagccggcttctcagcccattggccctgactccaccctccctaggtgcttgcctttgactcccaataccgggacttaggacgctgcagaaactatgggaagaggttgtggggaagggcctggagctctgagacttgggctggggtccttgatagcccccttaccccgcgcccatactccctgctcttttttgccttcccaggaccaagagaggcgaactccattgcatgctgctgcctacgtaggcgatgtccccatcctccagttgctactgatgtcaggtgaaagtggggagctggaaggtgtggcacatagggagcgaagggaggggaggagtcttttttgatattcaaggattgctctccccggcttggtccaggcgaggctccagctccattcagatttcctggcctgattactggcttccttcatacctcctccccaccttccatcaaaataggaaattatatccccacaggtgctaatgtcaatgctaaggacacactgtggctgacccctcttcatcgtgctgctgcctcccgaaacgaggtatgcacccccaccttctattaccctttcaaaaaggataagttgcttaaaggtgggggttaagggttaaggagcctcagtcctcagccctacaagctgttctaccccaggtagtgaggagat

SEQ ID NO: 1391 - DNA, 1135 bp, Homo sapiens
ttccatgggtcaaagccggttgcagagaatctgtagtcactttggagctttagcttctctgccaagccctcaataagccagcaaaccaggactctgccccttctgtttccataggaatcatgttggatagtcagctgtaccaagccccttggccctctcccatgcacacaaacacctcctagcaagacctgttggttagctggacatgctttggcaatttttttatactaccaagtgaccataaaggcatggcatttgttgtgactggcacccaatgtttgattttttttttaaaactatccaattaaaattaaggtctgggagtgttctgtttcccattactttaatactcacctcctcccagactttctacacctgttgcacctcaggcagaggatgttctggacctccccctcttggtccctactagagacctctcaacagatctgtgggcccagtcattgggttttatcagtgcttaatgtgaactaagttttttacttccacagaatacaagccactaccttctgacctccccaccccccaccaacccccatcttttaatatgctgtggggcatagaactccggaatgaccagcatgatattttcagagtcttgtccccggggtattagcacctctttttgaacagggaattgattcaagattggacatggtctcctctgattatcaggtactggggctgagggcattaaaaatagtaagcctccctcctcgtcccctgcctcaagaaattgcctccttatttatcaacatctttttcctccctttccctgagagctcacagtacaatgtttcagaagccccatttgcacaggttttcagcaactcagaatgctctacttctttttctttgagaaaggattaagatacactcctgctgtgcccccatctttcctccaaactcctgcctgtgtttgtgtggatacccagtcccagaaccacactgttgagttggacacactgtaaacccctgggtaactgtcaagtcatgatggagacttcaggttgttctgtataaaatgcaaaataaatgtttttattaacaatgcttgagcctattattaaataaggcctggaagaacctttattatgaggtaaggaatctggctagc

SEQ ID NO: 1392 - DNA, 1107 bp, Homo sapiens
gtgagctaagattgcgccattgcactccagcctgggcaacaagagtgaaactctgtctcagaaaaccatatcagagttcaaacttgactttagcatttaacctaatactatgagccttagtttactcatctttaaaatggcagtcattatatactttgtagtagtaagcattgggaataatgttttagtgtacattagatagtattacaaatcacttagtgcctgggtcataatagttattcagtgaaatggttatgattgttattctctactttcaaacatactcaatatataacaacccatcatataactaaccatcaacccaaatagccccaattcatggaggacagacgatatccctgcctaattcttctttgctgataattcctttttttttctccatcttgctcctcttctgtcagttgatttatgaagactctatggatctaatcgcaaagctaccttgtgttgcagcaaagatctaccgaaatctctacagagaaggcagcggtattggggccattgactctaacctggactggtctcacaatttcaccaacatgttaggctatactgatcatcagttcactgagctcacgcgcctgtacctcaccatccacaggtaagctagacccagcaaccacagccactaggtgcctcaattggtgggaaatttttttaaaagctcctttatgttctcatcttctgagaacagatgataggcagcaagaagacagaaacgtggcataaaggatgatccaaggcaagaaaggggtctagtaagcaaggtcaggaggcctaaagaaattactgtaaccatgctaagaacaagatggtgcttctggctgggaaaaggtactagctgctcacattagatggtccttcagctttccaggagctcgctctttggggccattgctattaaagctaggttggagtcatggagcagagcatacaggcatcatcaaccagtaacctctccagctctgtggatgagtgaacaaaagctggtaatgagattaggatgcttttttttttttttttttttagatggagtcttgctctgtcgccaggttggagtgcaatggcgcaatcttggctcactgc

SEQ ID NO: 1393 - DNA, 1182 bp, Homo sapiens
ggggcttatgccaaagatgtaaaattcggtgcagatgcccgagccttaatgcttcaaggtatagaccttttagccgatgctgtagcccttacaatggggccaaagggaagaagaacagtgattatcgagcagagctggggaagtcccaaagtaacaaaagatggtgtgactgttgcaaagtcaattgacttaaaggataaatataaaaacattggagctaaacttgttcaagatgttgccaataacacaaatgaagagactggggatggccctaccactgctactgtactggcacgctctatagccaaggaaggcatcgagaagattagcaaaggtgctaatccagtggaaatcaggagaggtgtgatgttagttgttgatgctgtaattgctgaacttaaaaagcagtctaaacctgtgaccacccctgaagaaattgcacaggttgctacaatttctgcaaacggagacaaagaaattggcaatatctctgatgcaatgaaaaaggttggaagaaagggtgtcatcacagtaaaggatggaaaaacactgaatgatgaattagaaattattgaaggcataaagtttgatcgaggctatatttctccatactttattaatacatcaaaaggtcagaaatgtgaattccaggatgcctatgttctgttgagcgaaaagaaaatttctagtgtccagtccgttgtacctgctcttgaaattgccaatgctcaccgtaagcctttggtcataatcgctgaagacgttgatggagaagctctaagtacactcgtcttgaataggctaaaggttggtcttcaggatgtggcaatcaaggctccagggtttggtgacaatagaaagaaccagcttaaagatatggcaattgctactggtggtgcagtgtttggagaagaggggctgaccctaaatcttgaagatgttcagcctcatgacttaggaaacgttggagaggtcattgtgaccaaagatgatgccacgctcttaaaagaaaaaggtgacaaggctcaaattgaaaaacgtattcaagaaatcattgagcagttagatgtcacaactagtgaatatgaaaaggaaaaactgaatgaacggctggcaaaactttcagatgtagtagctgtgctgaaggttggtgggacaagtgatgttgaagtgaatgaaaag

SEQ ID NO: 1394 - DNA, 1219 bp, Homo sapiens
attggaattatttgggaatgcttttaaaacaatttgtaattatttctttacaaaccaaaacagaacagaaaggtgtggtgctggaacatcgatgaaggagccctacttactgagcttagttatggacttttttgatgcatgtgtgtatgtgttttaaaaagtatgcaggctctaaaaatgttattttgtaaagctctcagctcatgcaccccatctcctcttcacccatattatgccttctttctcttgtccagattcttctttttctcttttctaaacagctgagcctgcctactttgcccttttacagcttttaattttatggatttttaaaaatgaaatttcatgtggaatttggggttggggggcaggctgggcaaggaacaaggcagaacactaagtaggccatggaagtggctgttctttcccccaccctgccacaccctgggagaaaaaactagactttggcttcagaaagcacagatgtgacccaggcttactaaagagacaactccacagccctgggaacacacccttgagccaaacttggttgaagactaggtcttccctggcaagttccggaagaatggacttactgacttttatcaactcttctcactgccaaggccaacagcatctgaggtatagctttttgggagtacctgctttcttgcctcctggaggatattttctgtcctgggcttcatggcccctctcttccctgttacacattgctgtgctcagagcctttgcagctgcgacctagttgaatccacataggctccttccacacggtggaagatctgctgcttcactcacagaccaggagttctcaatcagaggtggttttgtccctcaggcctttggcaacatctagagacagttttgattgccacgcctggaggtgggatgtgtgtgctactggcatctagtggctgctaaacatcctacactgcataggatagtccccactacccccagccaagaattatctgactccaggggtcaatattgccaagactgggaaacactgatatagacagtgttgtccctgcctcctgggttagggtaaattttcaccccaaccctggacaaacagtgccttttgacactcatgcaactgttggggaaggactggactgggatccttgaattctccccagactttgacttttgataactctgcatatagcaagagtgattcttgaaagagctgtgg

SEQ ID NO: 1395 - DNA, 1195 bp, Homo sapiens
cactctgtactgtgtgcggacccgcagtgacggccagtaaagtggacttaactcccaagtgtgtcgcgccggacaccgggccctggacatgctgcttccatgttcagtcccttccctgcttctcgctgtctttcttttcccacctcccaccccccagttttcagattttctctcatccaataatgtaaaactatcgtgtacgggttcctccctccttttctcttctcccaaatcttttcccttcaaaggaaaaaaaaatgttcagaggtccctgtcttctgtccccatcttcctgccgatagctatcccctgtatgatgttggatgctcctcacatgctgagtttccagccttttctgaaactcagtagctggggagagggcagggaggcttcctgggccttccagcctccttccccacctccttcccaaaccctcttgggaactcctcagggacaactactgctgagtttgggtgcaccctaagatggaggccaggtagcaatggggccggcctcagagagagcgctgtgtgtgtgtgtgtgtgtgtgtgtgtgtgtgtgtgtcggcctcagagcgcgctgtgtgtgtgtgtgtgtgtgtcagcctcagagcgcgcgctgtgtgtgtgtgtgtgtgtgcgtgcttgtgaccctgtattgtttgataggatccattcagtttccccaagtacctgttttcattcccatttttcccattgtttaaaaccatcacttttttgtctttgggaaaccacaggaacaatttctctggagacaaggctgtgtctctctcctggtcatttttgttccagcctcttcagactgtgcaatctttcagcaggaactccctctcttctcggtagctttgaatcttaagcttctacgggagagtggtagaactggatcatttcctaatcccatttagttgtgcttttcttcatttacttcataccccaggaccccttccccagcagcagagaccctggagcacaggagagtagggaggaggggttctgggtccatcactgccctacatgtgactatgtccaagttaagcccccaacacgagaggaaagctgctgactcccagctatagccatgggcacttggccccctgcttttcctgctcagcagagcccctcccttcagagattacgggtacttgcactggggaggtggctgctggctggcccaa

SEQ ID NO: 1396 - DNA, 1165 bp, Homo sapiens
gttcctgggtcagctgggaagactttcctttaaaaaaaaaaaaaggacttctgcaatgggagagacatttccattaaagattaaaggaaggccgggtgccatggctcacactgtaatcccagcactttgggaggccgaggcgggcagatcgcttgagcccagcagttcaagaccagcctgggcaacatggcgagacctcatctctacaaaaaatacgaaaattagctgggtgtggtggcatgtacctgtagtcccagctatttgagagactgaggtgggagaattgcttgggcttaggaggtcgaggctgcagtaagcagagatcatgccactgcactccagcttgggtgacagagtgagaccctatctcaaaaaaaaaaaaaaaattacataaaaattaaaggaagaacctcttgtagacatgcaaattgtcatcttctgttatgtttaacagaactctctactcacttttctctctctagcccctgcctgacttctcacgagtccctggtctgacattgcccagtggagccttctcagactgcttgaccattgtggagttcctgcatagctttggcaaggtgctgggctttgatcctgccaaagatgtgcctagcctgggggtcctgcaggagggactcctgtgtcaaggtgacagcttgggtgaggtgcaagacctgctggtcaggctgctgaaggctgcactccatgatcctggctttccctcctactgtcaggtgagtgcaagtccctcccaaagtaaccaggacaagtaaaggagatgtaactacttagtgtttctcttttccttatatttttccatttctttttcttcctgactcctctccttattttatttttctttattttttccttttcttttgtggtcttctttcgtattctgtcttaacccccatagttctcttctgatgtattttcctcttgcacattcacccaacttggttgtgcatctttccctactcacccccattatgctgtcctccacacagtccctaaagatcttgggggagaaggtgtctgagatcccactgacaagagacaatgtgtcagagatcctgcgctgcttccttatggcatatggagtagagccagccctctgtgaccgcctgcgcacccagccttttcaggcccagccaccccagca

SEQ ID NO: 1397 - DNA, 1095 bp, Homo sapiens
tgtcgcccaggctggagtacactggtgcaatcttggctcactgcaacctccacctgccgggttcaagtgattctccagcctcaaccatccaagtagctgggattacaggcacacgccaccacgcctggctaatttttgtatttttagtagccatggggtttcaccatgttggctgggcttgtctcgaactcctgaccttaggtgatccgcctgccttggcctcccaaagtgctgggattacaggtgtaagccaccgtgcctggcccatgtgttcttaattcatactgtatcatatcttgtaaatttgatttgtgagggaaatttaagctttctaagatgacatgaattcatcacattctaactgatggcctgaagtggtgaggaatgttacatgatgcagaaagttgatatccctccgcttcttactctttttttttttctcccccatcatacaggtgaatatgaccatctcccagaacaggccttctatatggtgggacccattgaagaagctgtggcaaaagctgataagctggctgaagagcattcatcgtgaggggtctttgtcctctgtactgtctctctccttgcccctaacccaaaaagcttcatttttctgtgtaggctgcacaagagccttgattgaagatatattctttctgaacagtatttaaggtttccaataaaatgtacacccctcagaatttgtctgattctcttggttctgacaacatagtcaacactgaagggttatgtatttaattttagttttagagacacggtgtctggctgtgttgccaagactggtctctaactcctgggctcgagatctcccacctcagtctcctgagtagctggggctacaggtgtatgtagtctcacatcaccagcactgttttcaacaattagatttttagagtggctataagaagcagtttcagcatgaagtgggccatgtatgtttgaaattggtccttaaaaatagccattctcttttgttgatggacaaccgtacctcttgtgaggggtttcctgtgggtagtgtgatcttagtagggcctcagttttgggccttttgttcaatacaaattgatt

SEQ ID NO: 1398 - DNA, 1202 bp, Homo sapiens
tttcttcgacccagctctgtcccattttgtataaagtcctttgtgtgacggaaaaggtgcgggcaggtgcgttgaccttccggttgaataggggtactgaactctcgaaaaatggggtcttgtgcatgcggatgggaaggctgtgcaggcgctttatcgatcgctgcgcggccttccctcttggacacgcgttccgtacaagcggaaagaggcctgacttcggctgagttttcctctccttgtgtgttaagtcctggcttccgatgacctttaactggcctgaccccagctccttccaatatcttttgtctgttagtcagggactatgcggcgcaaacatctccttcgccaaaagcaggcgccgccaccgggcgcatcgtggcggtcattggcgcagtggtggacgtccagtttgatgagggactaccaccaattctaaatgccctggaagtgcaaggcagggagaccagactggttttggaggtggcccagcatttgggtaagtagagtttgttaggaatagtaaagaccttgtgtagcccaaatatccccaaaaccaagctgtctgccttctatgatgattttatcaaaatgactttcgttcttctgagtttgctgaagccacatttaggtactgagaaggagtcttggtcgatttaggtcttgataccaatttatccttatgtataaccctgcgatgcctgtatctaacaggtgagagcacagtaaggactattgctatggatggtacagaaggcttggttagaggccagaaagtactggattctggtgcaccaatcaaaattcctgttggtcctgagactttgggcagaatcatgaatgtcattggagaacctattgatgaaagaggtcccatcaaaaccaaacagtaagttgctcttattgcatctatgcacaaaggaacttctgttatttgcagttttacacattaaggtgacatgttctcctaaagcagaatttttcttctgatacgttcgattattaaaatcacacagtgcagtttcacctgaagaaattaggatgcagaatttctgattgacaaaagcctactacttgaggtttttttttttgagagggagtttcgctctcgactcactgcaacctccacctcctgggttcaagtgattctcctgtctcagcctcctgagtagctgggattacaggtgcatgccatcatgccc

SEQ ID NO: 1399 - DNA, 1202 bp, Homo sapiens; identical to SEQ ID NO: 1398

SEQ ID NO: 1400 - DNA, 1191 bp, Homo sapiens
aataaataaccaaagcagaaatgtgaataacttgatagcaagacaacctattaattcattgggcaactatgtatttcgatttttggttgcttttcctttaagacagtaaaattggtagattattcacttgtactatatactaatatttttaaaaattctttcagaaatgccagatctggagtaaggaatattgtcatcacctggattttgagaaagaaaaataacttctctgcaagatttcataattgagagaattcctgagttgatagctctaaaggcagatatgctgtatttgcctactttaacccatttttcaacctgtttgttttttaaaaggcttcactaagggttgatatgtaccattgtatggggcaattttaagtcagctaaggcaataaccttatgcatgaacatttcccagactttcatgaagctgttgaggtcctaggcaattaatgcagcagttgcgataaataaaaacatctcacctaagtctccttttcttcataacatagatactgacatgataggaagctctcagcttagggaaagagaataaattttagattatagaacatggattcaaaagtgactggaacaaattggctgacaccttactggtaacctgctattcttctggtgttatccttcaggattgttccactaaaatttatttttcaaaaaatttacttcacattattctatgtaagtgatgacttgtcagtgttccaggtgtatcttagctaaaactagagaatgccctaacttagatggtttttgaagcctatacaattggtattgtttgacccttaagcttttacatctcttagcatggaggacgaagaaagctgtacattgttgcttgagagtctgtacatttagtccagatttgtatttgcactgtcagtatggcaaatgagtgaaaaatgtttaatacactattggattttttatttcctttttttgattcagcttatacccgggctgaaaacctcaatttatgttcatgacagtggggatttttttaaatgtctacattctttctaataaactgttggaagacttcttggctgtccttttaagtgtctggcttactgtaatttttatgtatttaccatttactggaatggagtttatttgaggaagaatttgggattattcctctgtttgaaaaaagaggcttgctgtaat

SEQ ID NO: 1401 - DNA, 1196 bp, Homo sapiens
gttttgattacccaaaaactccattgccatatatctcctgggagacctaactaccccctagttgagaaccactgctctaaacctaaacaactactctttctactgtgagggcaagcagtttaaagctgtacaataagttacctgaatgggtttacagagagttgtgaaactatatgatttatttttcaaagactgctaatctactcacatggatctgtattttctaccctgtagatcgaagatttatcccagcaagcacaactagcagctgctgagaaattcaaagttcaaggtgaagctgtctcaaacattcaagaaaacacacagactccaactgtacaagaggagagtgaagaggaagaggtatactaggaaatctttcataatttaactctcgccgtatagcattgtgttcgtgttggtgagctatattaaaaactagattcaggagactccaaagaactgctgaaattgttcttgcctttaatttactgctttttccctctcatctctcaggtcgatgaaacaggtgtagaagttaaggacattgaattggtcatgtcacaagcaaatgtgtcgagagcaaaggcagtccgagccctgaagaacaacagtaatgatattgtaaatgcgattatggtaagtgttcaagcctttgttccttgactccctctgccctgaccaattatgagtgactttattttgtcttgctaaatatcagccaattaaggaacctcattccagagcctcttctgagttgccgtataggttttagtggcctaaattctcctgatttgcctgtaagagttttagtgacctgaattctcctgatttgcctataagaaccgctaattatcttttctctgttacaggaattaacaatgtaaccatatggaagcaactttttttggtgtctcaaaggagtaactgcagcttggtttgaaatttgtactgtttctatcataaataaagttatggcttcttgttggatgaattcagtcggtgactggtctcttccccgccacccccccacaccaaaaaaaaaaaaaacttaaaaaggttctagtaatttattaattactcctaaggcctccctcatttgataaggtttagtgccacagatttcccacttagaatctcagactttatacctcttttaagaagttactggccaggcgtggtggctcacgcctgta

SEQ ID NO: 1402 - DNA, 1442 bp, Homo sapiens
agtggataaagtagtgaatgctgggtagttcacttcccattggttaagctaacagcccacttttatgtttccagagaaattggatggccacagctagcatggcattctagctccttcttgaaagttgattcaatcatggcatttctgtcactggctggctctccaaagtaagaactgttgttaagtgcaggaatgcttttagactataggctgcaacttccagagagaaatccacaaatctgagcctccttcactccagcttttatttcagtgactttagaataattattgatttaactgttttgggaggaaaatagatttttattgttttgttttttaaatgaatgtcttttaaaaaacataacaaactcatgttccagaaccagcaagtgctccagagtgacacaccccctaggcccctacatatttattaatatggattatccattaaagccccaggagctgttgttttaagctttgatttagttctcatacatatgatagaaagtcctatttgcctttaggaacatgcctgtaggctcttctgcaggtgagatgtactgggctttttattatattcaactttcaattccatcttaaaaaacatttgtattcttctcttcccattcttccttaccctgcctttgccctttcaggaagggtcagttcccttacctgtgaactatgtatgttcagagtagcattattcctgctagctaggagaagtcatcttgtttaggggatttggatgctttttatacgttctccattttcctgtcattgggtcatgttatctttgagttgctatgaaatcaggaaactgtctccttttcctttcccttcctttgtctacatgctctgtccattcctttcagccttttctcaccacccatactcccccaaatctgggtaatttttaagccttgaaactatgtagtttcttgatacacaatttgtagttatgcagcagccacaatttgcattgccaggaaataggctccaggttatcttcatgcctctgggtgctcattcagctgtcaagtttccatgaacttacacttatttatgattgcgtttctgacctgagatgtatgctgcctgttattgcagtagcattagtttcagattcttttgccattgcaaagtaccccttataaaccagcaatgtcatctgtgaggaagcaaattctcaagtgtctgtcatttacttggttctttttctttgtggtcttcacccttataccctggaaaagtctgtaattaccttagccaggaagatagatggtcatggcaagcgcacagcaccagacttactggctcaccaagatgatggaaaaaggcagatgattttttaaaaagccgtaatgactcctttagaccagccatttagcgtggtaattttgaaaggcctagctccattgcagacttccaaagggtcagct

SEQ ID NO: 1403 - DNA, 1170 bp, Homo sapiens
ttataaaatgtcttctgcccttttcggttcaagtgtcacagcattttctgtgttgttattgcatgattttaacaagccttgttttttattcaaaatgggttgtgttcattgtaaaacggagtaagtaaggccgggcacagtggctcacacctgtaatcccagcactttgggagcccaaggcgggtgaatcacttgaggtcaggagttcgagaccagcctggccaacatggtgaaaccccgtttctactaaaaacacaaaaattagccaggcatggtgtcacacgcctgtagtcccagctatttgggaggctgaggcaggagaatcgcttgaacctgggaagcggaggttgcagtgagccgagattgtgccactgcactccagcctggcgacagagcaagacatcatctcaaaaagcaaaacaaaacaatgaaataagtaaacagtatagaaaaacacaaaggagaaagcccaaatcatcccagattccaccacctgtagataaccactgttaccatttgggggaaccacctcccaaatgtttccctatgatttactttcacataaatggagtcgtgctgcacatactgttctgtttcctgcttttgtcacttgacagtatgtaacgagtacataagcagcatttttaatggctaaaatatatttcatttgataaatttcacgtaatttactcaaccgtttctctactgttggatgtttaggttgtttccagttttttgatataatcacaacccatgtttgttgagcatggactgtgtgctcagcactgtcatggacatttcccttgcagtaatttgtttacccctaaaaacatcctggtgggaaaagtggttttattatccccattttacagatgaaaaaactgaggcccaaagttagagcaggatttaaacccatgaagtttgacccagagcctgttttgtaatcatgcctctgctatttgtcacatcatcatgcctgcccatattctggatggtttccttaggatagaatcccggaagtgaaaatgggtcagtgcagccatagtgtacacctaggagggagtggctggggtcaggagagggcgttggctgagagggttaaggaatggaggggccaaggtaatgggaggatcatccacatggaagttgaagtcaccaagaactgaacca

SEQ ID NO: 1404 - DNA, 1099 bp, Homo sapiens
ccatgcttaactttctttagccttctttacatacttagtacttacaaccaagtaggtaaaaagagctggagaaaataagttcactgaactttctaatgaccaaagagtttaacctaatatcagtaccaagtctgagggctgggaatgtgggattttgtaagaaacggtatggtcttagaaaaggaaccactagatttggtttcagaagttccagtctcaccactaactagctttgtgatgttcaacaagttacttaaactcagaagtagacctcacttcctagtctgtaaaatggggttaatcacacataagatgggaattttatctgctttctgccttagctgtcacaagcagtataaaaatgagaatgtagtttaaaaactttaaagtgctctgaaatgtaatatttatcaataataggtaacacttaatggtacttaatatgtaccaggcattgctataaatgctttacatgtcttatatttgtttaacctttccagcaacattaatgagggaaaaaaatacccaacgttagatcatatttccagtaacagagccactattttaacccaggcagtctggctccacgactatgctcttgtctactgtgcttatactgcctctcacatgagtcagaaacttgaaccctgggtttaggggttgggagaatctatataagagataaaagacagccgggcgcagtggctaacgcttgtaatcccagcactttgggagcccggggcaggcggatcacctgaggtcaggagttcaagactgcctggccaacgtggtgaaaccccatctctactaaaaatacaaaaaaaaattagccaggcgtggtggcacatgcttgtaatcccagctactcgggaggctgaagcaggagaatcgcttcccaggaggcagaggttgcagtgagccgagatcatgccattgcactccagcctgggtggcgagtgaaactctgtctcaaaaaaaaaaaaaaagagagataaaagacattcataagggtctgtaagtttcttccctggtcattttcataggactgttgtctacagtggatagagcctttcttcaaggatgatgggacctagtagtc

SEQ ID NO: 1405 - DNA, 1190 bp, Homo sapiens
actatcaaactgagttttccatagttagtgcccctttagttcactatactcttcttgcaactcctggaagggtggccataagcagcacctctgctggcttagacatgtgttatgtggaagacccattgtgggttttatccatgtcattggctcctgccttttagcaatagcaacttctaggagtccttttattttaagaactttcagaaggaactggtacccctctgttccccattattgcttgcatgtgtgggattaccctcagagggtggggaagagaccacagccaatctcagcatcatgtatatggtttcccatccacctctggtctgatgtattaaattagttgccagtgcactgtcttccagatttgcctctgtgttctttgttactgtactggatcttgttctgtctgctcccatcaactcttagttggccagccaactaacaataagtcagtgtccatcctccctttaattcttacccattctttgttattgagagaatagaaatgaattatctcctagcccttctgctaaagtggtgggtgggaggtgctctgaccactatggtctctgcagggggaaccgtgaaggactgagccgcacctcaagcagccgccagagcagcacagacagcgaactcaaatccctggagccacgcccttggagcagcacagactctgatggctctgtccggagcatgcgaccccctgtcaccaaagctagcagcttcagtggaatctctatccttacccgaggtgacagcatcggcagcagtaaaggcggcagtgcgggaaggatctccaggccaggtattacagcttcttttcttccatgtcatacccatcccttcttgcttgtctcctgtgaaacatcactgatatttacttttttttttgagacagagtctcctctgttgcccaggctggaatgcagtggtgtgatctcagctcactgcaacctctgtctcccgggttcaagtgattctcctgcctcagccgcttgaatagctgggattacaggcatgcgccaccacacctgactaatttttgtatttttagtagaggtgaggtctcaccatgttggtcaggctggtctcaaactcctgacctgaggtgatctgcctgcctcagcctcctaaagtgctgggattacaggcgtgagtcaccacgcccagcccatatttac

SEQ ID NO: 1406 - DNA, 1165 bp, Homo sapiens
ctttgagagtccaaggtgggtggatcacctgaggtcaggagttcaagaccagcctgaccaatgtggagaaacctcatctctactaaaaataaaaaattagcccggtgtgttggtgcatgcctgcaatcccacctacttgggaggctgaggcaggagaatcgcttgaacccgggaggcggaggttatagtgagccgagaccgcaccattgcactccagcctgggcaacaagagcgaaactccgtctcaaaattaaacaacaacaacaaaaaaggacaatctatgatatgttgtaaaatcattcggacttttggattactgttattttgtttcagcagcagtgggacagagagaagctatgccatatccttcccttagactatgctcaaagatattatgttatactggcttttctgatgatatttactttttgtttttatagttgttgcattgatgttactcatttaggaaaggtgaaagagaaatccctatgagaagcacaatgttaaatcaagattcattttagttataaatatgacctggatatttggagatatcttgaaattctctgttttgggggtttgggttgtgggggattggcttgttttgtttgggagtatttcttctcattgcctgtcttcttatcttactacagactataggcttggaagaagaatgacaaaacctaagcacaaggcagttatcttgaatgatatttcttaccttttctgttttgcaggacatcagaactgatgtttcttttttgttttcgttctatttttttctgcatcctgtctttcatgaaaatatttttctctcccttgatatcactgcttttttctttttgatatatgaatacacagctactcctgtgttctttacttctttaaacagttaacccttttatgttactgtaggcagaaaaagggtagctgttaatcatttaggcactgaagagggtaaaactttgtttgcctgccctagtttgttgggtgtctctgagtttgtgtgtgtatcttaaaaaaaaaaaaaaaaaaaaaaaaaaaaaagtaatggtatatatttggttcccattcttggagtaatgatgaaatatttttatattttgaaccagaacaaattttggtcttctgttgctgcttctaatcagttctactggcccagaaa

SEQ ID NO: 1407 - DNA, 1194 bp, Homo sapiens
gcattaaagtcgagagaccagcatcaatcacaggatcactgagataaatgaaaaaatatataaaggacttagaataatatccttttcctccagagcagttttctaacattttgaaccagtgaaaccctcatttcaacaaaatcttatttagctctcattacataaaacagattttaaaaaactgttctggctgaagtcaggatgggaattctcgagtcctacctgcttgggctcaccccaagcgtggtctatgtactctaagggtagcttgaaaattggtgctataaacatcccccctctgtggcccacaaattgtgcttccatttcttgtcttctctctcagagaattccttcaggtcctcatccagttaagcaactggacctgacaaagagtaaaacctctctaccactttgtaggtgcagacaaccatgcgtgaaaacctggccacagttgaggggaactttgccagcattgatgaacggatgaagaagctgggaaagtgagcacatttgggagctggagaacaggggttatccctacccctgtgaactctgttaacagcttacatagggtttcccctttactataactctagcatccccatcccatttgacactgggggcaagggttcttcttgcatgtggggtttatacccctcccctgatgaatacagagtggtagctaggggttggttatcatcagaaggtggtctcccctcaggcctgggggataaggacgtgggcccagccacatgccaactcatgtccaatactgctttgcctggtgtggggaaggattgggtcttgtcccccaacacagcttctgtggctgactgtaatactgtacaactgtttctgaccattaaatgctgttgtactctgtgtggcctctgctgtgtttcctggggaggaagcagcactaggatatagatattcattcgtcataacaggcaatctaagccactctatactacaagagatggatttaaattgtaacctgttcttaccaaagaactaaataaaaaatgagtacagagccagagccagagtttcaaaatattctcatctgttaaattaagagtgtctcccatagaaaagcagtggaggccccacagggcaagtacaaaacagaattaaaactcccaagggtcttgtctttacaaaagaaaaggcaggaggcagcccctggacagc

SEQ ID NO: 1408 - DNA, 1151 bp, Homo sapiens
cgagaggtaggtgagcccggcgccccccacacccaccgcgcgccccccgggccccgctcgcacccctcacgcgccccccgctcccccggcgccccctcctccacctcccctccccgcgcgcggctccgggctccccgctccgtgcccggccgatcatctttctagcaccctccagccttggcctccattcgggggttctgagggctgcgatcgggccgacatgcacccccacccggcggtggggatccgggggctttggctactgagggatgtggggagttggttccgggtcgggtcttggaggaggccgtggggggagggcgggagctgcttcagtggatgcccccagggacccttgcccatccgggctgtgcctccctctggcctctgtctggagggagagactggttccttgtccggcctgggttgccacagaggaatcacagacccaccctaaactggggccccgcctcccttttctgtgccagcaggacttggacctaggacacctaggtcctgggtcccccgtgatggggagagaagtgttgcatcgcggatagactgtatgggctgagactctagggttccattttcacttatgaatctcgaggtgcatctggccttgggggacgatgatggaggcatgaagggacagctgctccttcttggatcagtcaataaatggaggtcacactaatggcccttctttctgtttgagctgcatttggaagtgttgtggagacagccccgtagcccaatgcgaccagactcagggaaaacatcaggcccctccagctgagcccttgtgtgagccccgcccctccctaaatgccagacttgggagctgacagacagcactgcctgtgctgggtttaaaaggtgacaatgagaactttgttattgcaggggctgctgccactttgttcacatccttaacagacttcagcagaagggactgagttagctctcaaggaaggctccctggcaataggggctgaattatttggcaatgtggagcaggcgaggagttggggagcataggaaatattccggtccatgtgatctgagggaggtggcaagaagacctccacctgtgtgggcgttttctttcctgacttctcttatgtgtgccctaggctttcttgggggcc

SEQ ID NO: 1409 - DNA, 1179 bp, Homo sapiens
aaatgacagcagaatagtgaaatactgaatgttgtatatgtttaggctcttagaaaagtgtgtccagtaagttgtgggagaataaaattttaggttacaatttgaataagtttaaatgctacattttatgatatggaaactaaattttatttgggaaattaaaagcataacttgttatttcagaaacaccatcatttttgcggccactgttggaccgaactgtaaccaagggagaaacagccgtcctacagtgcattgctggaggaagccctccccctaaactgaactggaccaaagatgatagcccattggtggtaaccgagaggcacttttttgcagcaggcaatcagcttctgattattgtggactcagatgtcagtgatgctgggaaatacacatgtgagatgtctaacacccttggcactgagagaggaaacgtgcgcctcagtgtgatccccactccaacctgcgactcccctcagatgacagccccatcgttagacgatgacggatgggccactgtgggtgtcgtgatcatagccgtggtttgctgtgtggtgggcacgtcactcgtgtgggtggtcatcatataccacacaaggcggaggaatgaagattgcagcattaccaacacaggtgtgtaaacagaagcttggcacaggtcaccggagtcatgtgtatttgtggttctgcaaatacttctagaacgtgtgtcttgcagtctgagttcatctcagaagggtgactcatttgtttcaagctgcagaaatatgattcgctaaaaaactccagccccaaataaagctgatgtttaaagattaatactttttgttaaaatgacatcagggtatcctgtggctgtgagataaaatccaagtcactgactaaaatatttctaactccttcataagatagtgatggagaaccaggaacagccctttaatgataaggtttactctctgcagtagttgtatgtcttgttgtctgtgcgtatgtgcatgtacttaggttggattttattagtggaagaggagctgtgacttgattagtatgtgcaaagtcagatattgattagtaatattaagaagggaatatggcaataatcaagcataattcgaaagcttagatactgtcccatgaaaattcttaggccttcagccttttaaaaaatctgtttaa

SEQ ID NO: 1410 - DNA, 1189 bp, Homo sapiens
ttccaaagcactgggattacaggtgtgagccatctccagtaattctacttttgtcctggacccctctccttacctttgtgtgtgtgtgtttttgttttgtcgtgatctctgctcactgcaagctccgccttccagattcacaccattctcctgcctcagcctcccgagtagctgggactacacgcgcccgccaccacacccggctaattttttttgtatttttagtagagacagggtttcactgtgttagccaggatggtctcgatctcctgacctcgtgatccgcccgcctcggcctcccaaagtgctgggattacaggcatgagccactgcgcctggccagctttgttcttttcttatacattaacccataaattctccattgatgcctcaacaagtcttatattttatccatttaatttaatttaattttttttttgagacaggatctcactctgttgcccaggatggcatgcagtggcatgatcacagctcactgcagcctcaacctctcctgggggctcaggtgatcctcccacctcagcctcccaagtagctgggactacagatgtataacaccacatttagctaattttgggttttttttttggtagggactgggtttcgccatgttgcccaggctggtcttgaactcctgggctcaagcaatctgcccaccttggcttcccaaagtgccaggattacagatgtgagccattgtgcccaaccttatttttttatattccatgataaacttaagaatgtataattatggccaggcacagtggcccacgcctgtaatcccaacactttgggaggtcgaggcgggcagttcacctcaggtcagaagttcgagaccagcctggccaacatgatgaaaccccatctctactaaaaatacaaaaattagctggtgtggtggtggacacctgtaatcccagctactcaggagtctgaggcaggagaatcacttggacctgggaggcagaggttgcagtgaggcgagattgtgccattgcactccagcctggatgatagagtgagactccatctaaaaaaaaaaaaaaaaaaagaatgtataattactctattggtcagtttcctccaatatatagggattgataagactgtcaagtatattttttgtaacaatttgtagattcttatgctgttgctcctatgctattac

SEQ ID NO: 1411 - DNA, 1177 bp, Homo sapiens
gtgcgagtctcgcttgggccggcaggggaggggctgagcaacggccaccgcagcagcctgagcccttgcagcctgattatcacatgacccggcggcagtagccgtggcagcagccgcggcggctccgcgagctcgccgggtgggctcagttcagcgcacgccggagccgagcgcagggggcggggaagggacctgctgcagctgcagccgcctgggcgctcctggagcgcgcggtgactcccccggtcggcccgctccatgcagctccgttgcggaagtgtagcggggggaggcggcggccaccgcggcactaagcacgagaggccggggctcggccccctgcagcactaggctctgggagccgcgcgcggcgcgtcccagtggcccgactcgccgtgcgcccggcgcccaccgcagcctgcatgccccgcgctgcgccttgcccggcccccgccgcctcctgctcgcaccgctgcagccgggcgccggagtaatatgctcactcgagtgaaatctgccgtggccaatttcatgggcggcatcatggctggcagctcaggctccgagcacggcggcggcagctgcggaggctcggacctgcccctgcgtttcccctacgggcggccagagttcctggggctgtctcaggacgaggtggagtgcagcgccgaccacatcgcccgccccatcctcatcctcaaggagactcggcggctgccctgggccactggctacgcagagtgagtgcagcgacaccggcggcgcccctgctctcctcgcggcccttccccgcacggttccagccctcttctctccctgcttctcggcctcagggctctcactagctgccggcgtccaggcctcggcggggagctctttacttacactggccatttccctcttctccccactccctcttcccccagcccaaggacgcggcgtctccagccccggtatgggtggtggaggggtgggtggcagcgctggagcgtgggaaagctaaggtgagacaggtctgtgaatccggggtctctgtcacttggggaaaaaaaacgggcagaaaagctctgaagtttgaaacacataaggaaaatctgctatctgtacccccaccctcccaaaatatagttgacgcccccgcgtgatgaagagtttatgggggtggaggcttggagga

SEQ ID NO: 1412 - DNA, 1223 bp, Homo sapiens
tggcatcctgtgactctatgaatttagaaatctgtcatgcaagaggagttcaggtgtaaattttgttactataaatcacttgctcatctaacaggaattgtttacatgtagctgatggtctaatttttaaatgttcagagtcctaaaattatgaacagattatatgtcaaaaattaatttgtaatatacaaggtatattatggttgaactagtttttgtggtcttaggctggaaattaaacacctagtatatagaagcaataatatttcaagtatacatattcatttatagcattatttctatgggaaaatgcacccagaattctaactaggatcttcaagaacaactctccccaggtcagtgcatggagcagaaagagaagggaaagggatagaatgtcttcatgactttaatcctagtatttgaaaaaaaaaaatcaaaccttgcacctacaaatttctgtcttgatccagaaagtcattagcataaaaaagataatagtggccttctcacctaacgccaccaacatggtgttcaggcgcttcgtggaggttggccgggtggcctatgtctcctttggacctcatgccggaaaattggtcgcgattgtagatgttattgatcagaacagggctttggtcgatggaccttgcactcaagtgaggagacaggccatgcctttcaagtgcatgcagctcactgatttcatcctcaagtttccgcacagtgcccgccaaaagtatgtccaacaagcctggcagaaggcagacatcaatacaaaatgggcagccacacgatgggccaagaagattgaagccagagaaaggaaagccaagatgacagattttgatcgttttaaagttatgaaggcaaagaaaacgaggaacagaataatcaagaatgaagttaagaagcttcaaaaggcagctctcctgaaagcttctcccaaaaaagcacctggtactaagggtactgctgctgctgctgctgctgctgctgctgctaaagttccagcaaaaaagatgacggccgcgagtaaaaaggcttcagcccagaaggttcctgcccagaaagccacaggccagaaagcagcacctgctccaaaagctcagaagggtcaaaaagctccagcccagaaagcacctgctccaaaggcatctggcaagaaagcataagtggcaatcataaaaagtaataaaggttctttttgacctgttggcaaa

SEQ ID NO: 1413 - DNA, 1238 bp, Homo sapiens
gtaatatctttcaaaacattttctttcccaacattaaaacccttttgatgtatagagaaatgtcgtttaaaaatccattagcaaaatcccttatgatgataacaggatacatttttttttccttgctcttttattgtaccttgttaagctggtctcacatgaactttcttagaatcaggcagttcctggttcctatgggacttcctgttttctcaaataaaaatagaaaagcatctcagaaaggaaacctggtcagtgtgaactactttgtaagatcagttagtcttagttagtcttagttgtggcctggattatatagatatatagtctatataaaatataaaagtttacaggtatctgaaagctttgaatattttcgtatgtaatatcaaaataaacaaaatgataaggagaagactctgaataaaaaccctgagaggtgctacatattcagccgtaaacatttttgtatcttaatttagaggtgaatgaaggaggggcataggggttggatggaaagtggtaaatcctttccttattatgtaatattttattgtaaatttggaattgcttaatactgagacttaattcttagttactttgatctgtatttttttttcttgccactttttcagatgttggcaaggattaggaaggtggatttttaaaaaatcattagaagtcagaattctaaatgaattattcagttttaaagcatcttgtagatttctttcagtagttaactgcttcttagtctatattatgaagagaaatcaaattaaggtagaaacaaatgatatagtcattagcagtaataataatggatagtgtgtattgagtacatattaagtgcttgacactgtgtcaaacattttatcttgtttatctcatttaatcctgacaacaactgtataaggtaggtatcattgttatccatactcctttaaagaagaaactacaatttagagtagctaattagatgttagttcaaagagacattactaataagtggtagaggtggagctgggacttgaactcagcttctgtgataccagagcacctgatctcaatgattgtgaggaaaaccactaattcaaagtgagaatgataagtataagtctgaaaaattacttccctaacctttattatcaccagtttgtttacatttggttcacatatttatatccagttttagcaaagtacatgctggcatttcagagagtttgtttgggggattt

SEQ ID NO: 1414 - DNA, 1100 bp, Homo sapiens
caagtagctcagaccacaggtgtgcaccaccatacctggcttatttaaaataaaatgaaatttttgtagagatggggtctcatgttgcctaggcttgcctcaaagttgtaggctcaagcagtcctcctgccttggcctcccaaaatgcagggattgcacgtgtgagctaccacatccattccagttttgtatcctgattgtaataatgattgcacaaatccatatgtgtgataacatttcatagcaaaaatgtgtatatatgtgtatatatatatataagtgagtaaatgaaaagagtggtagactcctgaaaaggtctctcatttagataaagtattgtaccaatgccagctgtgtgatgtactatggttatgtaacttgctctcattggtgagacctgggagaaggatacacagaatttctctgtattgtttttgccatttcttgtgagtctaaaattatttctaaataaaacattttttaaaaaaggttctctctggaagttatgttgaatcaacactgaagggacaaaggggaagcagggagaccaattaggaggctgctgtagtcatccaggtaagagatgatggtggctgggaccaaggtggaattggtgatggaattcctacctgtcccttccaggctgtgcaatgggacaactttaagagccagagtctccagctgtcactaccctgtcaccatccctactatcatctctggaccccatatttcacctgtgctcaccctgacaccacttctgcccttgtgtctcctcacagcaagtgtgggtgctacttcccctgagatgccatgagtttctttttccttattgccaggattgccctgagccatcacaggcccttgatttttactatctaagctgtatttcctctgcccatccattaggaagaagattgctgtctggtttgaactggaatttctcgctatgtcccactggaggtatgtcatagtctgctcttctcactcctctgtctcaggaaacatggtggaattttcttaagaggcttcgaattccttttcctccttataggggaagaatttgcctcagtcatattttctaatggcatctcctcatctgt

SEQ ID NO: 1415 - DNA, 1179 bp, Homo sapiens
agagaagagtttaacttccatctctcttcctcatcctccatcagaaggcagcagtccataaaccctattcttaagtgtggcaagtgcagatgcctttggtgatatctaattatccttgatctctaaatctttattgtctattgttaatattctttcccttcatatcattttgggaaagaacaatatctatagatttaagcccttctgtgtctatgttgttttacattcaacaaatagactttaaagagaaaatgtagtgtttcctaaaatctttctttgattacttgatatctgtggttttctttcctacctccccttcaaacagaagccttgaaatactaaaaacttaacctcaagaatttcattaggcaaagctcacaatattttttttggagatattctttaaaaaataatttatctttcttcaaaatcttcaaattgtaaaagtaggtgaggagtaggacataatttattctactgtgttggttaataaccttgaaagtttacttaaaaggcagtctctttcctgattatacaaaacatttaatgggaggaaaaaagcgctcttgaagtattgccatacacagacttttaaacttacaaaaaaaaaaaaaatactgcagcacgtttacactctgccataaagtactataatgaataattaaaacaactagaattgtcaaaataaataactatggattgcggtgtagtgctctaaatttttttaatgcttttttgcatgttgatttacatagcatagtaataagtcaaggatttcccagtcattaaagtgaattaacaagaaagtattttaatgggtagttttgtcttatttcagaatttgactagttatttaattctatacccttctcttgcatttactctaaaaaaaactgtgtttgtataaataatgtatttaaaaataaacaaatcagaactccatggtctgaaaaacagaatttagcaactaatttgtcacgtatatgtgaagctttccctagtacctcacttccaagcattgaagaaatgaacatttcacgcagaacatgtatctttactgttcaataattcaaaagcgctaacaacaatatgcatttaagggtctttatatttcattcgaaatacaagctcttaaaacaacaacatcagtatttctgtgtctatatccaaatatattaa

SEQ ID NO: 1416 - DNA, 1216 bp, Homo sapiens
gtcaaaaatataatattccacctgaccacaaatataaatctgtctcactcctggttttcagtaagtttatttataacttagattttcaggacctctgtatttttcatttaaaaattgttttgggaataaatgctaagtgtgtgtgtgtgtgtgtgtgtgtgtgtgtgtgtttattatttgtgactatttcttattacatatagggatttgggaatgggtttggtcatattgctgtggtacgtatttaggccttgcctagtactttagggcatgtgtatagtattgatctgcagtgagtacagagtcatgctgcgctaagttattgattgatcatatttttaaaagtcaattgtagatcatctaagataaaatgtatatttgtggcaattgaactaattatgaggggaaaaattcccttttgatttgtatagagtctgcctttgctcagatggaatgggcagatgcctgagtgataaaatttctggaatttcttcctcaaacctttcctttcacaatcatgttttgaggttaaatttgaaatgctttagttaagaaagcgcatgttaagcttatacaaatgtaaacatcattagtttttaaaaggggctctgagaggcactaactcaaaggcagttagtagacattaggaaaaaacaaacaaacaaacccaaacatttcaatggtgtactaagttttaaaactcctgtggaagttctcagatgattttatatcaatgtacattgtgaaactctgaggagggggtatactgctttagtagtcaagtgtttttattgcaagccacaaacaccaattggaattcagtttaaaagagagaatttattataagaattcagagataccttgtggaatgtggcagtgggaatggagctggctcacaggaatggatgggctagaaaaccatcaggatcctgtccacgtccttattggggcttctgccagtgtttctgctcaatttcttccctttctccattgtctgccttctatggactctccttggaagtcccccgcttttagtaacagcataggaagctttaaaagtcattggttagtccttcacaagctgattcagtattggatagtcagacaacagttatagacatcagatagccagtgtagatcatatagatgacttatgtatgtcatcagcttgaatatttgaagttgataagtagtttttaccaatttcagtatattt

SEQ ID NO: 1417 - DNA, 1175 bp, Homo sapiens
cctgtacttgtaccaggtatgaaagaaacataaatctcttttgggacttattgtagcctttttgttaggacttagataagcttaaataattgtttccttttaaaggaatatatgtgacaacttaatatgcacatagagctaactttttaatctaacaatcttgaatacctgaagttagaaatttgtaagtaaaaggttaaaagtctcaccctaaaatatttggctgtaatatttattgtagatggtgaaaatttctacttatagaaataatataatgaagtgggaacattagcagtactataggggttgatttttaatttttctttcttaaaagtctgcacagcaatgattggattttttgttggctttttaggaatcattttctcactgaatgataaatcaagctcatcgaatttgaagatcgatgctttgtcatgtctatacgtaatcctctgtaaccattctcctcaagtcttccatcctcacgttcaggctttggttcctccagtggtggcttgtgttggagacccattttacaaaattacatctgaagcacttcttgttactcaacagcttgtcaaagtaattcgtcctttagatcagccttcctcgtttgatgcaactccttatatcaaagatctatttacctgtaccattaagagattaaaagcagctgacattgatcaggaagtcaaggaaagggctatttcctgtatgggacaaattatttgcaaccttggagacaatttgggttctgacttgcctaatacacttcagattttcttggagagactaaagaatgaaattaccaggttaactacagtaaaggcattgacactgattgctgggtcacctttgaagatagatttgaggcctgttctgggagaaggggttcctatccttgcttcatttcttagaaaaaaccagagagctttgaaactgggtactctttctgcccttgatattctaataaaaaactatagtgacagcttgacagctgccatgattgatgcagttctagatgagctcccacctcttatcagcgaaagtgatatgcatgtttcacaaatggccatcagttttcttaccactttggcaaaagtatatccctcctccctttcaaagataagtggatccattctcaatgaacttattggacttgtgagatcaccctt

SEQ ID NO: 1418 - DNA, 1229 bp, Homo sapiens
ccccgaagactcgctccccgccccgagccccctcgcttgtcgcctgggttccctccgtggtatgggtggaagttagaacggaaaccagaaagttgtcctttgcgaagacctagcttctcccagccccgagctagggcgaggagccttcgggggaaaccactcccaggcgccccgcgggcttgagcctgacagcgaaaaagtttgcctgaaacggggcttgcttgctccatttgttgcgggaagtggcaggaggaaggcagcggagagagccccacttagtctggcagcagccaccgtgtagagaaaaactgttaaaggggcctttcccttcgtcagcaagaggaaatctctttctcttagagggagagaaaatccaggaagtttgtcctcttctctttttcgccatctcgaggtgtctaatcctaaaactatcagcgccatgaattttatttaaaactacgcccagtgaaccgggctctccggatttttcttctgaaaaacactgatgtcttttggagaaaagatcatttttgcaagttaaagcagatggtttccttccccttcgctttcccccctctcccactctctttaatagtttagaaaaacattttggccctgtaacttctgattggtatgaatagaagcagttctgtgttgcagtaaggggaaatcacatttttacggggtagaaagttgacactaaatgaagattgtgattttagtattttaaaattaattccgtctaattggattttggttttgcaggcagcatctcatatatgtcgagtacttaacaatttaaagctctgacttgtaaatttatttttcagctctcttttttcgtaattagaatactgtttggacttgctcaacaagaccttatcttaacaaaaagtaacttatagaaaagggagacattcatttaacttcaagcccatattattcttaaaagctgactcttgaaatagtatttattgagtcatagtggagtcatgggactttttaagggccggaagggactatttagatcatccagtcccaccctgtcattttatggaggaggaaactgaggcctagataagataaccagttagtgggtccactgacctttaggacagtagtctatccgtaagagacaacatggagaaagaaatacaacgtttttatagtgaattatcatcttacaaagaatattcttcccatatcgcacttttaaaaagtgggtacct

SEQ ID NO: 1419 - DNA, 1138 bp, Homo sapiens
gttccatagggtacagggatgggaaggaatgggagcgatggctaatggatatggagtttctttttggggtgatgaaaatgttttaaaattgattatggtggtggttataacactgtgaaatactaaaaaccactgaattatatattttgaatgactgaattctatggtatgttatacaagatgaacaaaaatgtgtactcgtatagttaagaaatatttttagtttttaaaattatttatttttagagacaggatctcactgtgttgcccaggctggagtgcagtagtgtgattataggttactgtagcctcaaactcctgggctcaagcaatcctcgtgcctcaaccttctaagcagctgggattacaggcatgagccactgtgcccagctgttgttttagataaaagcagattaagacctttttacagaagaataacagtaataatattgatctctttttactttgtatcctcaccccttaaacactttttaggtttgcccttgttggtgttggatctgaagcatcttcaaaaaagttaatggatctgttacctaaaagagaacttcatggtcagaatcctgttgtaactccatgcaataaacagttcctgagtcaatttgaaatgcagtccaggaaaagtaagcagtcctcagaggcttttattaaaatatgtacattttaaccagtgcatttgttaggtgttatactagagaagtcatcttaatactagctcactaggaactccatttcacaaagtccatgctttgaattagatttaatcactggttatgactgtgggcctgtgtacgagaaacctactcctgttccatttttctccagatgtaacagacccaatactatacaacaatgtgcaagttctatagccctgccattcttgtcctattatttccatcttagatacagaaagaaactacattctaattcttagattaaaggagagctatgtggatgtgtattatggtgggggagagatcactgataaccagaaaatgttcattgatttttctgcttggcaacaagacctttcaccacttggtaaactgaatatagaaaagatttgtcattatacatttaagtacattatctttaaagagatgagatggatgattatgta

SEQ ID NO: 1420 - DNA, 1232 bp, Homo sapiens
tgtgtttgcctctaaaagcagtgtttctcaagctttagatccttgaacaagcattaagtacaaatttactagtacccttatcccatctttccaaaagattgttctatgcccccttattgtatggtcatcaaagaataaaagatgagaatagaaggtgcttcttgttggtgggggtgtctgcagagtcccaaggcagaacagtcctgatgtggtgcagggcatcacacagaggagggggctgagtggctagctcaggtctgtcttcctcctcacctaaagccagcagtcccatcctatataacccattagtccatgacataacttggtcacctcttaaaagcccaacttccaatactgccacattggggattcagtttcaatgtgagtgttataggggacacacatgcaaaccattgcagagttataacagttttaatacaggattctagttgtgtttgtatttagtataatactttggataaaatcatgctcttcatttttcactattgacttttttcttactctcataggaaacgtgtccctgatcaccacccctgttaagcattcccacgtgctgtcgatctttggaccagtttctagcaaagttgtgtttgaaagatactctattaaagaagactgtggaatctgtttatcggtgcccattatatccttaagtttggatatttagctgaccttcgctttaacataggtctaatttatttgccgtgtcattttccatacaaatcagttgatttaaaaaagttcatttctcatactgtgcattaaaataaaaatttgaacaattacttggttcttatgtcttatatgtgtgtattctgtttgaactctacttaatggaaattaatgattattttcaatatggcattttccagcttaatgattggccatctacatttttgaaataattatcttgattaatataagtccaagtcaaatgtgataaacacgccatatattaatcttttggttttgttgctgggccataagaacactcaatcatggctgggtgcggtggctcatgcctgtaatcctaatattgggaggccaaggcaggtggatcacttgaggtcaggagttcaagaccagcctgggcaacatggtgaaaccccatctctactaaaaatacaaaaattagctgggcatagtggtgggcgcctataatcccagttgcttgggatttaatttacccatttaattttgtttagtgaaaa

SEQ ID NO: 1421 - DNA, 1216 bp, Homo sapiens
ggccattcagtattagtaaccttgccagactaaagaggttttcctgtttcatctggtgttagttgctaccgtcttcatctgggcatttaatatttgataattcagctaattcttttgtagactcactcttgtgcacataaatacaaattcagaaaatatgcagctaattaatatatattgctgtggtataaatgaccaatgtttaaaaatattgtatatatttagcagaataaagctttaggatattcattttgaagtggcattaactgtggatattaatcgtgggtaaggagtgaacagagactggaattgatgccttgaatcctcgtccagataatgaggaaagttattttaccataagtgaattgcctttcataacagtgtttggattataaaataaatcaaaccaaaattatctgatttcttcctttttcatttgctaaagccaagctagtggaactttggagaagaataatttataaaattcgtttactgtagaatacaattttgatatttttctgccagtatagcatctagtactttttctttttttttaagttggcttcagctgttctggaggctgtggaaaacaatactctaagcattgaaccagtgggattacaacctatccggtttgtgaaagcttctgcagttgaatgcggaggaccaaagtaggtttttacgtgcatgaactgtgaaagtgactgagtttttgaaatgttatgggttgcagttatttagtttttctggttttaaatgtagttatatttccctcagatttctcttaagcgtctgtgtagcctagcccaaagacaaattcctgagacagtgtggaatatagtatttcagatttagcattaaaggagagcccttttaattataggttggtgcaaaagtaatcgtgcttgttgccattgaaagtaatggcaacaagcacaattacttttgcaccaacccaatacagtaatatacatatatgatagagatccaggtaaactagagatagaaaccggagttgtttttgtttttgtttttaacctcatattgtgacctattagtggattgtgaaatcagtttagtgggtcataagtagaattttttttattacacgtatatgtgtagccatgtgtcctgggtttctgtataaaatacttctctctgagggtgaccatcaaaaatagtttgggaaggtactgagttagactaagtcttatcg

SEQ ID NO: 1422 - DNA, 1232 bp, Homo sapiens
aaaatgggagaggggagcagaaccaggaaatctcagtaaataagcgatcatattttcaaacactatgtgaaaataacagaagagagaactttatgacgttagagaagtttatctgaacaaagcagtattctaaaacttcaggaagattacattcctaagaggtcttctaggaatgtatttgggagtgtttataccaattttgagccccatcagtagtcctcatattcatctgacatttgataatttcagaattaaaatttttttccatctattgaggttgtgtttgagatatattgagatattcttcatagtcttttaaaaaagattttttgttttgtcttccatatttaatctacctgaaattgatttttgtacatggtgttagaagtacagtttcctttcccctgcacctaaattatcatattagcattgtgtaccaatttattctaacctccttaactattcagtagtgctagctctattgtaaatcaagtttctctttatatgcatggatttcttatgtctctgttaccttgatgtgtttgtctgtgcctataccaatatcatgttttcttaaatactaaagctttgtgttaaatcttcatgtctgtctgtcaacctttttcttcataagagtcttgacttggccttttgctctgtgacaaatttagaatattcatgagaatgctcccctccaacacaaaaagaagtattgagtttgtaagtggaattgcattgactttagttttctttgtggaagaatcgataagtttatgtattctttcatgttttctctcaaagttttatatttttttcataagggacttagaaatctttagtccaatttatgactacttttgttgcttttcttggttgtaaattaaaaaaaaatttttagttataggtgttattgaaatatagttgacttttaaaattgatttttgtatctcaatgttgctaaactttttaatttttataatttatctgtaggctttttggggggttcatataagtaaacacatcctttggaaatgacagttttgaaattgtcaccagttttgaagttgtcatcattaaataatatttgatacaggattttttttatagatatactttatcagggtaaagaaattgttcataatgctaccttatatatttttttcctctgtagcatctttttcttcttaaggttgtttactatgtgcgttttccccttatttggtcagacttac

SEQ ID NO: 1423 - DNA, 1217 bp, Homo sapiens
tgctatttcacaggaatgtttgccaaaaaaaatgaaattgtttatcaattacttgacttttttatctagacaacgccagaaaaatccagatttttggaatatggacaatgcaaaaaaattttagtctatatttatggcattgtctagtcttagcttaagaacacagcatttacttggcttcattatttactgttcactaacagataataaaattaatagcaatttgggggtggtgccatactctgaaacaattaataaaatattttctcttctttgcacattattgtgattttttaaaggcaaagagtgaatgattcctcaattcttagcgtcattgatgtaaagtcaatatttgataaaagaaccaagttatattgtgaatgaaatcagctggttaggtgcaatggatgtgtccactttaataaaagcaataattcaggttgaaaagaacttcattatcttttctcaagataaattttaatggaggcctggtctgagaatacaatgccataagttctgaatcttcaggttcgtgcaacaagtcatttcttaagtgaccttcagctgactacataaaatctgaattggtcttgattagaatctgtccagctgtcagtcttttggcctctgagatacagagggcatatacccatgatgctgtggggttatgtaagagacagtaaagaaataggggggaaaaaaacagaataaaatgtaattacacagagtttcgtttaaaacaaaaattgattgagttctgcttaaagtggcttgttgtttcctgtgccaggaactactgtgcaggcccagcaggaagtgtgctacagagcaggatcaccttacaccctcgttttatggttcatttcacttatttaatgcaatctgagaacctgcaaaaggaacatgttagaaggagggaataggctttttgtcttgttttgttgttgttgttgttttaaatttctttgaatcaaaacatttgtttttacaaggtgcttaaagtcccagagaaacaggacttctagagttgcacagtgaagacatttctctttgtcacacaatttaaagcaagacacaaagttgagttatgtctagagttgagttatgtctgtttcctttgctgtcctactcacataaatttaagcataaagaattacaaccatgcccatgaatggtctaaatcattttgaattccatgtaagttcctcctagggtct

SEQ ID NO: 1424 - DNA, 1136 bp, Homo sapiens
gggttcgttacacttgcaatgctttgttcattttcctgaatgtactttacaggttacttcaacatgaatgggaagaaagcaatgttcagattctgaaacttcaagccaagatgtttacatataatatcccaacatgcctggccacctggaaaatgtaatgcaacaatcatgtacatgtttttatagctattgcttttatttataaggtttgctccagacaggtaaatctgaaatgacatctatatatatatatatatatatatttttttttttttttttcctggacagattgctattcttaatttagatttgtttttagcatttactgaggtttaatgagagtgagtactcattgaatagcctctaaaagcaaaaagcgtagacttttaattttctttgaaggacaacatttaggtgacagtactgttatcaaacaaatctgctacagacattttaagaccacctcttgaaatggtggtgtgtcacctgttgtagtctgatttcttctttcttttaaaggtgttagtgctaggtatttttgactagtaattatgaggtgttttttttttgttgttgttgttgttttttttttctcctgtgaacgttatttatgttcaaaacactggtctgcttttttcttgtaaagttgataaaaattgttgaatttttcttttcactataggttttcctccttggaagtttagcctgttaactttcaggaagttttgtactcagattcccacagtcagtattctgccagtggtggtgtttcattttgttcaaagatatataaatttttcttttcctttttctatatttctttttttttttttttctcttagagccattgctgctgagattgttctaaagggacaaagagaggtaagccatggttgaatctcagatgggtcacttttaaaaagtttttctgtctcttttgttgacttctcaatttaaaagaattaaagcacagaagttaacatttcatgcacactaagaaccaagtggggaaacaaaagtagttaacattttaagagtaccaaatattcggaaactccaaaactcagcataaccattttgtctcagatgttattgtgaattaccattctttaaacagatggaattatgaaggtgtt

SEQ ID NO: 1425 - DNA, 1150 bp, Homo sapiens
tgccagctaattctggacttgcattgaggtaagaaaaacttaacattcttttggtcctctgcctaatggaataggctctttatataagattattcttgaaaacttgataaaaatagtctgttgttccactatgtcctcatgaatatatactgcttaatttcagagttgttaagccaatatttagctattcattcaaaagtcagtgtaaaaattctggtcgcttcagaaaacttcaggttacaaaggggcaaataattccattcaagtaaagttcatctgtgttccctaaacacacaccatctgtccttagcatgtgcattataagcagtaagcttgttttccacggcaagggaatattatttaagatgttttcatattttcacctaggtcagttgctctcaaatattggcaaacattagaatctcctgggatgctcatttaaaatgtagattcctgaccttgagccctcacactacatttttgaagcactgattagggatttcatatattcgatcagaacgagatttctcagcctttctttgtagtttctctgctctgatacagcaaatccactttcatccgcaagaattatgctttttaattcaaaaaggtaccctgcatgctaatgcactggcttccacgtttgcagtcattcccactgcatcagttgtatcttaatgttttatggatcataagatgcctaaaatatttatgaaatgttcccttatgttttaaaggatttacatttcatttagcatgtatgtggggaaaatcgtataaaagtttaaaaactaaagttgagacaaacataatggtagtattttacagttttcttagcaagcctgccaatctgtagaagctcattacagaaatgttaattatgaaacacctttgataaaacgtgaaatagaaaatgtcatattttgacatgattttctattgtgataggcattttagaatataggtagtttacttgtttattttgttggtaaatccctacatctgtgttttgatacttatttcctctggtcatccctgttctttttttccaggagaataaagaactttaatagttactatacatgcattttagttcaagaaacattcaagactgatcatactctaagaaagaaaaataccaggaaattgc

SEQ ID NO: 1426 - DNA, 1138 bp, Homo sapiens
gtggatggaaacattacatgtaatgcagatatagtgaacactggaaagatttattaaagaattatatttgtgtatactttataaattagtccctcattagatttttttttcttaagcataagactgaacttaaatgtgttaattttagtagaatcaggcactgctcgcagaaggaacacagattgtagagattaacataaattgttcttgttctaatatatatattttttcatttctgtcgtgcttggaaaactagtaaatattatgtctaagataaaatggaatggcccctggatttacttcttataagaagcagtagtatgtaataaagctattagcatgagcaattaagaggctataaagagattatagttacaaaagaaatactgccatatttttaagttaataacttaaaccttctcaaatgggttaaaagttgaatgaattgacaccctgatgttatgatgttggaattttaacttaaactgggaggcattctgtgagccttcactttaccttctttaattattgtccttgctaaactcaacacagacttttctgttatgtgtttttgaggaagttggggtgggaagagtcagggagataagctaaaattgtcttcttttatggggtaattgtactctgtagtctcttggtttcctgtgaagttagtatttatgtgggggtgggggaaggtagcaagaatcatgggtatcacggtactttgtttttgacctcctggctctttcagacagagtgaagaaagcttttccattcttactgttgtagaagtagataggaaataagcttttctcattacagtgaaatatgttttaaaaactagagtagctgggcacagaggcatgcatttgtagggccagctacttgggagagtgaggcaggaggatcacttgaggccaggatttcaaatccagcctaggtaacactgagacctccatctcgtaaaaggcacaaaaactagttagagatgaaattgagctttattttaaaaaaacgttctaaagcctgataattggagagctatacttcagcttttcatcctactttaatgaaacagctagataggaacctctgctccagaattgccagataattattggtgggtcataactattct

SEQ ID NO: 1427 - DNA, 1159 bp, Homo sapiens
ctctttcctgtgcctttatcagggtaaatgacaaagtaaaatagtaaatacccatctatgaataacatagtctagttctggttcatttacttggagatagaacaaaactggaacatgttgaagaaatccttagtgtctaataagggattttgaagtctcaggttagctctgtaaaataatctatggaccatttaatttccaatttaaggagttgcaaagcattgtccacagtaactggctttaacttgaaaccaaacgcgatcagtggaataaggcaagtttgcctttaggcttgctcaactgcattttggaaacagatttgggtgatgtgagaaagatgtactcaaaagaaaatttaagtggatagaagcttaaaaaaacccaaagggtcaaaatatgcaaatgactatattctaatgactttagtaaagggataagagaattctagaagacataaaatagatatgacaatggatgcaactctaattaaaagtctgaggaaggacttgcacacctccagtgagtcagagcagccacctctccggtggttccatggtgtaatggtaagcaccctggactctgaatccagcaaccagagttccagtctcagcgtggacctttacctgaagtccaaataaaatctcttgctttggaagcccaaaaaggcaaactttggggtggaaagggagtgcctctgacaatacaaattatgtacgactataattttttaaagttgtattgtttctcacagactatagaaatctcgaaatgtgagatgctaaaaagaaataatttgtaatcagtactttcaaataaattaaatataactttattaaatagtatcattagagtaataaagcataataaaatgaatctgagggaggctaatgagaacaaattctgccatttttattaggcaataccttcaagtcaagttgaaagataacttttttttggcttcaaaaatattaaaagcatataagtttgctattagtaatttgttagtaattatttattaataaatatcttatgaatattatttgcaatattattagtgtatctttaaaatacttttaaagtgacatttttctcattgaaatccattgcaagtaaaatatgtatttagttaacaaaatcattaagtttaatttttatatag

SEQ ID NO: 1428 - DNA, 1178 bp, Homo sapiens
tcctgccttgaagagggaaaggagcttaaggtgaaagaagggcaggagaaggtcagagagagagagagagagattccattttctaaggcctgaagtgcccaactgtcataataaaagattgtaacaagaacaaggaagggcaatgggaattatgaactggtcctatggatgaaaacatatatatataatatatatatatgtatatatatgtgtgtgtttgtgtgtgtgtgcttgcgtgtgtatgtgtttataaaatcacacacaagtaatagctgatataggactagaacgcagaaaacatattcccgtctagtaatttttctgtatcataacaatacttccctttttgattaatttgctaaattgttatgattagatctaggaacaaaaactacagtaattatataagacttctaacatagagggaacatattatgaaaatatgagcatgcttcctccttttctcatatattttaatattttatattttttctgtaatatcactgtaaactgctcatgcaatgataagcatatacaaacagctcgagaagaagaacttaagaatcactaacctaggtctaattttgaaacaagaatgtttgtgggaaggcatagtcagccattctccctgatttgagattaaaaaaattgatatgtaccctaaaaagcctaatttatatagagttactattagtgatttccttcagcttttttaaatgtaattattttccattgtgtactgtatctttgaaagaaagagtatatatatttatatctcttaagtatatataaatataaatatgtatttcttgttgttgacaattatgttaaattactcaattcttgaaaattatttcttttaagctttaagaagtatctttcaattctagtaatccatgaattggatgagcaaattggtcttctcctgtacatattactcatgattttaaaggtcaagctcatcttcagtttaactacacagacacttaaagtctgcataatgtgcagtacattatgatagacaaagatgtatggggttgttgagaattgagggaaggcaggcatctttagattttgtttttctagttaaagttttatttgaaaaaaataggagggagtggaagatgatgttttttgagtacctattatttgctaagcaccttgttaggtattttatc

SEQ ID NO: 1429 - DNA, 1177 bp, Homo sapiens
aaaacttaagaatcaccatttgaccttttataaggtctgatgaaggtaaaggttagaggataaaagcttttatttaacagattccttctcagacaaattatggcaagcactggagcataaattccttcgtggtattccttcgtggtctcctagatactgctggtagttcaataaatacccttggaggccaaatcaggactgttttacaaaatgtgctgggcatattagtggtacataagatgattttagctagttcacagatgtacatttgtttcaatagttgaatattgaacatttaaaaatatatataaaaaaaaataactagaacatcacactcttgatttcatcgacataactgccaagaaaagtgagggtagcatatttacagtaattcaccacaaagcccactcacaggtatgaagaccagggatgctcaccagtacccagaggaccagatgattgatgggttctaccacgagcatctaatagcgactgctgcagaactggtgtggaaaaggtttctattttataaaagaaagtatccagaaggctaaaggcagttgtggaatttatttcttcccagtgctctgattgtcaaaatttgaataaagctcagtgaaaggaggacagtaattaatgacttgatagccaaacatcgtaatgatgatttagtgatatactagactggatgaaagagaggtcactgtcttttcactatggattcatcataaacagtatcattcttctcaggaagaaacttatttttagaactatattttaataaatttctcacattctaatatttaatttttattttttaaattttattacctgctaggtatgatgtgtaaaatgattttccatttatagtaatggtatagtttcctttttataaaaggtttataaagtttatgtaaaaagtcaacttaaaaataccaagttaattcagtcagttcaaaaagttttgaataattaaacttggaaagtcactgcaataaagccaaagcaagttaatggtcataattataagacttagctttttaaaataaaactctcaactgtgtctacccttttaattttttttctttcttccccctaactttacagttaaccgacagcgagaccaagtcaaacgtacgtacatcaatcttaaattgtttcattaagagctatgtga

SEQ ID NO: 1430 - DNA, 1250 bp, Homo sapiens
ggatacatgtaattttaaattattttaatgtgcaagatggaaaataatgactcagaagttccaaaatatggaaaagaatgtaggtaaaataatttagtctgaagtaggatttaaggaaatagtcttaatatagttgaatccagtaattggttcaattatgccatttatgccatttttatgtatacttgtactaatatataaagtattttatgatttgttttatcttaatctgaagaaatttctaactgctttaggcaagtgtttttatattttatactgtgatcacctttcaattattcaattataagaatactctgaagttaactgccttaaacatatattctttgttaaacatatattctttgttttacttggtaaaatctaaagtattacatgtgttgtgcttttaatttgtctagcttctactgaaactaaaattgatgtggccagcatcaaggaaaaggttaagaaagcaaagaataagaaactgggagctcttacagctgaagaaattgcacttaagatggaggcagatgaaaagaaaaagaagaaaaaaaagtaacatacccaaaactccttgactagaactatctccttttgtaaaggattttgagatatcaggcattagttgccttatttgtgagaaattttctgagggctttttttttttttggtggtggtggttgttcatagaagagtgttctttataaattatattattattgtattttttgaaaaatttatacgagaaagtggtatataagtctttgtatacattacgaccattgtgattatccattaaatccagtgtctgatgctattggttagtaatgatgtcccagcatttgatgttccctctctaatgataacaagtaaatatttaggtttatcccttttgaaagtttggttttacttttaacagtccatgaacagaaaattaaggcctctaaaatcagatcccctagttactcctctgttctgaatctggggaagtagtaaaccaaaaagacagggaaaaccagatatttagagtcgaagcagcatgcaaaaaataataatgtttttaactaatgaaggctactggagttactaagaatcacctaaaaatgtgctactgtaccttgctcattttgcagatttagaagctgaaacatgggttaggttacttactaaaagtccacctgtggcaacctgcaaataatgcttatttatactaaagatgagtttatctgatagagttaggaaatttc

SEQ ID NO: 1431 - DNA, 1100 bp, Homo sapiens
tgaaggccatgtgtatgagtatggatcaggtgattgggccacccaagaacttagatgagagaactgaattaggctgctggcagaacagaaaggacggagacagctgatggacggtgcttggatccacaattgtgtttgtactacagttaaaaaaaagcgctaagcactcattataaagcacttgctttaagctgttacacagattggtcactaggaggcatcagttcatcaactactaaggcgaaaaggaaggcagctctggacacccacctaagaagtctggatagttctgtgttaatacttaacgttttcaactcaaggacttttggaaactagaatctagaatatttcttctgaatagtacttcaaagatgaaataaggctaagaagtctaaactgcactctgtgagactatttgtttatttatttaattatttattttgagacagattctcgctctgttgcccaggctggagtgcagtggcgtgatcttggctcactgtaaccttcacctccctggctcaagcaattctcctgcctcagcctcccgagtagctgggattacaggcgctgtgggttttttttttttttgtatttttagtagagacggggtttcaccatgttggccagacttgtgtcgagctcctgacctcaggcaatccgcctgcctcagcctcccaaagtgttgggattacaggcgtgagccaccgcgcccagccttggttatcttttataccctgatgagggtaacgtgacatgttcataatttactgggctttaactttttcttgaaagatgtttgacctttggtctatccaaatctttaataatgatcattgtcatgagtttctactgtatattgcaaattggtttacagatcagaattttgtaatcattatgaattaaacacttaataactttccaagttctgttacatgtctttaagccagtattgattaatggacttttagtcaagtgtttgactatgtaactgccaagtaagaaacttaccaactcagttccattactgtgtttctcatgcttctaaatactcttactagaaaacagtaggatactagtttatataaacacctctcatg

SEQ ID NO: 1432 - DNA, 1174 bp, Homo sapiens
tttcctgctcttaataaaattacattgaattgatttttagaggtaatgaaaacttcctttctgagaagttagtgttaaggtcttggaatgtgaacacattgtttgtagtgctatccattcctctcctgagattttaacttactactggaaatccttaaccaattataatagctttttttctttattttcaaaatgatttcctttgctttgattagacactatgtgctttttttttttaaccatagttcatcgaaatgcagctttttctgaacttcaaagatagaatcccatttttaatgaactgaagtagcaaaatcatctttttcattctttaggaaatagctattgccaaagtgaaggtgtagataatacctagtcttgttacataaaggggatgtggtttgcagaagaattttctttataaaattgaagttttaagggacgtcagtgtttatgccatttttccagttccaaaatgattccattccattctagaaatttgaagtatgtaacctgaaatccttaataaaatttggatttaattttataaaatgtactggtgatattttgggtgtttttttttaaatgaatgtatatactttttttttgaagagtggagagtagtgatgtctagagggagctattttgtgctgaggccactatgttctgtaaatatataattttaagagcaacctcacaatccctgctaagtggagtttattatttgaagactaaaatggaattccatagttcctgataggttatattctgggttattattctgagttatctacaaacatttttgagatttgtctttacactctgattgtagtttccagcagcccatgcacactgccaagtaagtctcattttttcctgttagaaatggtgaaatatcatataatcacttataaagaaaactgatatgaaaaaattttagagttgtttgctttatggtcactcaagtagggtaagtgttccacaaattccacaagttgatagtttaacatggatgtctgaaagccacatatataatttcttaggattcttaaattagtaaatctagcttactgaagcagtattagcatcactattttagattgcaaaaataccttaattgtgtggaactggcttgtagagtggtacttaagaaaaatgggattctacctctatt

SEQ ID NO: 1433 - DNA, 1103 bp, Homo sapiens
ggcctgctagcttattttctttttgttaaaaacttggaaaagttattaaggaaatttaaaaatgacaaatcatttgttaacatggtgtgagaaaaatcatggaaagtaaaaagtaaagttgagcatttcttcccttcatcatataatttaaactgaagagtctgtcttttttttttttttttttcggttgcccaggctagagtacactggtgtgatcacagctcatttcagcctcaagctgctgggctccagcaatcttcccacctcagcctctcaagtagctgagactacaggcgtgtgccaccctgcccagttaattgtttattttttgtacaaacgcagggggcgtctcactatgttgcttaggttgctcttgaacttctgggctcaagtgatcctcctactttggcctcctgaagtgttgggactacagttgtgagccatcacacccagcctctaagagtcttacatgtgccaaattaagtaacacagttattcctaaattttctgcttttgttttcctttaaaaataggatgatgatgctgaagctatccttgctgcagacttcgaaattggtcactttttacgtgagcgtataatcccaagatcagtgttatattttactggagaagctattgaagatgatgatgatgatgtaagcgaatttgaatcctgcaaagaaataattggttgagggtatagtggtcagaattggtaatagattagtttagtttttaagaagcaggacataatataattcaaaattaggctaattactgatgttctgtatatagcttttctgggttttaagtatgtctccttaggatttttggattcatttatcttagcttttaattttctgctaataagattgttctgagtttatgaaacttttttatgtttggttagtgctatagatctattatgcccttgccttgacttcacagagctaggactttctttagtgcacaagaaaacatttactgggaggcatagaatttctattcaaggtagtattgaatgatggttaggttaagattaggttgcatatagatgttttgaatatgtttattgctcaacggcaattgttagagtaggcttt

SEQ ID NO: 1434 - DNA, 9129 bp, Homo sapiens
cagaaatactgtactcaatgcaagaagatagattcatcttcatgtctgccaacaattggcaccatccagcttcatagtgtttttgtttttatttttaaatcagtctaagaggtgtggactcattttgtcttatttgtattttatgatttctaatgagtttttagcttttctacataatgcttgaacctttttcgttgcccattggtaccctttttccactttcttgttgggattgcaacttttttttaatgctttgcaaaagtctttgtattccaaatgttattcccttgtcagtttttagacattctaaataatgtgtcatttctacaaatttatccatggagtcctctggtaaacagttaagttttattttagtaaaatattttgccctagggcttgtacttttgaaactttttaagaagtccctcctggtttctgctacatttcgtattgaatagtttcaccttttacatttaggtcttaaatccctttagagtctacctttgtattagttgtacgtaggcttccagttccttttttttctgcctcattttttgagccaggtttgtttgtttgtttgtttatttatttatttatttatttatttatttatttatttattttgggtcctcctccagtgacatgagctagttttttttttttttttaaacactattcactaatcaatccattgttcccccatttaggtgtaccacctaccttcattgcatatcaagttgtaaacacccgtgtttgtctttgagcagcactcttatgttttattggtctttgtctcttgtcattgtcatacttaattactatgactttatagttgtcttaatatttggcagggcaggttgcatcctttcatacttctcccccaatcatccacatttttgacagttaagtttaccagggttgtcaacaagcaaaaaaaccttaaaacgttgataggaattatattgcatttgtagatttacagaattatatcttttaatattgtctcatccacatacttctaattattcaggtcacattctgtgtctttagtttcaaagttatcctcatagagtctattggttaagttaatttctgtatattttgtgtggctgttgtgaatagcatcttttttgtattttctgtttggctgttcttgatttacagaggattgctgttttttttttttttaagttgctcttgtatccagtaactttgctaaatttattgtagtaatgtgttctgttttgccccccagtcacaagattttatctgcaaataatggcagttttagctctgttcttccacattacattataccacatacttttctttacaacattaccaggactttcactactgtgttaaacattagtattctttgtcttatttctattcatactgggaatgaatataaaatctccattaaattcagtgcctatttactgttttttaatctgacctttggtttttttttttaactgtatcaattaagatgctctattgaacttttcccttcagtatattaagtaaatagtaaatacatgttttggaaatacttattttggatatcaaactagccttgcattcctgtagtaaattgaatcatgatgtgttattgttacattgttgagtaattgaattttacagttcttacttgttagtgaaatgagcttgtgttgtgtgcatgcatgtatgtatgtgcataaagaaagtttcaggaagtggtaatatttaactggtttttggagtcaagatttcaattgcctaaggaatggagcagcttttaaaatttttcgtttcctgaaacaacttgcataagatagcaattagcagttcttagggtagaactcttctaaaaatttactttgggactttggagttggggaagtagaggtccaggggagttttggagaatttttttttttttaaacatactaatttattcaagttctctcatcagttttggagtttcatattttaaacatgtacatatttaggtttaaaattgattagtacatagtttacaatagttttaaaaatctggttttcatattctgtattttgcatcttaattctgctggttgtcttgatcttattaagtttttagaatattaattttgcttttggttttccttttccatactgtcttttgttactgctgctgttatctcttttttaggattgctctatgttattctttccagttttttaaattgaatgcttaattcatttgatttttattttttaatttgtgttttttatggccttaatactcttacttttgtaaatgttgagtgtgaagatctgtatgctgaaattaatagctcaagcttattgtattgttcagcttctctttatttctgcttattggttgtctgtttgacctgacagttttttctgtcatttgtagattgaaatattttggagccatattaggtgtatgatatttgtgatgaacatttcttgttctcttgtttcattttactgatatgtgtcttcctttgtgttttataatgttttttgggggggtcataatttttatttgtctgatattacaataataacccccagcttttatgacaaggccttactctgtgatccactctggagtacagtggcacactcatggctcactgtgatcctcccacctcagcctcccaagtagctgggagccacaggtacatatcatcatgcctggctgttatttttgtagagatgggggtctccctatgttgcccagactggtctcgaactgttgggcccaccttggtcttccaaagcgctgggaatacaggcataagccatcacccccagcctctttttttttttttttttttttaaacttttaacctagtatgtcttttttttccatcttttcatctgtgtgtcttcctctagtatcagtgtttgctgcttttattttttggatacagtgtctcgctttgtcatccaggctggagtgccatggcacaatgacggctcactgcagcctcatccttcggctcaagtgattctcctgcctcagcctcccaagtagctgggactataggcatgcacaaccatgcctggctaatttttgtatttttgtagagatggggttttgccatgttgcctgggctagtctcgaactcccgagttaaagtgattcacctgcctgggctccccagagtgctgggattacaggcatgagccaccacactcggcctcaatgtttgcttctttattattagttgcatttcttagaagttgtattgtttttggatttattgctgccatctttctctattttttaatttattttactttgggtctttcttccttcttttctgcttcccattggatagatcaagtcgccttctggttccaaagttaatggcattgatttttgttactatggtagtggcttataacctaatatctaagtttatttacccctgttgatttcttaaatttaccaatatttatattgttcataaatgtgctttctctggccctctatttttcccttcaaggaaagaaatttaccaagatatttgaccacacccataccttaaatagaatctgctggatttttaaaaaattttcctcaaaagttgcttttagtaatatatagtgagtatctgtggcaaacctgaagcctggtatacctgatataatttttgtcctgcttttatatctgaataatagtttggttatgaaatagtaaattcagagttcttaaaaactacaatttatttttttctttatttcagtgtttcttttaatgcctgttgttagtctgattcctttttctttgtaggttattctttctcactggacacctttagaattttcttttgtctgtgatattcataaatctcattaacatgtctaggaagcagagtaaggatttttatattgctttaatgctgagaaatgtatcattctcatatgtgaagagatcgtaccccttctctgtcagctattgctacttttgtcgtccatatctcagagcttttctattttccatctgtctttcatgctgccttctggtagaacttttcaacatcatggactttatcttcagtcgaatctatcctgtttctcttatttgttgcctattttagttattgtatttttcatacttaacattcccagtctgttgtagatttcttggtcttgttgcatgtcaatcttcctcatctctaagtatatttacattcttgtttaaattctctaattatgctgcttcagatgataatcatttcattcactctttcatagaaattgtacccttgaagtttctagttattctctgagctccagcacattaggcaataccagttaccctaataatgaatatttggggagaaatgaaggtctgtgacaaggagaagggcgcagggtgagcctaagtagtagagcactagttgccttacactgaaagtttgctgccagtccaggcaatttttatggtgtgctttgtagggtgggggactagtctcctttggttgtcaattcatcattcctagattggatcaaatacatgtttgaaggctttgaaccgtgcagctttcatcaaccctcgcattgggctcttgtgaagggtgaagatgacagacaacgattgttgcaaggcaggagcagaacttaaaaagctttcttgcggaactgctatcttccagtttgtccgcactgctacctgctgtggccattccctccctaagttgttggttaccctgtacagttaaacacaacctccagtcttacctgaaattgcttatggtgtgtgtgtgcctcagtagttacttcattcttgttctaaagtttctgggattagctttttgggggagcaagaaaagccagaagcccatgccagttcaccaccttggcagaatagtgcttttcacttaaaattaacagaaatagaaagttgatatcttcaagtgtttgttttttatttctaataatcttaagtaaactggtggctaagtaagtgaattatttgatttacaaaagtttgtggcaggaaagtttaacctggattttgtatctgttgcacagattccctgaagttatttaaattttaagtgtgaacatttattgttagagaggtttaatcattctttaggagactcataacctagtgtgtataaccttttaaaaatcagtgccccctgttcacattagcagacatggaatcaacctaaatgcccatcagtgacagatctgatacagaaaatgtatacaccacgtaatacttgcagccatacaaagaacgagatcatgtcttttgtgggaacgtggacggagctagaggctattatccttaacaaactaacacatgaacagagaaccaaatatcgtacattcttacttaccagtaggagctaaatgatgagaactcatgaacacaaagaaggaaacaacagacactggggttacttgagggtggagtgtgggaggagggagaggagcagaaaattaagtattgggtactgggcttaatacttgggtgataaaataatctgtatagcaaaccttcacatacacccctaaacctaaaataaaattttaacaaaatagtgcttcacagttcattgtatggtgtatgaactttatctcatcaaagctgttatttatttttgagacagggtctcattctgtcagccaggctggagtgcagtggtggtgcaatcttgctcaattcagcctcgacatcccaggctcaggtgatgctctcatcttagccttccaagtggctgggaccacaggcatgcaccaccacacccagctaatttttgtattttttgtaaggacagggttttgtcatgttgcccaggctggtcttgagtttttgggctaaaggaatccacctgcctcggcttcccaaggtgctgggactacagttgtgagccatagcacctggccctaaagctgttattttaaaaatacatgtctcctctttatagtatgttacacttgtatttaataatgtaattactaattcctaattaaatatggagactaaaaaaataatggtgtgtggaatcttgtcctttttcctgatatgtctatgctcccctcctttttcctaataacttgtatgggtgagatatatgtaaaagaaaaatccaagtaatcattgttctcagaattaagatggtctgtccatgacttcagcaatgacaagtccaacacttaacttgggtaaagatttagggttgacaatatgatttacattttgtttatcaatttacccagttacatttctacttttgaaatatagccagtggatcaatgtatttatatctatttgatttttatttactttgaatctaccttttgcttcagataaaaaacctgtcattcactaactccaatgcttcagtttcagtatgacaaaagaagtgtgacttccattttactctgatgctatataactgatttctaacctttcagcctgcctagggtagttaaaagacgagtgaatgctctcaaaaacctgcaagttaaatgtgcacagatagaagccaaattctatgaggaagttcacgatcttgaaaggaagtatgctgttctctatcagcctctatttgataaggtaatgctttctcctactttgtttaatttaacattctagaagacgaattctagaaacataagcagacttggaagaggttaatctttagaactctcattgaaattgttattagaggcagcacttggaggaactatcaataatagcagttaaagttgtggtatgcatttgttaaatttgtaagacttcttagtgagaaaccactggttttagcttggatgccagtgtttttatacagccttttttttttaaatcattttagcgatttgaaattattaatgcaatttatgaacctacggaagaagaatgtgaatggaaaccagatgaagaagatgagatttcggttagtaccaactttattttggtatgtttttaagatgataaaatcttaggacttgtcagaaatgttagcatttaatgatggagtacaatattatataaccagttgtattttttcattttttaattttacgtctttattacacgtttttctattactttatttttaaaaaacagtcattcaagattgtaatttgcatggcaataagcagcggtttcatgggttctaagtttcttaagtgtccacagcagtttaaaacaccacaagtcttatttccaatttgcagcacctgacttaaagttcgaattcatctgatggagcattaaaactgtcattttctcttgtgaaaagacataattgctatttccaggactgtatattgaacatggttgtacattatttttaattggttagtagaattttactcatgtaatttatatccagaataagaacctctagcatctctgaatggccttcctctcagaacgatgatgattaaatgtctaaaatgtatctggggtgcccccacttgacattaccaaacatgtttccaaataatcttagaaaatatgattctttaaacatatgcataccacatctttaaacataaacataccacacagtgcaccatcacttccttaaccattttccaattgttcacttataacatttgcaattttttattataaatcatattgtgatgaatactttcatccataagttttattgcaaggcttattgtttcttctaatgtcttctaatttcaaagaagtggcttactggttcaaacagtgcacatacgtggttttaaggcttttagtatactttaccaaataatctccagaatagctccaacaactcctaccaacagtatgttattgtgcccatagggtggacttgataacagcaaagcaaattcaaccacagatatattagattctcacccatctcaaaactatcacatcagagaagcaaggagacatattattggtgaggaagccaaattcaaattcttttaaaaaatcactcagctttagatcagtaaaataatcaacaaaaatggtcaccgcaaagtctaccgggtttttcaaaaaataaaaagagagaaagagaaaggccaggcgcagtggctcatgcctgtaatcccagcactttgggaggcctaggtgggccaatcactaggtcaggagttcgagaccagcctggccaacatggtgaaatcccatctctactaaaaatacaaaatattagctgggtgtggaggcgggtgcctctaatcccacctactcgggaggctcaggcaggagaatcacttgaactcgggaagtcgaggttgcagtgagccgagatcgcaccactgcgctccagcccaggcgacagtgtgagactccgtctcaaaaaaaaaaaaaaaaagtaccaaataaccaaaattttttatttgactaaattctgttcatgtatgagcatgacagtctctcctgtttatttgactttggcaataaaaaaataagcagccttgtacagaacagggaaaatgccaagaacgaaggcagtctacagttttactgtagaatacatatatatatatatatatatatatatatatgtaggcctctctccctttggccatatctactgtcagttcaggccattaactacagacaaattttcaaattcacttcttctccaagatcttcgatgctgtcatcatctacttctgtctgtttttcctgaatgacctcaattatgtcatctgtaaagtctccttgaatgataatttcatcctcctctgttactgaggcaccacaggagaatttttgagcaaaaaatctttgtgtgatttaagatcaatttcaaaagttacaaggccacaacccttgtcacatatttctttgctctgggaattttggctatagtaaccttttgtggtaccgtctttgtttttttgttttatttgaccccttccacctctcttctgttttttcttctcctcttcttcccctgctgttccttgaccttgacagattccagcttcttgtttgggtgaattttccacagtaagttttgcatattcatttggaaaattcttctctaatcattgtctacatttagcaacatcaggcatatattcacagtactctattggtaatgaacagactccacaataaaggactcaaagtaggtaatcagcatctaacttggctctgtt

SEQ ID NO: 1435 - DNA, 1149 bp, Homo sapiens
ttttaatgaaagtgtaagcacttccagtgtgtacttgtttacatatgaagttagaaaacggaattaccttttgaatttcctatttcatgtctttgaaagagatactaattttgaaaatgaattttaagtttttctgtaactttttttggtaattggtacatttgaaccttggtgtgatactatgatattatagcaaagaacagtctgaacttgatcaagatttggatgatgttgaagaagtagaagaagaggaaactggtgaagaaacaaaactcaaaggtattactttaaattacttcaggagccagtgattgctggcacatgtctactagagggtagttataagtaccagtctatttttttggacccttgctcattgtcccatttatctactggtccatacttctagtgtgtgtgtgtgtgtgtgtgtgtgtgtgtgtgtgtgtgtgtgtaaggggcgggtaggtatagatacagcaactcaattagaagtcattgtttgcatcctgcactgttggagtgacttggtgtacttgtgtcaaacagctgcccatgagttttgtctgaatttagaaatgttacaggttgtgatgtggtgcttataacagtatgtttagtgtttaatatatggagaacatgtagtgtgtgtctttttaaagatccactccttcaagcagaagagccatttattaaatgtaggtaatattcacaatttattttagcagatatttttaaaaggagtggtggtgggggattgtactacttagggtatgtcttgtagatctgcgccaagaatattaaggtaccagatgactcagcttttcatttttaagccggatggaagttaattgtgaaaagacttcagaacttgtattaatagcttcagcttttgtttagtaacattttcttaacagatacagaactgtatcctcagtgaccaatattgatatttaaaaatctgtattggttatcctggctgtgtgtacatcatctagtaattgaattattatcagaagtaaattgacctcaaaaaaagtaattgggaaaattaagtttatggcactttgtgtaataactgtattgatgatgaagagaaggttagtactgtaatttgttttgtataagtctagtgcatatttggattgagta

SEQ ID NO: 1436 - DNA, 1166 bp, Homo sapiens
gaacacttagtatgagtaaaacagatctgttggttttcattacctcatctattttaagcttacaataagcattgacctctgaaatgactttagtattccagacatattttctaactttgtgtttcctaaattggacattaaagtttatgtttgaggaaaaaactcagaatcagatctcaaaatgttaaactgtttctgtactcctataatgtgtaagtggcaagaagcaggaaaatcagtaacttaccaaataatgaaaaattaatgctagagagcattatatagtaaaatttcatttttttcctttattcagagttagtataaaatagctaaagctagggaaatagtataaaatagctaaaactgggaattgaaaataagagaggcaaattttgaaggaaagaccagaacaatcaagtctatttagcttaccctatttgaatacttctgcctttaaaatagattgatatagttttcattttgtaaatacattgaataagttgcatgtaaatttttcaaataaaaattgcagtatgagaataccaagttttattcttacgtgtctgtaaaggggagataatagtagcactgtctccaagttcttgagaaaataaacacctgaggacatacctgacatgtaaaaagtgctaaataagtgcaccttatcatttctgatgacttctaaaatctaagtttatagccaaattgattttaaatatggattcacaatttttttttgtttttattgtctgtttttgtgttgggttttgttttgttttgttttgttttattttgagatggagtcttgcactgtccaccaggctagagtgcaatggcatgatcttggctcactgcaacctctgccttccaggttcacatgattctcctgcctcagcctcccgagtagctgggattataggtgcacaccaccatacctggttaatttcttaaatttttagtagagacggggtttcactatgttggccagactggtcttgaactcctgacctggtgatccgcccgcctcggtcttccaaagtgctgggattacaggcgtgagccactgtgcctggcctgtggttttttttgagacatcgtctcactgtgtcacacccagactggagtgcagtggcacaatcatggctcactgctgcctcaacctccca

SEQ ID NO: 1437 - DNA, 1199 bp, Homo sapiens
tataataattgcataaaattgttatactattaatgctaattataatagtatgtacatgcctggcaagggtgtaagtgcttgataattgataactatcagatgtggaagagatgaaggaggaatgaatgttcactctcacctgagattccaatggctcttcccacttcggctctcccaccccatcctaaccatttatccaggccatacctgggcgtctaactctgggatgagctaacacgtgctcagcaagtgcgctttcgtatctgcctgaggagtattatctcattcttgatttggcatggctgtctttgggaaagtaaagggtcaggagttggtagaatgtgctaacttcgttacgtttcttttttattataggggaaaagcctttgccagtaagagagtggtgcctccatcaagcagcttggaccctgttgctcctttccctgtcctctctgttgacccagaatattgtgttaatcctttagcccacccagtattttctgttgctcagacggacctgcaggcattctccatgcagaacggtctgaatggacaagtggatgtctcacttgcttctgcagcctctgctgtggagagcctgaagccagcactccttgctggccagcctctagtgtatgtgccctctgcctcactgttcatgctgtatggaagtctgcaggagggaccagcgtcagggtcagggtcagagagggatgacagaagctcagaagccccagccacagtagagctgtcatctgcaccctcagctcagaagcgcctctgtgaggagaggaaacctcaggaggaggatgagccagccactaaaaggcaaagtagggaatatgaagacggcccgctgtcgcttgtcatgcccaaggtaagggagtgcaggtggatgtgtctggtgacatcctgttagccctgagcttcttcctaatgaagatacactgatattaataagcaatggagtctggaatatggagctgtttcatgtcacttgcataattaagcactggagtggctctgccaaaaatcttgccttaaaatagtgcataagaaaggtgatttttataaaactcacactttctataaaatgctaaaaagtataaagaagagttacccagaatcccaccacatagaggcatcactattaacatgtttatatatttccatccagtcttttttacatccttttttta

SEQ ID NO: 1438 - DNA, 1152 bp, Homo sapiens
tatctagaagtcctgttctcaaatgccaactctgccagttattaactgagaaagtcacttaacctttctgatcctctccttcctcatttgtaaaatggtgatgatgtctacttttcagtgtgaggattagaggataatgctgtgtattataggatatataatatgtgtatatgagcgtgtctctggcattgataaatgccagctaaaaaattattggttagcacataaggaaaactgctgaaaatactaaaaactgtatagattatttccttcttattgacttaaggttcagacaccaattcttgaacaagaatattccataatacgctgattagaagttaaatggtagtagtagaaaacttgatggctataaatttgcattcttatttagaatcaatgctcccttccctattattctatttaattttagagaaatggcaatttttaaataccctaacttcacgaatcttctgaagaacagtcaatgtatcaaaacagataatcaaatgaagacaggctaattccagcctgagtagttaaaatgtggcatatttataactcataaatcctaaattatcttaagcccatctatttttttttgctgattgcctaaactgaactagttttccatgattaattttagggcttatgatataaaaagagagatgttctaaaaatcatgaactcattgcatttctatatttgcatcttatctttccatcaaagaattggcaaaaagatttcattttggacaactccattactcaataaatcatcagataaatggataaacaaaatgtgatatatacatacaatggaatattattcagccttaggaagaaaattttgacacatgctacaataaggataaaccttgacaatatacaaaataacctagttacaaaaggaaaaatactgtttaattccacttatatgacgtagttagaatagtcagtttcatcaagactgaaggtaaaatagtgatggccaggggctgcagggagggggaatggggagttgctgtttaatatgtacggagtttcactttgggaagatgaaaaaattctgagggtggctgatgctgatgatcaaacaacagtgtgaatgtacttaataccactgagctgtatactttcaaatggttaaaatggt

SEQ ID NO: 1439 - DNA, 1109 bp, Homo sapiens
ccctagtcaagcttccctttccattctattcttcaaatacttactatgcttacttctaaaccattaatattccaagctgtgtcctcactctcagcatacaattcctttctcattttatagagatacctccacacaatttctcatagaatagatataatggataaatatttaggtaatatgagattatatgaggaatatataattcctcacataatattcctcatataacagataattcctctctcatacatttcccttcagaaaatagaggcaaacaaacaacaatctccgtgatagctggcacttttcttccacttctaactgccctatacaaagtgcaaaacgattctcacttcataaggattccaaccacccttccatgccaatagaagaggtatgtctgtttgtatctcactcctttccactgccaacttcctatgtcctaaaaaccattcagagtcctgcatctccctctctcctcctgatcaaattctgtaacatatctacatcatcacttagaactgcctttttgacccattgaagtctggtttccacattatccccctacatctgcacattcttttctcgcaggtcatctaaagtcttatcgttcaaatttcctaagtttattttaatttctctccctttagtagtatctgtcacagttgactaatctctccttccagaaaatttctcctctcacttctcctgtgacatcattctctactgttcttctagctttgtgctcactcttcctcagtcttctttgaaacttcctgaatacacacagttcttttctcagcccttttactatctatacatttctgggccatgtctcttttatgtggtttgacattcaactttgctgataagcccccaatttctctctcctgaactccatatcattttctcccttctctcgtcagcacatccctcgtactttttgggacaaatgataatattacatctcctctgtactgccctgctgtgaaccaggaacttgggagtgctctgaggtttgtttttacttcaccacagacatctaatcaaggtgattctacagcctaaatagctctcaaaccatcagctcctttctatactcataatct

SEQ ID NO: 1440 - DNA, 1165 bp, Homo sapiens
tagaaatataaatgaaatttgtacttgttgaaattgcagtaatgaacaaattaggattattttattttctctactgctgtacatgtttgaaatacagaaaaaaattagaatcttttttttttttttggtgatacattcaagttaataaaactgattctcgttgaggggtatggatgtgatctaatacacacaataaacttgatgataagtaccttggagaggataaaacagggagataggctatagagagtagaggctgcaaagtggtggtagcactttagggctggcaaggaaagcctctatatggagcaaggtatttagttgagatccaaactttggaaggagccagttaggtaaaaatcaggggaaggagctggggtaaaaatgttctaggtaggagaatcggaagagattgtggggagaaagaaaacaaaacaaaagttctaggtggagggaacagacattacagaggttttgaggcaggaaacttcaagtattcaacttaaagcaaaagttgggtaggtgagaagagataaagaccaggtcatggtagagtttggagtttaagtgcagttgggagctgcttgttggttgaagcagaggaagtacttgatctaatttttgtttcagaaagatcagtttaggttgtaggtaaagaatgggctctgtgtacgggaaggagagggcagaccactacagcaatacaggagagagtgaccaggtgggaggtaggggccatggagagacgggattgcgtatggaatatgttttagaggtagagctgacagcactttctgtgagaagcagagcaatcaaaatgataattaggttttcctttagagcaattgggtggatgctgatgccattaactaacaatacttttcactgctattcgtgcagtaaaatgatgtcatgcagaagtatagctttttaatatttttatttttagagatagggtcttgctatgttgcccacgctggctttgagctcctgggctcaagtgatcctcttgcctcagcctcccaagtaactaggactacaggtgcacaactgtgcctggctgtgtcctttttgtagaaattatgattgagcctctttataaataatcttaacattttgagtatatgctaggcattgttctaagttcattacatgtataagctta

SEQ ID NO: 1441 - DNA, 1177 bp, Homo sapiens
ttttttttttttttttttttgagacacagtctcactctgttgcccaggctggagtgcagtggcgtgatcttgaatcactgcaacctctgcctcccaggttcaagtgattctcctgcctcgacctcccgagtagctgggattacaggcacatgccaccacctctggctaatttttgtatttttggtagagacaggtttcaccatgttggccatgctggtctcgaacttctgacctaaggtgatccgcctgcctcggcctcccaaagttctgggattacaggcatgagccatggcgcctggcctctcagataatttttattagtggtactctgcagattcctgtggcatcagtggattgattaccactgtggtgcttctaccttgtagtttatagactgttcctaagcaatggtcaatattctatgccaccatattctgagtattgtgcatttcccaccgttgtcagaaattcaccaactgagcaggacccctgatgccagtctttattctgcattcacaggactgcagaattctagccatggtgcaacttctatttttgactgtccttttgcaggacaagcatatgaaaattctggaccaggattctggactggtgtgggaactggaggaatattgggtatttgtttggcagcagtatatcagcagcactctttttagacatgtggcacccgccccccatcttatcctccattgtactctagcacatggaataatcatcctactgcttagaggaggcccaggtcaaactctgacccgagaacaacaactgcctcagggtatggtggtatcagaagatgataaagtagaaaactgaaggaaaatattggttgcaaaatttctgatttttcttcactttatatttaaagaaagtgcatcctgttaacaattgtggaaagggaatagtaaacagttgtgttctttgagagttaatatataaccaaatacttgtatattgtaagttagtgtagcatgcatatgtgtatctcagtttttgaaagtgttgattactgtggaaggctgaaaatgtattgttttatttctaaaacctgtgaagccataagaaacattaagaatgaaagtgttgtaccaatagaaagcagataccaaaaagttctatcttaggtggttttagttgatgagtcattacctcattgaga

SEQ ID NO: 1442 - DNA, 1167 bp, Homo sapiens
tctatccttgtcttttatcttcaaagagattttccactgtacaaatctctaaaattgagaagttagaccagatggtttttgagagcccgtctgggttctacaagtataatgcacatacttgtagcacttggtgcttttgtttcttagggtaaaagctgaacacattacaatgttcttcaaggccctatgtaatctgtcatgacccctttcatctagcttcagtttctacctctccactcatccttaacacttcagccacatcccacttctcacacattctagaacattctaaggctagttctgtcttgatttaaaactcctcttccctcagataactgaatgactgggactcagtttcctcagttctcttctgaaatttcacattatcacagaggacttccttggccacttgatgtaaaagagtaatcaatccctctacctatatctttctctgtcttcctctagccacaaagccatgtcactacctgacatattaaaaatgtttaatatttatatttattatttgtcacccttctgtagtggatgatgttagttttatgcccagatctctctaatgaccactcaggaatgttcctgtctcccttggaagcattaccctcaggccaaataggaggtgcctctccagtgagggacaggagtacaaaagtccagcccccttgcctcagagtacagctaactgtggtacagtttctacttcagattttctccatgggatcaatttgacggtagtctgaagctaagtccatattcttgtttaggtttttttttatgttttgccttgtccttcttccccattcccctcctcctgagagcactttgccattgcatcacatatacaagaatccacatctcagattctccttacatggagcttgtcctaagacacaatcctgaaaggtaagcttcttgaggttaatttgtttctttcattcactattgttttcctagcacccaggacagtgcctggcatatattggtgctcaattaagtaattttgaatgactatattagttttgaaggccctaactattttaggaagagcagcacactggtttatttgagctctcattatgcttctgggtgaagatagtcatataaacaaataacaaaggaaaataagtacacccagcacctttaccctcttca

SEQ ID NO: 1443 - DNA, 1207 bp, Homo sapiens
agaagttgtttgttgagctcatttggggttccatttgtaagaccatctgtaacttgatggcctcgatcctagaggaaacagatttgacaaggaggttaaaaatatagggcccgaaggtgagtaatagcaagatggctgccacgggacctagaaaggggagaagccaggttgcccaactccagaggttggtataagagtttgaaaggtgttgtttgatttcagaagccttttcctgtaaatgctgggtggcacctcatactatccctgactggttagtgtaaaaacaatacttttcccctaagaaagtgcagagtcctcctttctcagcagtgaggaggtctagtccttggcggttttggacagtcactgctgccaaagagtctatttgggattgtaaagagaagaccttcaattatcaattatagttttaaatttaccctggtttttaaagcaatggggtatactgttttttctttactatttctatctttttctctctttgactccttctttgtctctctctttctctctctgtctctgactccctctttgtctcttcctccctctctctctctgactttctgtctctttctctctttcctttctgctggcctttccctgcctctgccagccgcttatgctgctgttctcctctctccttcttctttttgatggcttcagctgtgtaagactgccacctccttgggtttttgcactgcatgcaataactccatgatttccttgtggtatttgatgggggttcccccagaggttaggaactccctttctttccatattgcaacatgggcatgtaggattaaatgaacacacttactatctgtagcaaagtctcccaattacaactgaggaggtgggagaaatacctggttacaggctgtcccaggattcctcaggtggtaacagaccttgaggacagtcatccaggacaggagattagcactgagaaggccatgtcagtgtccaggaggaagtcaatttcctggccctcaattgttaaaagtacccgaggctcagtgagggtgatgacgtgagctggtgcctgccccaggcaccctcagtcctgttgttggatcatctggttggggcctcctggcccggagaatctttgccctctggggcagtgtgccttccaatgattgccttggcatagtggacatggacaagggggcggcttgtttctcgttgg

SEQ ID NO: 1444 - DNA, 1546 bp, Homo sapiens
gttgtcaggtgatttgtatgtatgagaagcaccgggcactgatattccctgtaaaatttattaatttatttctagtaggaggctagtccttgcatcacctgggccttgcttcttaaaaatgcagattctcaggcccagcctcgatctggaatattcatttttagccagtatgtcacatgattttcagggcagttgtttggcagactgctacattaaggcttaaaccagttgaagaactttattcttcaaagatacttgcatttcaacaaggaaggaagcttttaaggaagagaaaaacaaccctcattgtggttttagtaagcattaaggggaggacatgaattcagcttatatgtgcctggaatcccatcacaaagctacatagtaacaaagcttctgagaaaggcagtatcttatcaatgtcatattttttctttctttctgtgttttacatttgattttttttaacgttttgttttttagccgtgctatcaagactaatcaggaccttctcccagaaactccatggacgcacattttctacaatgatttttgggggactcttctaacccacagtggcagccacaagtcctaccggccactctgcactctttcttttcgcctgaaccatgccattggagggttgaatccctggagctaccatcttgtcaatgtcctgttgcatgcagcagtcactggtctcttcacaagcttctccaagatcctccttggtgatggatactggacattcatggctggcttgatgtttgcttctcaccccattcacacggaggcagtggcaggaatcgtgggacgagccgatgtcggggccagtctcttctttctcctctccttgctctgctacattaaacactgttctacaagaggctactcagccagaacctggggctggttcctggggtcaggactgtgcgcaggatgcagcatgttgtggaaggaacaaggagtgactgttctcgcagtttcagcagtttatgatgtctttgtctttcacaggctgaaaataaaacagatattacctaccatttacaaagtaagtgattgttggctcttgagcattggattactgagtaatctacttgcttactcctttgccaccatttaaaaagcaaatttattcctctgcaagcggaatttaaaataagttcctttttgatcttcagtaagtggaagtgtccttttgacctttgtactaagcagggttttagtcactgattgttttatttctctggtttcttactttcatgatttcaagggtggtagaagaataattttgccttgtaaagaatatgcacctttattatttattgagttcttatttctatatttctgcacaaattgtctataatctgataaattgtctataacgtgtatttgtaaaaaataacacggctgataatagagctagatgctagactttacaggggaaatcctctgccatttgttaatattacttttcctgagttgactttggaaaacaatccttccctttagtgcactgggaagtcaaattcttaaacaatga

SEQ ID NO: 1445 - DNA, 1206 bp, Homo sapiens
gactgtggcatgtggatacattttaatgtttaatagtggagaggattatcaaatacaagtatacttaaggcccatgaaattctcaaaatagccctgtaatcaacactattgctttgtcatgaaacaatacattttttttaacttttaattcttctgttttcagaagactattacaaaggctaattacaatgagagcaaaaaaactaaaatataaggccagattatcaggtttttttgtgtgtgaatataaagaaagtcagtacatccataaatggttctttagattaaaggaggatgtttttaactggttttaatcaaatgatttatatcgttgtttaaaaagcattatttgtcatgttagttatatatatatgtacatgtaactcctcccatattcttacttgaatatcacttcattaaatccctacttaaatgcttcattaaatgacttctatactgtcatctctgtgcgtggcttccagggatagatttataattacatagattactcttacaaggaaagaataataacagagaagttggttcacaattggatggtgacatccaatttttaaaatgaggacatttgaaaaaagtagaaggactattttttttagcttttaagatgattgtagattcacctgtagttataaaaaataatacagagacattttagttgaatgtcataattcaacattcatgttagcatccctaaagtacttgttttgtgatgaactcaagaaagctgacacctacaaagggaaatcaggattcaattgactattggtatatttataaaataaactgaaaccaatctgcaagagccttcaatgcaaagataatttttaaaagacacctcaatttgtgtgacaaggttaggtactgttacagagataaggactttttgttcctcatgaataaaacactatgctttcagccacaataaacaatttgcaagaatgggaaagcacaaatacagacaggcaaattcatcttgataataacagatacttttatcaacaaggcattttgctacatattaaatccatgtctgaaattcaaggtctaccaatagaaacccattataagtgtattacaaaataaagtccttgttaaagacatcacttatgattttttcttagttgccttagtgctagaaaccagtggaaagtttttgttatatactggcagtgaggaaatctttag

SEQ ID NO: 1446 - DNA, 1128 bp, Homo sapiens
taacttattaccactcatcatcatatactagcaggaatggcaatagtagtagtagtagcagcagcaatagtagaagtagtcataataacaataataataaatgatgataaagatgtttctgacaagaattagggtaagaacagtaattgaagccaattatttattacaaatgtattttgctttgggtactgtgataactactttttatactttatcccatttaattataaaaaccactcttgagaagtaatttttattttcagaaccattttacagatttaaaataaacaggtttgaggaattagtttaacttatccaaagtttcgtggctattaagttctagtatttggagtcaaatgcaagtctgtctaaatctagagcccatgttctttaactgcaacactataatgtctcaccccgtcctagtcccaccaattagtcaactcttttagggcagaagtctgtctaattcatctttgcttcctgttactttatatttaattaaaaattttagtgactttttaacttgtaaattgtagctgattttacatttatcttcctgaaggaaactctgtatcattttgtcttttgaatttgtgaatatacttgttaacacatctaaatatctttaagtctttggcaatgttattgtattatatgactaaataacttcgaattgttcaattgtgtatgtcttccactatgtcagagccacattcccgtcacattataaatgaaggagtggattcttaaataagacctaaccatatttatatgattcctaacataatatcatttggtagaaagaaaaccaactgtggtcatccagagaagctcaaaaactcttgtactcaggttctcttactaccacgttttgtttctgtttcttcttagtctgtgtcttagcatcacttaaagaactattcatccttttcttatcacagaatcttggggttgttcttctcatgtcatgtagtgtaaatttatatagaaaatgtaatacaatttatttagtacatacatttattattttaatgagaatgcctcaggaaaagactagtatttgggcaatatttgaagaaagaatttaacaggcactgatggggagaaagctagctgtaggtaatg

SEQ ID NO: 1447 - DNA, 1101 bp, Homo sapiens
gtagaaaaacgttacttaattagttgttttggagatgctttaaaattaagggaaggttgttacttacatattttcatgtttagtatttctatgaaatttgatagtgttgtttcttctaaatagcactaatattaggatattgactataaaatgctatcatgaaactatttttttgttacaccgtgctattttacaattaagtaaaaaactaacaaactcactattcttttaaaaggcttttttagaaaaatatattaaaaagtactcactatataaaatcagtaaatatattagaaatgtaaaccagggttagaacaacaaaatccactttgtagttgtgattacaaagaatatattcatatcaaggttctaaggtaaaaaataaataattttctacccataacttactgtagtacttgaatttattacaaatatatatccacagtaaaaaactcttagtatttatgtttatgttaatatatatttatgtattttcccttctccttcctctctactgcttttaattccttggaaaaaaatgagtattaaatgaattaggtttcagtttggaataaataagacaaaaataaaacttttctctaaaattccaaagtcatgggataattaagtgttaacatttatttggttagaaaaacatgaaggggcaaacgttcaaagtgaagtgcagtaaatccgctgtacttccattcatgctaatgggaggtagttggctaagttccctggacagagttccctggacagtgctttgaacacacccctaatatttaaaaaaaaagtttcagagaacgttaaaacatgaaatgtttttagattctccactccttttaaacacaacaaagaaaaaaaaataaaggcagtcaatctttttctctttctttttaaaaaacacacatacaagaagggtatgggaattatttgtttctggttgtaaagcccttgaatattaaacagaggcctacgaaaacaccgtaaaattatatggtgccaggtattgtcattgcagtatctatgaaatagttcaaaataagagtagttatcctatttaggaagaaaattaatatttttttacttccaaaattg

SEQ ID NO: 1448 - DNA, 1146 bp, Homo sapiens
tgccattgaattacttaatttaaaatactcaccttaatcctcttgaagagtaaaaatttttctgtttttttctctttgttttaataagctgcggattttatattcgtaatttattgagttgggcctctaaaattccagttttgtacttaactgacttatagattagtctcctaatgctctgctagtcaatggaccaaaataaaagaaataatttattacatattcttcctaaatctagtaccaccatacatgtataattctaaactgtaatatctcaataaagtaccttaattaaattttatgttcatcataacaatgaagtttctagcatatgtaatagtcttataaataagcatgcaaataactgctgtcaattagaattagtcagtttaaccttattaagtatcaaatggctattgtacatatgatgtgaaaaataaagtgaattttttttggctaataactaatctaaaattcagatgaagcattttaaagggaaaaagatactttaatgatttattataatttaatcattgcagaaactaaaagagaaagaatctgctttaaggttagcagaacaaaatatactgtcaagagacaaagtaatcaatgaactgaggcttcgattgcctgccactgcagaaagagaaaagctcatagctgagctaggcagaaaagagatggaaccaaaatctcaccacacattgaaaattgctcatcaaaccattgcaaacatgcaagcaaggttaaatcaaaaagaagaagtattaaagaagtatcaacgtcttctagaaaaagccagagaggtattttattatattatgagttatgctgttatccattagtttttttaagcaaatgctaaatattattttaccctaaagtggtatttcttttcttgctttcaaatgattctatttaagaattgttacttgcatgtgattggattacacctctgtcagtaaaactggaagtttgtgtacatgtatctttctattatacactgactaaaccacgagtagctatcatggtgaaatcatatgattttgaaaaatattttaattgagtttataggtgaggattgaggcaatagggtggaatgaaatatatcacaccggtaatcagtagaaatcagatttgttagaa

SEQ ID NO: 1449 - DNA, 1242 bp, Homo sapiens
aaaaaaaaagaatagtatcacttgaaggtagaccataataacttaaagatatatactataaaccctaaagtcacaactaaaaaatataatgaagtagggagtcatacataataagacagcaaatgagataaaatgagaaaaaaataacattataggtatagcaagtgtgaactttcacagtcaagaattaggttttccaaaaatatggtactcttgtctgctacttagctcatgggcccatcttaccttttcaaggaaccttagccacatgtaacttaaaatgcatactcttttaagcaaattcagtccatccaagtctttttcattccttcttccctgatgtgtccctgaattaatccttgttcctggggatattgttctgatgttattgagagcaagttcctgaaccagacccttgtgtctgatgttaactctatgttaactctgttattacttatctgccacaggctggttgcttaacctttttattttttggtgctttttcacctgtaaaaaagggggtaatagcagctactttgaaggattactgtgaagagtcaatagataacatatgtagatggtccgaaggtagtgagttatctcaattgattattcagtcaattacagatcaaactccttgtcctactctttccccattttcactactgcacttgatgtcttaacttaaaaaaataacatgtgaaagcacttagtacaatgctctttgcttgtcaagccctaaatgagtgacatttttattcttatctgtatatagtattctctgctctgctgcagccacataactgttgattttgcctttcgtcttcatgagatgccaccagctcagtcagtaactgcacacttcctttgtaggtttcagaaatatttttgcagtatttacaggctgggatgttccaggattcagtggcacagacttccagtccagcttcctggacacttcactccaccactgcttctctatcgctctgtcagaaacatccactcttcccaggccaaactctacaaagcaggatggaaattctaaccatgtttttctgggccaccaggacctgactttctaactttcaaactaatattttcgattggagctttttatttttattttttatttattttatttattttttttgagacggagtcttgctctgtcacccagcctggagtgcagtggcacaatctcatctcactgcaatctctgcctcctgggactacaggcaccca

SEQ ID NO: 1450 - DNA, 1132 bp, Homo sapiens
ttaggcacgttccaatttaattccaaaaatactctgtaattctacatctaaaaaaaccgattccctaattcgaatttattggtaccaaagctctctttggctatagacaattaagagttgaccttttaagttaatgtatatgcttaaaaacagttttaggaaaatatttggtagacaaagagtttcaactttaaatgttcactatgtcatttagtgtccaactttacggataggttgactatctaaataggcatttttagtcattaaaaaaaatctagtcaccaggaggatccctatgactcaaaataacttgtttgtaaaagaaaatttgtttacttacccattagtaagttcctgcatattcattataagatggcaaatcaaacttttctaggatgaagacagcttatttttaagttgtatagtcttagttggtttagggtctcaattttaattaataaaatacttggtttttatttgcttgtccttttgaattcctgttttaataattttaaaatgagcacaaagaacgttgaagttcagattaatctcttctgaatgatgtttttttcctctgtgatgagttgtttctgacttttttccttttgtatttgtaatgttgattaagatgtaaaataaaaagtgtgcctgattatttttgcaaatagattgtgattattttagcctatgggaacatactcctatgtatacatttataatggcaatggaagtaagttcagcttgcagttcttttacttatttgaaaattcagacagtggatatttaaaaagtcaaaattcccatattattttacaacgtgtcattaatcagcaagtattctgaaggggtgttagtaccattattttattaactactcatgagcaaactagaaatgatctgggatctctggggcccacttggaccactataaaaggaagcaatgggcacctggacatattagcaccaatttcactaccctgggtggaaaacaaaaatgtctgtcctctaaaccacatatcctcatatttccccggtccataaatgaaattcccttccaccagtggcctgtctcttcctctttagtgattcctaaatccctatacccctgtctctccttggccagacacactgc

SEQ ID NO: 1451 - DNA, 1132 bp, Homo sapiens; identical to SEQ ID NO: 1450

SEQ ID NO: 1452 - DNA, 1145 bp, Homo sapiens
catctgcccttaataccattgtgataattatgtaaagtggtatttctgaaggcactatgaaggaattgaagcttctcactgcatttaagagaacagtattttaatgaatgtacttttaagccataaaaattggtagatttaattttgaatgatttagtataaaagttaagtgaaaacaggaaaaggaaattaaaattaagttccactctgtattaggaaccaactataaacttcatacatcttatatcacttaattttggggtcataagtgctcctattttacagatgctgaagccaaggaccaaagcagttgggtaattgtcaaatttcacgtagctagtaactggcaggactgagattagaatccatgtcattctcaccccaggctcctttctaccttacttttctatatccttctttaaaatgttgatattagacaattgctttgtaattttattttagaatatcgcagtctgttttacattataaattaaacgttcttagagaaacgagatactagctactaaatgtttttctcttatagccaccagagaaagagggtggattacctcgtcacgttggtaataaaactgaatgtgccttgttgggacttcttttggatttaaaacgggattatcaggatgttagaaatgaaataccagaagaagcactgtacaaagtctacaccttcaattctgttaggaagtccatgagtactgtcctgaaaaattcagatggaagttatcgaatattcagcaagggtgcatctgagataattctgaaaaagtaagagtaaaatgcttggatgaataaattgctgactatagttgctttatggagtatctactgtgttgttattgttgttgtctttttgtgaacatcaggcatttgataggacctcagagttttttagcatattttatggtatccagatatttgcccctgctattctgccattttcacactctagcttctcttatttcttagcattttgttatagggaaaataagctcattacattcaatctggtatgtttaatgaagtatactttgatgtttatttttagaagtcgatttacttgttatttaatatgcagaatcttgaaaagcctcctgggaagaaaatcaagtttatgtctttctttc

SEQ ID NO: 1453 - DNA, 1172 bp, Homo sapiens
cactttattaataagacttttatacagaattactcttaatgataaatcttccaaaaaaaaaaaagatttgccatcattgaggatattttctttaaaaagtatcccagagtataaaggaaatttcaaaaaaggagagcaaatgttttaagcaatggcagcattattagaatgatttaagttaattcttggtagaaaaataaacatttattaggctatatatgttctggtatttattttgaaatatctgttattgctttatagtcataccacatagtaagcagcatataggacagagtttagagtatcttagctattcagtaaaagcttaccacaaagaatcctagcatacagaaagttcataactggggtttctgcacattttatgcctaaactatagaaaagtaaagcaattgataggaatttattcaaaagttgaattctaggtttgtgttaggattagtaggaattcaattcagaccattacaatttctgtatttacagtatcctacaatgacatttaatatttagaaaacatttgctaaacttttgatattcagaaaatatttgctaaacttctgtatacatgactttgtgtgtactatgtgtatgaggaaggataggagatgaaggtgaggatacaaaaggtatctcccttactagtttctaatatgtatgtttaaaatagacaaatggaagtctacaaatatatagcaagttaacaaatagataaggagtaagaagccgtattaaatatgggccagatgtggaataaggcagccccagagctgcaaattgggaatttagtgtttttaaattccctctcagaggcatgatggttgttagtgcatttgtctggggccagaaaggcaggccagatggaaacgccattttacagttcatttccaatgttttgtgagtgtggtaggttgggagacagagtgagtttatactcagctgctggaagacccaatttccttctgaatcaaagaaagtttaaattttatttcgtgtttacctgcattgtaaaattacatttctttggaaactgttaatttatgacactaggaaatcaggaccagattgccagtgaataattttttttagtatgagtgtcctaagtattgtataggacatacatgggattaaaaaattatttgttgattatctgaaat

SEQ ID NO: 1454 - DNA, 1217 bp, Homo sapiens
tacctttctacaataaccaggaatcttctgcttgtttgagccactcttgtcttattaccagatcactctgatcactacctctattacacatttattatctcactatagtcctttgaaccccatgtatatgactggttttccagtgtcgagtttccattcttactcaaaaactttggctggaaacattagagtcccagttctgctccggtccacctgcgtaaacttagactagcattgtttgaaataacactagattagataatttataatcgtatatctattgctaaaattttaaatttcaaaattatttaaaatcttaattgtgattttattgttgattaaaattaaaatatctgctccacttttttgggtgaggggatttctgtaaatacaacatgagctcatacgtttgagtgatttttgttaactgtatataaaaccaaagaaatatattgtgatttctggacctggtttcagttacattatctctatgttataatgtaaagttgcaagaaacaccaacctacagagagttgcattattcagatgtttctttaaagttttcctgagcttcatacccttgaattttctgtgcactaagatgtgaaatccctgagctttgtgacatttctgtgatcaagaaaaagaaaataacaagaaatcctatctaaggaaggaggcagaaacatcaaagcagataagtaaaggagaaacatccatatcccaaacatgtcgaccgatggtttttattgtcacaaaatagtgatatcaagcacattctttcagagcaaagtctaaagacagctacacaaaaatgaaagctgagtgggaaaacttaattggagatttgattgtgtccaatccctaacttttaatcttatttttcattgaactctgcacatacaacatacatatcaacaaatatatacacatacagatatataaccccgggtttgcttaactacagaatatgaagtaaataagaaccaggcaaccacttcacacttgccactagacacattatttgagtaagttgtgatggacactacgttgttcttatatgttaatcgggtcaaggccatctgatcttgattctaagagtacttagcagaaaaaagttatgtaagaggatcagtttgtttattttagccacataatggcaaacgtaagactaattttcttatttaattgataacagctaatcagtatttttggta

SEQ ID NO: 1455 - DNA, 1199 bp, Homo sapiens
gaaataccacctacggatgtgatgaggactaaatgagataagacagagcacttaaaaccacgcctgtctgggcatactgtaagcctcagtgactacagccatgattgtaatcagtgactgtatttccttactcttaaagcagagacaggagcaagctggtggaatcgccctcaatattaactcacattttttacctgataccatttccaatcttctgtgaaatcctatccagaccctgtactgactcccctggcaatttcaacaagaaatattctacctttcactgccaatttgttttggtagaggctgatctgcagtctgaacataaatgaaagggaatccacccgcaataataaagagtgagcctggcccatcatgatcagagactggcccctaacatgttgacacaacggctgaactatttgaacactggaatgaacaagttgcaacaactcctgcaagtctcaggaactaatgtacggacaacgacgcgcatttcactgacagagtcctgataatatattgcaggaaaacccacgggccagccgataacactcagcgttaatttgtttacccaaaaattagaggaaggagaagttggtgatttgcaaaaaaagaagttttggtaacaagcgtaacgttggtgtgtaattttcctaattgaattgccaaatttctacccaccactgatcttaatttataataatgcttccatctgtctcacctccagcataggaaatgggaagagggtggtctctgccttaacatggtaagaagaatatctgcaggtagtaggtaatctttaaattacatgtgtgatactgggaattgcatataagcaaataaggaagctcattacttttccagatttcaattaactgtatatttgtaaaaatgctttcagttagcaacattttgaatggtaaagggattgaaatttacctaaaagaaaaccttttataatggtttagcaaatttcaagattatctagggcagtctgcatggccctcagatcatagtgaattagtaatttcttgtgcagaaattgtcaaaaaacaggaggaagtcaggtgcctatctagaaacataaaaattgggaataacacaaaaaggaaaccttgacttcctactaggtatattaggcatttaatttaaaacttcatttactttttaaaaattaacacaatacatgttcacaa

SEQ ID NO: 1456 - DNA, 1196 bp, Homo sapiens
aaaatctgcataatgcaacaacacagttttcacacttcaaattttacatgaggggttcttcacgattctcctggaacccagtctagcaaaatgagaggaaaggccctagggagatttatttctgttaaatagttaactctgctgagtatgacaaatagtgtctactatctcaaccctccaaaatttgcagagtgttgggactgtcatttgtgattttttttttttttttttggtggggtagttgaataaaattgggcagctaaatttttcagttccatgtgcctcccaaataaaaaacagaaaataagtagtttttgtgaattgacttgcagacaaagtagaaactgtgctgcatgatgttattttgtaaacagatgacattttctgaccaggcacatgccatccaattttctgtcaatcacactgttgtataaagcagcagaactgaaggggaaaaatgattgttgtatacactgaattgctttgcatggtctcatttgagataattgatgtaagaatcctgacttttttatatttggaaacatcaaataaaaatggaaaaaatgatcatggctttaaaaaaaaaacaaaaacacacacacatgaactcagatttgcaaaccaggtttctgaaactttgggtaaggtgtatgcttttaactttgaaatgtataaacacccagcggaaacgtatacctttcagtgcatagtgcattgtgtgcttaccctgggttgtttaaacttgtgttcaaatattccccctccaagtgaaagcctgtcgggaattccacagtaacacctttactgttctcccattgatgatcatatacgttacctcttcctagcggtacatttgtatgatccttactactggaattaccgggttaaaaggaaatgcttaccactaagatgtcagtattctcctcatggatattttcagtctcaatgttgccagtctaatagtatagtatgtggttgctttactgctgttctccccacccccgtggagttgtgtcattattttaatgaatgtgagctcttgacttactctagaattctaatacagatactttctgcactagtatcacttttattattgcagttccatttaaaagcataactggctaagtcaccgccccacccgccgcattacatttcctaaaacatactgctgccaaagaccaactgtagaatcc

SEQ ID NO: 1457 - DNA, 1196 bp, Homo sapiens; identical to SEQ ID NO: 1456

SEQ ID NO: 1458 - DNA, 1966 bp, Homo sapiens
tcaagtgtgcatcacttctcctgttctgccaagacttcctcctctttgtttgcatttaatggacacagtcttagaaacattacagaataaaaaagcccagacatcttcagtcctttggtgattaaatgcacattagcaaatctatgtcttgtcctgattcactgtcataaagcatgagcagaggctagaagtatcatctggattgttgtgaaacgtttaaaagcagtggcccctccctgcttttattcatttcccccatcctggtttaagtataaagcactgtgaatgaaggtagttgtcaggttagctgcaggggtgtgggtgtttttattttattttattttattttatttttgaggggggaggtagtttaattttatgggctcctttcccccttttttggtgatctaattgcattggttaaaagcagctaaccaggtctttagaatatgctctagccaagtctaactttatttagacgctgtagatggacaagcttgattgttggaaccaaaatgggaacattaaacaaacatcacagccctcactaataacattgctgtcaagtgtagattccccccttcaaaaaaagcttgtgaccattttgtatggcttgtctggaaacttctgtaaatcttatgttttagtaaaatattttttgttattctactttgcctttgtacagtttattttactgtgtttatttcattttcccaatttgacaatcgtattttaaaattgaaactgatggaacattctttcttggtcttcaccatctgacaaattgaatggcaagaggtggattttgccagtttcttttcactgatgcagatttgtgttaagatagtactgaatggagtatttataaactggccctgagcatgcataaagcatcagtatctgacctttttttaaccttctaggaatttgaaataaatgtgtttgtgttgtctgattagatgatcattggtgtcttgccacaatgtttaaaaattactgtacaggaaagtcacagcaaagatagcagttgtgactgacatgtaggactttcacagttgtgccacatttttgcctaaaatttgggttatgacatttttcttggttcttatctgaaaatttcatctgtaacctttcatgtgtgttaagaaacactgatctgatcatttgggatttgctgaggcatttgtgagtcttccttataaacctgatgagcagatctcaactatctagcttgtgtgtcatcagaaaggtttatccctttgagagtatcaagtcctcagttaatgattcttgctttcatccctccagtatttgctgtgggagctcgttttattctttaatttggaattcagtaatttttcttctttattgacgaattcctcccctcacaaaactgttctttcccacctctctccatatctaattcctgattcttgttatttttaagtcataaatgtagccagtcataaatacataaatgttaaccttcgggttgcaaccttgtctcttgcagtttaaggtaatggatattgtagcccatttgaattttcttcactcttattctcgtaattctggagtttcttcagattgtggtgtattttattgtgctcctatgtaagatgaagaattaactattaaaattacattttcaacatacaaaagcttttgatgactggtaactggtatccttccaaataaatgcattgcttggtaacaaatgttagcttaattcagaatgaaatagttaacaaccctaatattgtaaaatttgaaaactgatagcagctgtcatttataacaattcttgggctgtttaaagggtacatttgactatagctaaggaaattgaatctcactttaaaaatgaaccacacaaaacttcaagaaacgaaatagaaatcaacatttactgcccgtaatattgctcatggttatagctagtatcacatagtgatttacaaaccat

SEQ ID NO: 1459 - DNA, 1138 bp, Homo sapiens
taaatgttatgatgtttcagttggcttctaggaaataattaaattagtgatattttaatcaggttttactatctgctaggccccttccatcaattcttattaaattctcaaaataatcctttgaaaagggagtataattacattttacagtgactcgaaccttacccaaacaagtgggagagccaggagccaaactatcaggctccaaagcttttttttagtgcatcacaatgacaaaggggtggttttctttcacccaagaatgtgctttcctggaaatttttctagatagaatattatgtaatttgttttgaaggttttttttcctgactgtcttaaagattatgctagctttagaacacatgcaaacagctgcagctctgtgattaaaatgttaaggtcactagaatagtgttaggaaaatgttaatagataattctgctgcctctattagcttatgtatgatccttaatagcattgcttccccttcagtttctatttaggaggtgaagaatcttttaataaggtagaaagttgctttatttaaatttgtactgtagaatgtttgtgatacagtatttgtaaaattgatatgaaaaataatttctcaaagtctattgtttgatctagttattttaataaaggaactctagaagtttcaagtggccagtgaagtgtgaggaatagagagtaaaggaaataattaataatggtgaccctctgttaagtggtttactttttccattaatataaatttcatttggaaagattaaaaaaacaagtttgattgaacttgataaatcagaaatatttaccagctttgtcgatggtgtattcttgaaaaatgtttggttttctttcaggttgacttatatccaaaattctacaaattcttagctatgttataaatgtagaaagaagtgaaaaatcaaaatatgattatgaagattttcttctcttccgagtacaaagctctgctaaataaggatttacccaagatgcccacatccacatacttatgtgtcagtgctttggagaattaactttgactttattctactggaagtatagattaacactgtgctttctgggattttgcttttcatgggttgctgatttttaattttgctaaataagc

SEQ ID NO: 1460 - DNA, 1099 bp, Homo sapiens
gtccacacaccttggcctcccaaagtgctgggtgggattataggtgtgagcctccatgcctggcctaaactgcatactcctaacatcagtatatagaaatattttctctttagttctattaaaattttaaaaaatctttatcaatttagtaggcaaagactggaaaatgttttaatttgatcagccactttaatgtatgtctcatttcaaagcatataaagtatacaagtttcaggtcctagcttaaacctataagaggccttattatgggcttatttcctttgcagccctttaccataatgtgtttcttctacctcccctgcacaacattgtttatatgccccctaaaatgtaacttctttagattctgttgttacgtgcaacactgtatatctctccatagcacttaatcagagtttgtaattaggcatctttttgtgtgattatttggtaaatgtccatatcccctactagcctataagctccatgacttctaggtaccctgtctgactacgtgtatcactgtttctaccgcctaacattgcctagcacattcattgcttcacaggcatctgaatatggttttataaaatacattgctctagtgcacaggattttaagctaaggatttcatgaatgggatttggggtaggggcatctatgaaattcctgaaattgtgtagaattttgagaatatgtgttttcctggggatagagtatgtagtttctcagcaactcattacagtctgtcacatcatgccctaattctacttgcctgtagctaaacacctaataacattagaactgaaatgatagtgatatgcaagatagcacgtgtggtttccacatattctaagaggcatcttcaattagattccaaaaatttttaagaaaaaaagatataatgtgccatcattttggatggttctgggcacttcaggtaaacccttactcaaagaatactttttcagtttcaatgtgtatttttaaaatttccagaagatgagttgaatatcagcccacaaacactggtagtaagcaaactattttatttgctaaaggcataaataaatgtctcctttgcttttaggcaaaggga

SEQ ID NO: 1461 - DNA, 1197 bp, Homo sapiens
ggctgaggcaggagaatcccttgaacccaggaggcagaggttgcagtgggccaagatcacaccactgcactccagtctgggtgataaaacgagattccgtctcaaaaaaaaaaaaaaaactgccaaaacgctttttgcaaagtggttgtaccattttatattctcaccaccatgaatgaaagttccaattgctatattcttgccctcatttgataatatttttagttttagccattctaatggatatatagtaataatttgatggttttaatttgcatttctctgatgatcaataacattaagttttgattcaggtacttgttgggcactcatatctttggtgaaatatctgttcaaatcatttgctcttttttttttcttagcacttaaaaaagactttttgccaggcacagtggcacatgcctgtagacctagctactcaggaggctaagacaggaggatcacttgagtccagaagttctgggttgtagtgagctatgtcaatcaggtgtttgcactaagttcagcataaatgtagtgacctcctgggtcactgggacccagagttgcctaaggagcgtcagaagtggagcaggtcaaaactcctgtgctgatcagtagtgggatcacacctgtgaatagccactgcactgcagcctgggcaacatagtgagatcctcatctcctgaaaaaaaaaaaaaactttagtttttaaaagtagttttaggttctgagcaaaattgagaggagggtacagaaataacttatatatcctcagtgctcccctcccccatgcctccctcatcaccatcccccagcagagtggcacattggttacaattgataaacctacactgacacatcattatcacccaaagcctattgtttccattagggttcactcttggtgctgtacaatctatgggtttgaacaaaggtacaatgacatgtatccatctttatagtcatgcagagtctacactgtcctaaaaacccttggctctgcctcttcgtcgtgtcctccccactgacccccggctaccactggtcttttcactgtctccgtaagtttttcctttttcagaacgccatatagttggaatcataaagtatatatagccttttcacattggtttctttcactggataatatgcatttgtttcctctatgtcttttcacagtttgatagctcattt

SEQ ID NO: 1462 - DNA, 1176 bp, Homo sapiens
tctggacagtgctagatgccattgatcagatgtggctgccagtggtgaggacttggcgcctcaatgagcggcactatgggggtctaaccggtctcaataaagcagaaactgctgcaaagcatggtgaggcccaggtgaagatctggaggcgctcctatgatgtcccaccacctccgatggagcccgaccatcctttctacagcaacatcagtaaggatcgtaggtatgcagacctcacagaagatcagctaccctcctgtgagagtctgaaggatactattgccagagctctgcccttctggaatgaagaaatagttccccagatcaaggaggggaaacgtgtactgattgcagcccatggcaacagcctccggggcattgtcaagcatctggagggtctctctgaagaggctatcatggagctgaacctgccgactggtattcccattgtctatgaattggacaagaacttgaagcctatcaagcccatgcagtttctgggggatgaagagacggtgcgcaaagccatggaagctgtggctgcccagggcaaggccaagaagtgaaggccggcggggaggatactgtccccaggagcaccctccctgcccgtcttgtccctctgcccctcccacctgcacatgtcacactgaccacatctgtagacatcttgagttgtagctgcagatggggaccagtggctcccattttcattttagccattttgtcgcctgcacccactcccttcatacaatctagtcagaatagcagttctagagcacaggttctcagtctaagctatggaaaagctccccttatccaacagagtttaaaagtagtgacttgggtttttgcgagtgctttgtttactaaggactttggggaggaaccatgctaagccatgaccagtgaggagaagcaacagagcctgtctgtccccatgagcggagtctgtcctctgctcttctgcagtcaggccactgcctactgcctgggggctctagtcattccagtggaagacgaatgtaacctgcgtggtgatgtgacaactgtttcctccctgaccccagaggatctggctctaggttgggatcaatcctgaatttcgttatgtgttaatttacttttattaaaaaagtatagtatatataaataatacaaaacaataacccttct

SEQ ID NO: 1463 - DNA, 1209 bp, Homo sapiens
catatctgcttcactgggcaccccaagcccagtaacactgtggttcttgtagactcatagaagtactgccttgatggccatgggacaagatctgggagaagtatctggagaaccaggcagagactcttgttctcttcccgtacttaaccaaacaaacagtctctccttgttcagagccacctaaagctggggtgtagcgacacaagaacctctgtggctaccaccactatgactgctgtggatcacacctgaagccagcacagcactggatttcaccaaaggcctgatgtaaccactactgcctatgtaaccactacgtggctattgcccatgttcactcaaagccctagggctcttcgatcacttgatgccaaaaccagccaggcctgtgaccttcccttcagggtggcaaagtcccccagacaccaggtgggtccagaggtgctgtacaggagtcagggaatacagtcaaaaaccttagaagtctatctggtattctgttgtactgcagctgagctggcactcaaaccacaaggtgcagatcagtgcacaagatgcagtccttcctcctcttcctttccccttccaaaggcagaggaggctcactctgtagccactgccactccaggccataaggagtactgccagactaccacctatgttttcttaaggctcaagggctcttaagtcagcttatggtgaatgctgcctggcctgggattcactctttagggccatgtgctcccctctggcccaggacaggtccagaaatgccatccaagagtcaagtcctggagttgagggctccaagagcctgcttggtgctctatccccctgtggctgtgctagtacctaagttgcaagacagagttccctttgcttttccctctgcttttctcaagcagaaggagttttgtcccacagccaccacaactggtaatgtcctgagtctcacctgaagccagccagtctcagaggcccacccaaggcccccaacatattacccgagtgttgctactggttattcagggcccaagggctcttcagttagtaggtgatgaatgctgccaggactgggtcctttccttcaagtaaggaaagtacaggagtaagtatgggaagagaacaagagtctctgcctggtaatccagataattctcccagattttgtccaagaccattaaggcaatacctctacgagtctgcaag

SEQ ID NO: 1464 - DNA, 1177 bp, Homo sapiens
acaggcgtgagccagcacgcccagccgtacaattcttaatatttcttttatgctcccttacagatttgttagtgccaaaatactttttttattttttagtgccaaaatacttaaaatatttcaggtaaaaggaaattcttagctcacctccatcaaaatatttacttgagtcaagagtaggaataggactgcaagagctctccttttatgtatccaagtcatccagttctcttagagattggagcagctctatgttagaccaagggtctaaaggaaaaacagtttgtttatttaaattgaacatgaagagtttctgtacttgtcagaagccctttgggagaacaagaagcaaaaatttctcctgaaaactcatatctgaaaacagattttaggaagcctatgatcagggtttctctcaaccatgtttgttttttaaacagggtcccctcttgtcacccaagctgggggtacggtggtggcacagtaatggcttgctgcagcctcgtcctctcaggctccagggatcctctcacctcagcctcccaagaagctagggctgcaggcacgtgacactgtgcctggctaatttttcctatttttgtagagaccgagtttcattgtgttacccagctggtctcgaactcctgggctcaagtgaccctcccacctcagccttccagattgctggggttatgtgcatgagcctccctacctagctgggatctgatttttttttttttttttttttttgagacggagtcttgctctgttaccccgtctggagtgcagtgtcccgatctcggctcactgcagcctccgcctcctgggttcacgccattctcctgcctcagcctcccaagtagctgggattacaggcgcccgccaccacgcccggctaattttttgtatttttagtagagacagggtttcaccatgttagccaggatggtctcaatcgcctgacctcatgatccgcctgcctcagcctcccagagtgctgggattacaggcgtgagccactgcgcccggccgggatctgattttatataacctataagattatttgtcctgtttatgcaagatttgttatatatttgtcacttgatgctttaaggcgctctaaatacttaggctcggaaatcaaatttcatctaccacttactagctatataacatt

SEQ ID NO: 1465 - DNA, 1167 bp, Homo sapiens
gctggcacggctacagctgtcaccagattttaccttcactgctggccttgctgcagaagtggctgctagatctctctcctttaccaccatgcaggaacagacttttggtggtgaggaggaagaacaaataatagaagaaaataaaaatgagatagaagaaaagtaagaaccaagattcatatgaagtgatattagattgttccttttacaaaagtgtttagcttcaagactggaaagggaatatgagtgtaagtttactatatataaagctaagatgtggatttacaggaagaaccctggtttgaataactgatctgaaattagtagttacctgtaaatggcagatcttttaggaaaataagagaaaggtaagggctcttttgaataaactgctgttttatttgtggcacaactgatcaatcttggaaattctttaagtatttttaataagaaatgaattatcatttcttgccagaatttgctaccttaaggtgattgggaaaattctgttgcaagaacattaacatttagtatgactcctttttactgtattcttgcagttaataactgcagctattatgttaataacaagttgtttgtattttatttttgtttataccagtcttaaagatccaggttctgaataaaaaaattaattgatacaattgatgtgtgctggggtttggaactaaaagtagtttcaacagtgcgtgggttatgacatttcttatgtttctttgttcatgtgtgtatttagtagttaattttaagatgtcctagtgatctttaaaagaaaaatattgtaccattttttagaattacactttcacctttctttttgcaattgaaagtgatgatgtcaaagtgggatttctgtactccaaggccccacccccaatttagcaagcagaaaaacgttccttgtatcactttaccttggataattgggtgccattaacacaaacaggtcacaatcctgctgttttctagccctgtccaccataatgagattcaggaaacatcctgtcagcctcctggaaagcatccttgtctccttagtatttcatttacaaactacctcttaacagagactgcttttcaaattggccaatcttacctgttttgtgttgtgattgcattttcaaagagtaattattttcagcatat

SEQ ID NO: 1466 - DNA, 1199 bp, Homo sapiens
cacagctctgcctggcccattggcttatggcaatgatcaagcataccttcaggttatgacatcactgctagaccaagccacccaatctcatcaatttttccaccaaaattagagaaacttacctaaacaattttaacttactcagaggctggctaaacaaattatcctacaatgtgcccagattgccagctcacagggatgtcccctccttcaacaggtgttaaccctagaggatcagaagctaatcatttgtggcaaacagatgttacacacatctctgaatttaggaaactaagataggtgcatgtatccattgatactgagaggtgaagccagctggacttcctgggtcgagtggggacttagagaacttttctgtcttacaagaggattgtaaaatgcaccaatcagcactctgtagctaggattgtaaaacgcaccaatcagtgctctgtagctagcaagaggattgtaaaatataccaatcagtgctctgtaaaatgcaccaatcagcactttttaaaacgtaccaatcagcactctgtaaaatgcaccaatcagcaggagtctaaaagtagctaatcacggggaggattgaagaaagggcactctgatgggacagaaacagaacatgggaggggacaaataagggaataaagctggctaccccagccagcagtggtaatccacttggattcccttccatggtgtggaagctttgttcttttgttctacgcgataaaccttgctgctgcttactctttgggtctgtgccacctttaagagctgtaacactcaccgtgaaggtccgcagcttcattcttgaagtcagtgagaccaccaacccaccagcaggaatcaactcctgacacaataccaacactcatttaattagtgcacatgctttgcctggagagtctactcgatatgtcactaaacatcttcttttaacttttgcatttatggggcaacccacaaaaattaagactgataatggtccagcttaccagctcacaatttcaacaattttgtcacatgtggaatatccagcattccacaggcatcccatataacccccaaggacaggcaatagtagaatgagcacatttcacccttaaaaatatgctcaaaaaaatggaaaaaaggaaatataggtaagtacactgcgacactactggcataagctttatttaacctta

SEQ ID NO: 1467 - DNA, 1231 bp, Homo sapiens
attatacattctggcttttgattgttgaaagagcaacaataaaagtttttggacttcaactactaggacacagctaaggtctgggcttttcttaatgagggaaatcagttcgtaactcttttgccaacagttaattttggattttctcctcttaggcttccaagaacaaaacacttgttaaatgtcatcaatgaaaactttggaacccttgccttctgccgcagatggctggatcgcttgggagaaagtaaatacttgatggctctgaagaatctgtgtgacttgggcattgtagatccatatccaccattatgtgacattaaaggatcatatacagcgcaatttgaacataccatcctgttgcgtccaacatgtaaagaagttgtcagcagaggagatgactattaaacttagtccaaagccacctcaacacctttattttctgagctttgttggaaaacatgataccagaattaatttgccacatgttgtctgttttaacagtggacccatgtaatacttttatccatgtttaaaaaagaaggaatttggacaaaggcaaaccgtctaatgtaattaaccaacgaaaaagctttccggacttttaaatgctaactgtttttccccttcctgtctaggaaaatgctataaagctcaaattagttaggaatgacttatacgttttgttttgaatacctaagagatactttttggatatttatattgccatattcttacttgaatgctttgaatgactacatccagttctgcacctataccctctggtgttgctttttaaccttcctggaatccattttctaaaaaataaagacattttcagatctgagagctacatctcaatgtctgtggttataattctggacaggataaatagctaaacttaatgtaggcaaatgcagagacatttatctgaaatgtagacctctacactgagacttttctggcatagtggctaaaacaagatctacacatgcataaaaagggacaatcaccttttcttcataaatatacagctttaggaatatttcaccattctttgtaggacatagtagtccttgtctttttttctcctgacattggaaagatgtgctaattgaaacttgacttagtaggaacattgtgccaactcaaaaccttgatttagtaaaaatctcaatgtttagatcctttgtccagtggtggtgtttatcagggaatgtattcagcttgc

SEQ ID NO: 1468 - DNA, 1178 bp, Homo sapiens
acaagtttccctgacagaccaccaaataaacaatggtcttttaaaaacaaatcaactttggtaccatctactcagctggcatttaccttccttacctgctaccaacctcattcttagaattaaagaaaaaaggcgaattctaaagccccttctactcactttcctccactaaggccatagcttacatctgctgctcttttttccatactccttttttctcaactcctttctttcatatttgccagaaatttaaggtcgtttgggttcctctcatttaaaaagttcaactgaagtgtgttgctacaccttaatcaaaagtttatggctgagttatttagcgtttctttacccacttcctctgctcaatccttcatctcctcataaccattgaaatgaatgctatgaatatctcaatgcttagcatggtgccaggcatttaggtgttgaaaaaaatgttaagcgaatattagttattaggtaagagcattgtctgtaaaactctgaaaagtcttaaaagtgattcctaaaatttcacaagctcataaattctttagtctgcaattatgattcctgaaatattcttcgattcatgaaagactggactaggaaattctaaaaatcgacataaagcataaaaagccactctgaggtttatgaaatttacaatgttttgtcttcttttaattcattcgtacttttctctcaggatacaaagggcaaaactgtttgtgtagtaactcagaattgagtagttacacatccattaggtttcagaatcgttaaaattttatctggtttaggaaactgcttaccttggaagggcaaattgccatttctctccatctggggatcagggaagcaagggaagcccccctaaacatcacttccacgctcctatattatgctaaggaacttctggttgattcattaggcatttcagcagtgtttttggccggtactaggaactgtggagaggtatagaaagggagcaagtgcacagtcccggcccccaaagaggttacgatgcaaatagaagcaggctcagaactcggaacaaaagcagtgactgcataataatgcactgctgggggtgggggatggggatctgcacgcccggtttgtgacttcaggaaagcagtttccaggaggtgagagtttaagccaaacctgaaagaggt

SEQ ID NO: 1469 - DNA, 1183 bp, Homo sapiens
atttattgaatacttactatgtgccagccactgtcctgggatacatacgtgaccgcctacatgaagtttttggtctggactgggaagatagtaaatcactaaaccactacaaatataatgtcagatggtgataagtactaagaacagaaaccaggcagagccattataaggaccttgcatcttgttctgaggagaatgggaggtcttcaggtgggggtggtttaagcaagggagtgacacgatccaatctctgtttatagagaaccactctggctactggctagaccatgagctgcagaggccaaatgtctgctgaattattaccctctcccccacagttatatttcactgaggacaggtctgtaccagtagaccttggacatgtgacacagtcgattctttccttttcatacttttggtatgaaattgatctctaaggtgatacttttatatccaaaaagagagagttatatttttaggcaaggtaaatcagatatcacctctctgcctacagtgtcccagtggcttccgctacagtcagcataactctactgtgacttccacagggctccattcatgtctatctcacacctgctctctgtccgcctctccagccactctctctttgttcactggtctccagtcacactgacttcgttgttcttccttgagcaagccaagcttgactctgcctcaaagcctttaagcttgctcttccctcgcccagaatgctcttcctggcaagatctttgtatggctgcctttatctcaagggtcaggtctctgctggtcactcaatgtatacttctgtgtacaaacaggcagcacatctgctccttagaataacagggcggctctgtcccaggtgtgctcaaggtctaaaaacttcttgttatcttatcgttcacagatgacataaggcataaatcaaacagggactacattaggcaaacaattcagggtttgcgcacagtcctataaacgcatggtattttctttctccttacaggttattttcaaagctttgtcaccaccatacgatacagagaacccttacagtgccaaagttcaggagcagctgaagatcaccaaccttcgcgtgcagctgctgaaacgacagtcttgtccctgtcagagaaatgacctgaacgaagagcctcaacattttacacactatgcaatc

SEQ ID NO: 1470 - DNA, 1174 bp, Homo sapiens
taaaggggtgttggttgcattttctttgaaatggcttctggaagacctttatttccaggatcaaccgtggaagatgaactgcacttaattttccgactgctaggtaacagaagaaatcttttcccagtgattttgcacccataattgactagctggataagactgtatctctaaaatacatattttaaaattagatactgagactaacataaacagctgttagttagaataattagaatggacactatgaagatagatccttctaggtaacttcatctgctaagttttatctttgcaataaagattttatggaaaaacagaacataattagtatggaaaattggatgtcaccatattattaaggaatattgctaacttttttggtatcaactggatagaaaaaggaccaggcatcctttttacagtatcattgcaaagtccaaacaaaaagtccatgtacgtttatttctgtcatttcaattgcagttgaaatagttaagtcatctggtaaatgtaaattattctctaagacactttgttatatatatgtgtatataatttttatatataaattttatatatatttataaatatatttaatttttttttttaattcaggaactccatctcaggaaacttggccaggtatttcttcaaatgaggagttcaagaactacaactttccaaaatataaaccacagcctctaattaaccacgcacccaggtatttttttttcttatgtgaaaggggggaaaacacatgattcttttcaatcttttgaaggattagccacagtaaggattcaggaaaaaatacataatacacataacccttacgtattttaggatcttatttaattttgaactgtatatgttttagaattctagagtttatgtagttacttttcccagaaagaagacattgattaatgccttattccgtaccacagagattatgatgaaattcctgttttgctttctacagaattattctgtatttacttaacaaaaacctaagaaagggttatgtaagtaaaatcttgactctataacacaaggtaacctatcagtattttgaccagtgttaatgatgtaattcatatttgaagaatataaactctgtccaattccttagcaaaatgtaacatctaaatgtcagccattcatttaagtt

SEQ ID NO: 1471 - DNA, 1245 bp, Homo sapiens
aggctgaggcgggagaatcacttgagccttggaggtggaggttgtagtgagcccagatcgcaacactgcactccagcctaggggacagagcgagacttcctctcaaaaaaaaaagacttatgaattgtttgaagaggcacgagaccgtggcaaccctaactgtccccgacatctggcagccatatgctatccttgaacttgaacttcagagtgaaagtataaatttgtaaggggaaggctcagccgcaagtcacataccagtggtcagttaaaaaaaaaaaactcaggacggcaacctaaatcatttagaacgcgtcaagagcctcggaaaaactattttcacacacttctctagcactaacatgggaagcgcgtttccttcacatattccacaccttttattcttcccaccaacatcaagaatacaaagcgcccagagaggacaataagcctaagcagcggctccaagagaccggactttcgtacttcccgggggcaggcggaaggttacggagcgctggaaggatcttactgctccttgaagggctgtctgagaaaatacacagcctaacgactcctcgttagtatagtggttagtatccccgcctgtcacgcgggagaccggggttcaattccccgacggggaggtgtgtagctgcacttttttggcgacagttattattttctgtatcattcaatgacaggacactgctgttaaacataatatgctaaaccagctcccttaagtgcacaaccctgtcttcaaaatggtgacttttaaccttaatgcccaccatgaagtgaaagcctcccctgagagaaaatgccttacattgtttgcaggaagggaggaaagggaaaaagaaaacgctctgaaggcctctgcccttgcctccagccgccatcttgcgaaggcctgcgccggcttagtggcgccccgccagattacaactcgaggtcgcgaactcagcgcgcggaacctgttgggggaggggagagagggcggagtctcgcgactaacggggcgggggcagggcgggtaagaacggaaatcatttggtaaagaaaaggaagggccaatttcctttgatcctggagacccgactaaacgggaagccccgttctcccgcttccgctggttacgtcccagccttggttagaggactagcagtcaggaaagtttggacgctgaaggaatcggtctcctggtccgacagatactgggtggaggggcagagagtaaat

SEQ ID NO: 1472 - DNA, 1356 bp, Homo sapiens
cggcgcgttcgtaggcgatcgaccccagagacgaaagctgcttctcaagctgggggagggagaggaaacggcgcacaaaagcagtacgacctgtcccttatcggcgtctaaggggaagggtggagaaaacgaaaacagaagcgggccgggagcctcggctcccgccccagcgccttttaaactgcgtttctacctcctctcgctcagcgcggcggctaatggaacccgcgcgagccgtctcgccaatcaccgccgcgcttcctcccgtcgcccgccaatggcggcgcgcgttcttggggcgtgggcgaagcaggctgctcgcctcctgcctgtagtgtgtgggctggggttggtgcgagcttccagcttggccgcagttggttcgtagttcggctctggggtcttttgtgtccgggtctggcttggctttgtgtccgcgagtttttgttccgctccgcagcgctcttcccgggcaggagccgtgaggctcggaggcggcagcgcggtccccggccaggagcaagcgcgccggcgtgagcggcggcggcaaaggctgtggggagggggcttcgcagatccccgagatgccggagttcctggaagacccctcggtcctgacaaaagacaagttgaagagtgagttggtcgccaacaatgtgacgctgccggccggggagcagcgcaaagacgtgtacgtccagctctacctgcagcacctcacggctcgcaaccggccgccgctccccgccggcaccaacagcaaggggcccccggacttctccagtgacgaagagcgcgagcccaccccggtcctcggctctggggccgccgccgcgggccggagccgagcagccgtcggcagggtaaggacgcggggccggggctacaaaggcgggcgtttggcggttgccgcgcgcgctcgccgccgtttgcagcccctccctcccgggcgccccctcgggcctcccaggtgcggggctgtccctgcgccccctcgcgtcgccccttccccgcggggctgcaggcgccggagcggagaggccagaagttggggccgcggggttcgcgttctttgacgtgtgggtctgggaggtgtggagttgcgttggcggcggttgttttgcacgcagtcgacgccgcttccctggaccaccagccgcctgcagcgggcgtttagacggggacttccgtgccctttcgaaagctctggaggggtggccccaaaatgctataggttaagttcgagcgttttcccgctttattaactgaaatgactcgcagcagagtctcagagcgctccctggagggcaactgatgacactctaatttctaaccaaaatttgaaatgaggaaatt

SEQ ID NO: 1473 - DNA, 1343 bp, Homo sapiens
ttatttattcatgtctgcaacatcaatcatagtagtctagatcaatgcaactcaaagcaccagtctacaaactgttacttatccacaggcaagataagcatgcacaagaatttaaatctagagatactttttaggtcaatgacaggatttgattttttagcaaaattttattaatagctaaagcaatgtattgatttacactctgatgcaagtaatttatctcttcattgactggtagcaaccaattcatggaccagtaccatggaccacactttgagaaacacttctttggataataatagatatcctgggatagtgcatgttcaccatctattttgtcagataatggggccttttaaaaaataatactttgctttcatgatatattgtattttgtggaaagttaagtttagcaatatagactctaaaagcaaattaaatttttttaagccataagaaattatactatatcccagtatctgtatgtctgtataaagcagtgtattatcatgttttcatttctgtgattgtaagttaagagtcttaactgcagaggtattgtggaaagtagtagccttaagcataataaaatatggtctcttgggtactccctctggccattaccacattcttagattatatgtgtccatctttgcagctttctgagagtaattttatttgttgtcttctgaaatgtacatgtatacatgtacctactgagtgctatgtgatttttaaaaatgtattactgtagaatgcttctgcaaattcaataaagttgttaaatttgaacagtgttgtgtggtctccagaaacatgttgttctgtgtgctttattcttggagttgcaacaagttaaatatttgtatatgaacaccccttttccatttcatcattgaaactcactttgacatttcagtggtataattgaaaatattctgattatggtatggtttttcttctgtttgaggaccatgtttttattgactgttggaatctaaatttataagaggaattaatctgtaaccagataccttattcgtttaaccgatttctattccactactaatggttttttttactttgtgctttctagttcttagattctgagttaacaaagcataaaatagattttatattgctgggggttgtaccaaacatagatacattgacagatccattgatagaagtgttgggagatggacttgaaatcttagtcctaaataaagactgaactgtttaaactaacttgataaaaatcactgttcgtttttgggaacctgcaagtattaaatagattctgtactaactagtattaacactggaaagttagcaagacacat

SEQ ID NO: 1474 - DNA, 1249 bp, Homo sapiens
gtggaagcgctgaggccctgtgtcccttcgtgacctccgtgtgcccgagggaagagaggccgtgactagctctttctccgccgtgagctcgcttggtcagcaaactaagtactgggtaaactctcctcccgaaactactgaccacccacagttctactaactatattacctgtcctttgatttgcccttagttttcttaaaaatagtcctttcctaagttttatatttgtcgacgccaggtcagtcatttttgcacttaattgtatatgagataactagatgtcctgttttcgtgcgactggaggaggcagcttgcagccctacataggcaatagaaaggagataattggtgggcgtccctttggtgtgattatctcttgggattcttggtggttgggcccagctttaacttagttgtgtgtgttttaaatcctagtgaagtatgtacatacagagaaacctgaaaaccgaattgtaggagtcctaagaatgttatctaccttgtgcctgtaaaatcgaaagatttttttctttaaatcattcatgtgcttctgttgtctttagtatggatagagtccttatttacactatctgtcgttcagtttaaaagttaaagctaacattatttgtgtattaaatgtatttgactgcaggaatttgtgcgtatccgtttttatgttacaggagttcttaagtggggatagtattggttagtggctgggataaactttgaagttgtttgcaagccttttacatgtcgagtgatctttctgagtttcgtttgtactctgaagtgtgctcttaccagtggttaataatttgaagtttgactttaattgtaaaagccgttaatgtagaaaacttttaaaaaaattaatatggcagaatacgagctattaatagtatcagatacagaaccctcataatttttaaatgatctgaatttggcagtgaatttttttttaagccacttaattgtggccaaagctattcagctgtgataatagtatctcacagggaaacattttctttcattccagtggccttagtcatctctgaagaaatacttacttgatttttttttttccaatcaaacagagcagtatagctgtgactatggatctggcagattctttatcctttgtggacttggaggaattattagctgtggcacaacacatacagcattggttcctctagatctggttaaatgcagaatgcaggtttgttttgcatgctggactagagc

SEQ ID NO: 1475 - DNA, 1343 bp, Homo sapiens
ggagtgcaatggcactatctcagctcactgcaacctccgcctcccaggttcaagtgattgtcctgcctcagcctgctgaatagctgggattacaggcatgcaccaccacgcctggctaattttgtatttttagtagagactccatgttggtcaggctggtctcgaactcctgacctcaggtgatccacccgcctcggcctcccaaagtgctgggattacaggcgtgagacaccgcgtctggctgtgaacttcattttttagtattaagcctaccagactttttaaaaagactattataacatttaatgtctatttacctgtatgtagaacataaacttgagaggtaaagataagttaatacatggtttgagccctggactgagttttttttttttccctagagtaaggaccatttgtcggtctacaaatgacttgatgtttggcctaaacatttactattaacttttagggagggcttgttagtatccttgtgatctattcacagttaagaatttccatgaccacaacatgcttccttagatccacctttgtggatgaatcttgaactgagttccacttgtaaacttcttgtttcttgtggttccagtagtcaaagaaacatccagcaacttttttggttgtatagtcaaaggtgcttgagtcattggcatgtaagagaaatatacctgcatgttagtctaacgttctgatagaaatgacatgcatttatgctgccatttgttactatcaggactcgactcgtgtgcggacatttctgttaataatgacagtctctgatagatgagtgtatgcaactgtgtaaaacaagtctcttgatttcctagattctacaagggggttgctcctctctggatgagacagataccatacaccatgatgaagttcgcctgctttgaacgtactgttgaagcactgtacaagtttgtggttcctaagccccgcagtgaatgttcaaagccagagcagctggttgtaacatttgtagcaggttacataggtacgaattacttagaacacacttgtctgaaattatgaacaaataatcatttccattattggcgttttttgagagggaaaaatactccaaaggttataaagcagtgtttttgtttttttggtttccctgaggcatagtctcgctctgttgcccaggctggagtgcagtggcatgataatagctcactgcaacctcctcctcctgggttcaagtgattcttctgccgcagcctcccaagtagctgggacgggcatgcaccgccatgcccggctgatttttgtttttgttttttgtttttttttgagatggagttttacccttgttg

SEQ ID NO: 1476 - DNA, 1343 bp, Homo sapiens; identical to SEQ ID NO: 1475

SEQ ID NO: 1477 - DNA, 1150 bp, Homo sapiens
tagaaaaatgtgatacagaaaacactgctggccaccagggaagcttcagattttctcttcagtgagagtcctaatatcagtacaaatatcagttctggccccccaggtggcagctcaggttcaagaagactagattcatattgggtgggtgcaggaatggccctggcttaaaagcctcctgccccataagagacgatatctcctgcaacaactccatagacttatcctccatggtccctacaagggacctaattacacgagtcattactcagggaagtccaaagtatcacatccccatcatgtatttatagttcatgtataggccctcctagtccagatgcaatttaccaaccaggcatcatttttactgtaagcagtgtgttacctagcaacagagttgacctcctgtttccagataaggtgtcaaagtagcctaaaggaagaggcaaaatctgagcatgaatctttcagatatgtgggattttaattgataaggaaaggaaaatgcatttcagatctatggccataccaacctgaacgtgcccgatctcgtctgatctcggaagctaagcaagttcgggtctggttagtacttggatgggaaaaggcatttcaggaggccccaggaaccatataaaaacaaatttggttcaggcaacaaattgctggaagtatgagggaaatagacatttaaaatccaatgggatttgtacaacaatgcaaatgtacttcatgccactgaaatatacacctaaaaatggcgatgatggtaagttttatgttatgtgtatttcataacatattcatgcaattcaaaaaataattttaaaaagaggaagaaaattcaaggtgattaaaacaattgagaagtgtgtagtcagagataaagcagaaaaagtaggttgggtcagtgtgtgtcaggctgaggaatttgaaatttattctgtaggcactggggaatggacatgactggactactttaggccagttaattctagaggcagtgtacaagtgggattagaaggagggaaagttgaagttgggtcatctgtttgcaaaaagactgtggggcagattggaggcaggtggcagatgaactgtaatagatacacctggatatttgagattgtcctaggttttgtactctcct

SEQ ID NO: 1478 - DNA, 1206 bp, Homo sapiens
attgttttttctaattctgtgaaaaatgatgttagtactttgagaagaattgtgttgaatttgtagattgctttgggcagtatggtcattttcacagtatagattcttccagtccacgagtatgggatatatttccatttgcttatgtcatctatgattttccacagtgttttgtagttctccatgtggagatctttcaactccttggttaggtatattcctacatttttttttttttttttttttttttttttgtagtagcagtagttattgtaaaagggattgagttcctgatttgattatcagcgtggtttttgttggtttgtagcagtgctactaatttgtgtacgttgattttgtaacctaaaccttactgaatttatttattagatctaagagccttttggaggcaaaacttggcatttttagtacagggtatatcaacattatgtatttgatgtttcctacattttatattaatggccgaacttttgtatttgtcttgaatatttacaaaatgattgctcagaattttaggattaaacaggttgttaagctcttcatttaaattatgatattaagatttgttttaaggattgttaaaaaaaaaaagatacttaaaagaacctgaaattggccaggcatggtggtgcgtgcctgtaatcccagcaccttgagaggccgagttgggtggatcatttgaggccaggagttagagaccagtctagccaccatatcaaaacactgtctctactaaaaatacaaaaattagccgggcgtggtggcacttgattgtaatctcagctactgggaggctgaggcacgagaattgcttgaacccaggaggtggaggttgcagtgagccgatatcgtgccactgcactccagtctgggcaacagaaagagactctgtctcaaaaaaaaaaaaaaaaaagaaaaaaagaacttacaatttctattcaaaagatgtctgaggagatatagctagtaataatttcttaaataaaatgggtacatctggtttcaaaagtatgagtgagttgcttagtttattttgtagtttaagaaaagtgattttatataatttggtgtgtctgtcctatattaatataacacctgtattgattactgtttacattattttcttcttaatgattgatcttaaattaaaaatttttcatttgtagatcccatggacaaaactga

SEQ ID NO: 1479 - DNA, 1185 bp, Homo sapiens
ttgtgaggattaaatgggattgttagcatggtggctggtgaagcactcaataaaggttcaaaccgtggtagtaataacggtaaaacaatagcaatattacgtaatccctctgggcctctgttagccagctgtaaattcaatctctttccctgtcccttcacgcttactaagttcttttaaaaacaaatgagactgactgggcgcggtggctcatacttggaatcccgcactttgggaggcctaggcgggcgaatcatgaggtcaggagtttgagactagcctggccaacacagtgaaaccctatctctactaaaaatacaaaaattagctgggtgtggtggtgggcacctgtaaattccagctactcaggaggctgaggcaggagaatcgcttgaacctgggaggccgaggttgcagtgagctgagatcatgacactgcatttccacctaggtgacggagctggactccatctcaaaacaaacaaacaaacaacaacaaaaaaaaaaacaaatgagaccatgggcttggaaatgccttgaaaaaatgtcaagtgtgattcagagtgaggaagtattactgtggaatagttactgtagctattgttaccggtcggccaactgctcctctgcctgctatatcctgacttaaccttggtctgtatttgccgtacaacaaggagttaaccaaagagagagacgccctcaggctggagttatacaagaacaggtagcatgggggaaggtgggatgggaggtctgggggcccttagcatgggtgatgtgctgggaggttggggggtacaggtaagcatggtgaggtggtcatacaggtttgcatatgtgcacagttaagctgtagtgctggtgactcatggtgtagccttgggcaactcatgccttctcttgggcctgccatctgtgactttggattcctagggttccttccaatgccgcggttctgtgttggttaggcaagggtgcagggttgatcactaaagcagtcctttctgttcttagttcattcctttctctactgcttctggccataaccgaagcaatgaggacctgaagcaggagaaatcagaattggaagagaagcttcaagtcctggtgactgagaaggctggcatgcagcttattttagaagagccgcaaaagaaattacaaatgatggcactcctgctt

SEQ ID NO: 1480 - DNA, 1263 bp, Homo sapiens
ctcagcctcccaaagtgctgggattacaggcgtgagccaccgcgcctggccagtctgaggaaattcttatctttgttcttatatgtaatttacttgttttctgtggctgcttttaagatttttcttttaatcactgattttcagctatttggtatatctatgtatgggtttctttgtgtttatcctgtgtgtggtttatttaatttcttggagctttgtatagcagcagtccccaacctttttggcaccagggaccggattcgtggaagacagtttttccacagatgggggatgggaggcttggtttcagggtgaaactcttctacctcagatcatcaggcattagttagattctcataaggagcacacaacctaggtcccttgcatgtgcagttcacagtagggttcaggctcctttgagaatctattgctgccacctatctgagaggaggcggagcttaggcagtaatgcttgctcgcctaccgctcacctcctgctctgcagcccggttcctaataggccgtggactggtactgatctggcggcctaggggttggggtctactgttgtataagtcacatcgtcttgcttcttggcatgtctgatagttgttgattgcctgctgaatattgtgaatgttacattgtttagtatctgaatttttttgtgcatgttatgtgtctttcatgactattgggttttgttctggtaggctgtttagtaatttatgattactttggtcatttgataattgattttagagtggatttagattagcttttactctaagggtggcttaccccactattaaggcatggttcttacaggtttctgctgattgtcttagtggtcagtgaagactcactactctggctgatgagatatcaaatgatttgcagccttgtgtgaactttgaaactattcaactgatagctctctagtttggttcttgccagacctggtggagtgtcacactatgcataagcatgtgtgggaccagggaacagagcatgaaggggaccagtttgcattttcttcagcatagcttcattcactttgaaattgtatctcagaactttcatctacctccgcattcttgaatgccagtttgtccctccagcttctcaattcagctagatagctacttggaattctgctctatgctctgtagtttggaatgtgcctctggggcaatcctggttctcttgttctctttcttactggggtcaaaggctcttgctgcctgttcaatgtctgaaaaa

SEQ ID NO: 1481 - DNA, 1395 bp, Homo sapiens
agaccaacctggccaatatggtgaaaccccgtctctactaaaagtaaaaaaaacaaaattagccggctgtggtggcatgtgcctgtagtcccagctactcgggaggctgaggcacaagaatctcttgaatgcggacagtggaggttgcagtgagctgagaatgcaccactgcactctagcctgggcgacagagcaagattccatctcaattaaaaaaaaaaaaagttatgtgaacatgcttgaaatgatgttcatggctaaatttttcagttaccttgtaaagatgattcttggatattgttttgattctgagtacttttggagtcatctgatagtatgcttcgagaataacaatctgatgatagctttcaacattgggttaccaacaaagcttgttattttgtatacattgattcataatttcaggtttcttcaccattatggtaagtagtgtattgagtcttcattctaacacatgttaggaatttatgtttgtactcatggatgtctttaaccctcagacatttctacttatattgagaactctagactgaaaacattttgaaatgtagtggttttactatgtaggaggaacatgtgattcatttgttctgcttcattttcttctgtttgtgatagagattggatcagatgaaagtgtcttgataatgatatacatgccattcttttcattctatgtatttgtagtccttttttgccatcataactttgtttatgatattccctgctcttaaaataccctcatcttgtccctccacctatctatatctaaaatatccttcaagaccttccttttgcagctttctctgagtactacagccaaatcctcttgtctgaactccaacatgtgtaatacattatcatcctgtttaaatataattatttcttatatttattaatttatcaaggccctaaatatctgcataagcttgccttcatggtttcactttttcattgttctctatattcatgccatgtaactttggcatgccttcccactgtgggtggggtaacctgcccactgtttgactctggtttcaggcatgtgatttgctttaactaatgagatattatcagatatcatgcaagcagaggcttgaaatggtcttgcacattgggaattccctcttgagcctctgccaccaccatgaaaacattcccatgctagcctgctggagagagccacatggaggagagccatgctaccctaactgccatagctgaggctatcctcgatcagcacacatccattcaagcaccagacactggagaaagtccacttgaggtcagtagagctgcctagcagatgcccaactgacccaaaaagcataagacataaacatttattgttgtataccctctgaagttttgcat

SEQ ID NO: 1482 - DNA, 1159 bp, Homo sapiens
ggccgaggcaggtggatcacctgaggtcaggagttcaagaccagtctggccagcagggtgaaaccccatttctactaaagagaccaaaatcagccagtcatggtggcatgtgcctgtagtcccagctactcggtaggctgaggcaggaagatcgctagaatccaggaggcagaggttgcagtgagtcgagatcaggccattgcactccagcctgggtgacagagcaagactctgtcttcaaaaaaaaaaaaaaaaagtattgaataattgaatgaatgttctgcaatgtaacagtccagttagctatatagcactgcttgggatgcagtgtggcctgcttgtctaacactattatggagatatttctatggatttatttgtattattaatgattgagtttataatcctatcttttaatgttgtgtacttcaaatgctattagttttctagatagccaaagatggctaaactctcttctgcccttctttaactacaatttagagaagtggaatttccatgtaagcaacctattgagcatctttactgaatatcttttatttgtgtatattttgggggtagtggggaaaagggacattttaatggcaaaacctaagttagggccccattctctacttgaaactctagacatttttaactgaatttttaataaaaaattactgaggctttgtagaaaaagatgagaatggggtagcatagagtagttgcgctagccacatttcaagtgctccagtgctgcatgtggctagtagctaccatattgaacagtgtagatatagaacattttcatcattacagaaagttctattatacagcactgctccaaacagtaggaactctgaacattgagctagataataagatataatcattttatgttttgtatccacagtggggaaatgtaaggaattgtgtcttgtaattctcttatactgtacctttatttgctcaacagatgtttgttttgcctctaataatatataccaggcactctactaggcactgggaattcaggggtagacacaatagcctcaggcctttctgtatggagcttgtattctcatggaagagcagtcattaagtagataatcatacaaataactatagtctctatagtgctggttgtatagtagatgtttaa

SEQ ID NO: 1483 - DNA, 1203 bp, Homo sapiens
gggtaactgcttattcccaaagcatggctggcaggagagggagccctggttttcagtcattccagggaggaaatgaaatgctaatacctagcctaccgtaaactccacagtggcataagccttgctcaaaagtacatcagtgaataaaaagaatgtcaaaggctgtcagtagcagaagaggaaaggaaataggaaaagaagagaacagaatgagatgagacatgaagtagagagagatgagagaaatactatgctgggtgaaagtgattgggaaaccatttctgaccatgtatttcaccacactcatcccaggccttgcagcattgttttgaaataagaagcattgatattaataccaaaaagccaatgattttaaccagtggattatttgggacaaatcaaaggtaacaaggggtcaagataagcccatacgccttatttgacttgattgaaagattcattctcatagtgtctattctagattaaaactattcagaccagtctatacaacataaagtttggacattctttcaagagaacagcctttcatttactttagtgaataacaatatctagaaaggccatctgcttcgaccaaactttggaaaggatgcatttttaagattaatggaggaagaggatacctgcccaactagctatgttaaccaattcaacaccataataataattgtcaacatttatatagtttaccatataccagccattgtgcaaaacactttgcatacattctcacttaatcttcatgccagtcctgggaggtactcttatatatcctttttacatatgaggacctgaatcttagaaggttgagtcctttgccaaatgaaagcttaacagtaaagaaacagtagaatccagactgtctggttccaaaacttgtgcttttagccacttcacatattgcttctgtcattggtatgacagatgtcacaggcagatcatactcaaattctgtaatatgttctaaataatacaaacaatataactagaaaatggtagctaacttatatagcaggccccactgaaataattcaaacataaaaatgacctcttggcatttgattatctttcaccttagacgttgataaaccaaaccattcccttaggacaatatttttctgtccagcaaagcatttctcttgccaaagtataattttgttggctacatctatctcctccaag

SEQ ID NO: 1484 - DNA, 1167 bp, Homo sapiens
ttgtaatcaattcccagttagaagaatttcagtctctgggccattgagcttggcagtgttgagatctcccatgtgacagaagcctgacatctgggccaccaaggctcactgactgtgtaccttgcagactgtagacccatgtcgtggcggtaacggggccgaacacagtcattcccatgtgaacgatggaggcacatcccactttattattaatccttgtatatactcagtcaggacagattttaacttgtcgctgtcatgactttttttttttttttttgaggcaaggtctcgctctgttgcccattctggagtgcagtggtgtgatctcggctcactgcaacctcttgcctcccaggttcaagcaattttcgtgcctcagcctcccgagtagctgggactactggtacatgccaccaggcctggccaagttttgtagttttaatagagatggggtttcaccatgttggccaggctggtctcaaactcctagcctcaagtgttctgcccacctcagccttccaaagtgctgggattctgggtgtgagccactgtcatgcctggcctcgtcatgactcttttctctttttttttttttttttttttgagatttagttttgctctttttgcccaggccggagtgcaatggcacgatcttggctcactccaacctccgcctcctgggttcaagtgattctcctgcctcagcctcccgagtagctgggattacaggtgcccaccaccacatccagctaatttttttgtatttttagtagagacggggtttcaccatgttggccaggctggtctcgaactcctgaccttgggtaatccacctgccttggcctcccaaggtgctgggattacaggcatgagccaccgtgcccagcctatcatgactcaactgggatctggcacactgcactgggtgttttgttctctgatgtgcacattgatgaatgcatattggtacaagggaaatgaatctgttttcagccatttaaaaaattgtgttgtaaagcaaacaaaaatagcttgaacatttaaaaattactgtttaatattgtttgactgattttctaagaattatgtgaacaatgatgagtccagggcagcagccatcacaaatatgacagtccagcaaggcccatggaggtccctttggaa

SEQ ID NO: 1485 - DNA, 1242 bp, Homo sapiens
tgtcccttcttagatgctggcctcgggagcgtgaggcctggggccagcggaatggcagtgtcagcgtgtttgattcagttttgctggagttcggttcttaacatttctcccccttctcatgcctctgggctcaatttcagttcccctcgccagaggttgcataaatcctatttgcattctgacctgtgctaacgaaggccgaagttttggcttgatcagttgggaggccttggctcggcctgcgcgcaacacgtgtgggtgtagaagaggcctggtatcagtctgcttaacgttatttataaatgatcggagacacactgtttagaagtggtgactgcctccgtatttcaggatctactggagacttcagcatctgaacttaaatagatgttctgtcttggctttacctttggtatttaaaccagggaatgcactctttcatccccacctcccttagttaccaactgaattttgcaacccctacccttccctatttgatcatcctccttggagaagtgtgatgttgaagagtttgcccgtgttaaatcttcagggtcggtcagagctgacgatgaagttgatgtggatggtacagtagaagaggatctgggtaaaagtagagaaggatcaaggacggatgatgaagtagtacagaggtttgtgttcatttgaacttacgtatacagataagccgtgtgaaccttgtgagttacggtcacttcttatgtatctcttctccaaaggtccagataaagtctaacaccctgtatttaaatacccggtgagttgtgtgcatacatacctcctaacttgtccctaggagtgatgaaaactgagtgaattcctttgaaaactatattgcagaatactagcaccataaactttgtaagactttatagaagatactttcagttggatttgtattcattaactgtgtacaccgagtaagtttaaaaatgggatttctgtcagttgaacaatattttaaaatttggcctcttgggacttattgacagttttgaagtcctcactgtggagcataaatgagtatgactttgctttttagtagaggaaagttgggatttttttttttctggcaattttaagaaccgagtatttccagtgtaatgttaaaggtagcctactgctgtgctaacataatgagacggtatatcagttatattttataaaggtttccattttaacccccaagacaatattcagaggcccctgtgctttcat

SEQ ID NO: 1486 - DNA, 1226 bp, Homo sapiens
ctagttttatcttccttggctttaagagtgtgccatggaaagtgataagaaatgaacttctaggctaagcaaaaagatgctggagatatttgatactctcatttaaactggtgctttatgtacatgagatgtactaaaataagtaatatagaatttttcttgctaggtaaatccagtaagccaataattttaaagattctttatctgcatcattgctgtttgttactataaattaaatgaacctcatggaaaggttgaggtgtatacctttgtgattttctaatgagttttccatggtgctacaaataatccagactaccaggtctggtagatattaaagctgggtactaagaaatgttatttgcatcctctcagttactcctgaatattctgatttcatacgtacccagggagcatgctgttttgtcaatcaatataaaatatttatgaggtctcccccacccccaggaggttatatgattgctcttctctttataataagagaaacaaattcttattgtgaatcttaacatgctttttagctgtggctatgatggattttattttttcctaggtcaagctgtgtaaaagtcatttatgttatttaaatgatgtactgtactgctgtttacatggacgttttgtgcgggtgctttgaagtgccttgcatcagggattaggagcaattaaattattttttcacgggactgtgtaaagcatgtaactaggtattgctttggtatataactattgtagctttacaagagattgttttatttgaatggggaaaataccctttaaattatgacggacatccactagagatgggtttgaggattttccaagcgtgtaataatgatgtttttcctaacatgacagatgagtagtaaatgttgatatatcctatacatgacagtgtgagactttttcattaaataatattgaaagattttaaaattcatttgaaagtctgatggcttttacaataaaagatattaagaattgttatccttaacttacgggctttttctatagcaagactgagtggtattctttcccctttaaacctgaggtcagtttaccttctattatatttaacatgtagaatagtaacatgataaaaatcataaaaatgatgaatattttatttttcagacgtccatattttaaatgtaatagttttataaaagaaaaggttggcaacctgttaaggagatcttcatgtg

SEQ ID NO: 1487 - DNA, 1207 bp, Homo sapiens
taattaataacttcataagctcaaagagttccctgtacttagtagtaagaaataataataggttttgggccaggtgcagtggctcctgcctgtaattccagtgttttgggaggctgaggcaggcagatcatgaggtcaagagatcaatactagcctggccaacatggtgaaaccccgtctctactaaaaatacaaaaattagctgggcgtggtggcatgcgcctgtagtcccaactacttgggaggctgaggcaggagaatcgcttgaacccgggaggtggaggttgcagtgagctgagatcacaccactgcactccagcctggtgacagagtgagactccgtcttaaaaaaaaaaaaaaaaaaacttccttttgcgggtggcggcgaacgcggagagcacgccatgaaggcctcgggcacgctacgagagtacaaggtagtgggtcgctgcctgcccacccccaaatgccacacgccgcccctctaccgcatgcgaatctttgcgcctaatcatgtcgtcgccaagtcccgcttctggtactttgtatctcagttaaagaagatgaagaagtcttcaggggagattgtctactgtgggcaggtgtttgagaagtcccccctgcgggtgaagaacttcaggatctggctgcgctatgactcccggagcggcacccacaacatgtaccgggaataccgggacctgaccaccgcaggcgctgtcacccagtgctaccgagacatgggtgcccggcaccgcgcccgagcccactccattcagatcatgaaggtggaggagatcgcggccagcaagtgccgccggccggctgtcaagcagttccacgactccaagatcaagttcccgctgccccaccgggtcctgcgccgtcagcacaagccacgcttcaccaccaagaggcccaacaccttcttctaggtgcagggccctcgtccgggtgtgccccaaataaactcaggaacgccccggtggaaaaaaaaaaaaaaaaaaagtgatctggctggacaaactgagccagtcccacacaaaatcttaaaaaaaaaaaaagaaaagaaataataataggtttttaaaaatcattatttgcctattggagaggtaaaaacagatttctttatcttaatttgtatcactttgattattaatgaggcacaatattttttcctgtatgttgtatttcctatgtgtac

SEQ ID NO: 1488 - DNA, 1449 bp, Homo sapiens
caggttctactccttatagttggcttttatattataagatattgaaagtttttttttttttctgcatcctagtccacattcttgataataattggtgtttcagctgaggacaagcaacacaggtttttccacctcagagctgagtggtggcatgaggatggaggttagggtttgcaaatctataatttgttccaaacagttcaaaatcatttagtgtgaagatgaattggactaactgactaatatcagaagttacacagtttgctgtgtttagctatgggtagcttgagctactcccaaagcaactgagtggcaagaaagggtatctaagaattataaaaacttctcatgtattatgtgtgtagctagtagaatgtttatcatcttgaaagtatgttcttgtcaaagtaaaaatgtgtacttggatttagtaattatttatataggaactttctttttcttctttcttccttttttttttttttcccccagtgatgatcttttctccttgccttactgcccgggtaagaccctggttgttggagcatcctatgtcgctttggagtgcgctggatttcttgctggtattggtttagacgtcactgttatggttaggtccattcttcttagaggatttgaccaggacatggccaacaaaattggtgaacacatggaagaacatggcatcaagtttataagacagttcgtaccaattaaagtaagtgggtttgcctgtaggtttcttgattctacattcacagtaaaaggcaaaaagagagttgagttggtggtagaagcatcctttcagcattataaaccatcaggaatgctgattcccctactgttgtatactggtatataaacttgtacctccctaccatctaaacacctatatagctttgttcttatttgtagattaataatctcttcctttgtcaactttctaaattttggttttcttctcttctgtttaatgctttcctttatgcattcctttgtcatctttggtctcttaatactttgtttcttcatatgtaccagagatttaaataagagttcaacactaggccccacctgcactccctggctccccacaggacatttccccttggtatatgataacataaacactacataaacactacatacttctggcatccctgaaagtgattatctcatttatttatgtgtgctaacctttttcgctcttttaatcttttgaaaggagctaatactatgccaagtcacacctgggatttgttaccattatcacaaatgttttcatatatgagtgacaaaattgaacacttagtgtgtgtctcagactaatagataattttctctagtgcagggaaaatggtgggactattttgttaaagttaaggaattatagttgtcttttttttttttttcatctctcagtgggttgacttgagttgtgtatgtgac

SEQ ID NO: 1489 - DNA, 1204 bp, Homo sapiens
gatggagtctcgctctgtcgtctaggctggagtgcagtggcacgatctcggctcactgcaagctctgcctcctgggttcacgccattctcctgcctcagcctctcaagtagctggaactacaggcacccgccaccacgcccggctaattttttgtatttttagtagagacggggtttcaccgtgttaaccaggatggtctcgacctcctgacctcgtgatccacctgcctcggcctcccaaagtgctgggattacaggcgtgagccactgcgcccggccagtctctggtcatttttgagttggatttttaagaaacagactggagaaatgctctaagctgtgtaggaagaggaggggagaaaaatcagcttaattgcattattgtatttttttttgccttaggaacgtgttgtgggctttcacgtactgggtccaaatgctggagaagttacacaaggctttgcagctgcgctcaaatgtggactgaccaaaaagcagctggacagcacaattggaatccaccctgtctgtgcagaggtgggtcatctacacttatacagtttaaaatgtttaaaatgtgccacatagaagcacaccacccagcttatacatggcagatgtaggaccctgagtttgatgatgattcctcaaaagagggctttgtctctaaaaattagtttttgtctttcaatactgattgctcatggtatgaactggaggcttccgtcatgtcgttaagtggtaaaaattatgagagtgatttatagagctgtgccttaaatattttatttatcatatcttctaaattattttcatggcaatcagttaataatggaagagcttcaatcttagttattccacagctatcttgaggctaattgatactgtctgcctcttcagcttatggtatcagtgaatgagatttgaaaatgatgctttcaaaagatcaaatgacagtagaactagaaattgaccaatctaggcctctgggtgtcagtgtttcttcgctaccagtgatcatccaagagttgaatattgtaatacttaactgcataggaatggtaagccaaaaatgtgtttatattggagaacttgggaaggtgtgggaggaggcacgtcatactataccagcttatatatggagttgaaaattgcagtgattatctgttgtagccagtggcttccaaggtgtacattgcacttg

SEQ ID NO: 1490 - DNA, 1300 bp, Homo sapiens
gaactgtcctgcagctgaaatggactgttctttactgacctgctcagcagtttcttctctcatatattcccaaaacaagtacatctgcgatcaactctagccaaatttgcccctgtgtgctacatgatggatgattattattttaaggtctgtttaggaagggaaatggctacttggccagccattgcctggcatttggtagtatagtatgattctcaccattatttgtcatggaggcagacatacaccagaaatgggggagaaacagtacatatctttctgtctttagtttattgtgtgctggtctaagcaagctgagatcatttgcaatggaaaacacgtaacttgtttaaaagtttttctggtagctttagctttatgctaaaaaaaataatgacattgggtatctatttctttctaagactacattagtaggaaaataagtcttttcatgcttatgatttagctgttttgtggtaattgctttttaaaggaagttattaatatcataagttattattaatattttgaacacaggtggatgtgaaggattttcatttaaaaaccaagtggttttgactttttctgttgaatgaacaactgtgccttgtggaatttttgcagaagtgtttatgctttgttagcatttcaacttgcattattataaagaggtattaatgcctcagttatgtgtttgtcaatgtactggctgaggattctatctcagctgtcttttctaactgtgtaggttgagttttgaacacgtgcttgtggacatcaggcctcctgccagcagttcttgaagcttctttttcattcctgctactctacctgtatttctcagttgcagcactgagtggtcaaaatacatttctgggccacctcagggaacccatgcatctgcctggcatttaggcagcagagcccctgaccgtcccccacagggctctgcctcacgtcctcatctcatttggctgtgtaaagaaatgggaaaagggaaaaggagagagcaattgaggcagttgaccatattcagttttatttatttatttttaatttgtttttttctccaagtccaccagtctctgaaattagaacagtaggcggtatgagataatcaggcctaatcatgttgtgattctcttttcttagtggagtggaatgttctatccccacaagaaggattatatcttatagacttgtcttgttcagattctgtatttacccattttattgaaacatatactaagttccatgtatttttgttacaaatcttctgaaaaaaaacaaaacaatgtga

SEQ ID NO: 1491 - DNA, 1196 bp, Homo sapiens
tagcacttaatcttgtagcaaattatttaaactcattcattcaaggagtatttatttagattctactatgtataatgtgctatgttttgtgttgggctacagcagtggtcaacgtagattattccctgccctcacagagctcttggtcagtgggagagacaaacatttgaaaataacctcacaaataagcacaattgtgattagtgctatgaaaatttcagttcctaatcagtaagaccacaataacctcaaactttgtgatttaaattaattatataaatatataaactgctttccacagtgctgacacaaagcaagaataaaaaaaacctgccactaagaaataacactcaccgctaactcagcctcagattaataggatgtcagaactaaaagaaaccctacaagaatcatctattgcactcactcttagctgagtttgtgtcatggactcctttgacaatctggtaaaaactctatagaatagagttctctttctctaggcaaacacagaggcactcaatattttgagtagaatttcttgatgttcatggactctctgaagccaatccacgtgctggaatcgagggctccaagtaaaaaattcctgaagtagtcatatagtaaatcaacagaagagccaggactaaagagaccatatatcctggactccagccccatgatcttgtattaatattacagcttctgtggatgtcatccacagatacagagctgagattcaaaccaataagcaccatgatgagtgtagcagttaaaatatttcaggattttcattctggttagtaaatgatgtaattacactttaaagcagtaaaattaatttataatataaattctagcactatgattccaagtcctgtctggcttgacattggaacacagagctagagaacctactgcagacatcatggtgtgtatatatgtatatataaatctgtcaatttctgagaaaataaaagcacacagctgagatgaggaagtcctattctggaaatatgcaaaataatgactaactgaaaaatgactaattgtacccaagagaaagcaaagtctgggtttaagtagtagatgtgaaggttaacaggggccataggcctgaagagatgtttggtacaggacacgtccctcctggtgaggcaacagttcctcatgtgggactggagactttgctttat

SEQ ID NO: 1492 - DNA, 1157 bp, Homo sapiens
ctttggatgattttttttcttttatcctactttatgtccttgtgtgtttaattgtggtataaagtgggtttagtcaactggcttcatttctagaaggttttcaggggccaaggctcaactcaggattcctggactgtatgctgtaattctggggggctgatatcaggcccctggctttgttctctggccactggaggttaggtacctgctgtgctagaggggccaagatatttctggaccactggtcagaacacttcaatgggtggtgccagccaaagtgctttgtatggcagtggcagtgggatctgtcctcatatgcacatgccagcaatagcagtggggtgcggtgcacactcatcagcttcagaggggtgctggcagttgcaagggtgctgtttttgtgcaggcatttgtagtggctgtggtgttagcatgggggtggggcgctgtggctgctgctagattttgtgtgccctctgtgcgtgtgcttacatgggtagcagtggccactcagggtaagggggcgggctgctggtctccatgcatagtttcacaccactggcagtgttgacacaggggcagggtactggtggctgcgggactggtgccaaatgtgcgcacgtttatgctggctgcagtggctgcacagggcgcagggcaggtccactggtcactgtgcctagttttgcagctggtggcagtgttggtgtcggagtggggtactggtggtctccgtacctgcagatactccagtggcagtggcagcatggtggtcgggtgcagtgtgctcaagccagcagtagtggcatggccaggtgcacatgtacccacacactggcaggaaattggaggcgaggtctgtgtacacaggtgctggcaaagtgattcgggggttggctgcatgccagcgtctgcaggcaaggtgccatgggggagtctgcagtgggaggagagagtgggatcaggtggtctggtgcacggtctgttgtgggtgggggtagtactggagttctctgccattcaggcacgatctgccaactcaggtgctatagcgtaggcccccaggacgcaccccacctgggcatctaaggctgcactgcaagcagggacagccaggctgaggcccagggagaggtcaggaaactgaggagtgctta

SEQ ID NO: 1493 - DNA, 1094 bp, Homo sapiens
ataggaactacaagtaccaagggagtctcaggctaatggcctcctgcttatttaatttcacatatgtaatattggatgtattttgtttctcagagaaaccagagctagtttttaaagagttgggatatatagcatttggatgtcttcccagggtagaatgatctttattctcttctatggtagagtttagaaagcttaattttgtgcatggtgatgagtgaatttgttagcatcttttttcttcagcatggatttcagaaacatcaattttattttaaagtaaaaataaaggccaggtgcggtggctcacacctgtaatcccagcactttgggaggccaaggtgggcagatcacgaggtcaggagtttgagacctgcctggccaacgtgaatccccgtctctactaaaaatataaaaattagctgggcgtggtggcacgtgcctgtagttccagctacttgggaggctgagacagaagagtcacttgaacccaggaggtggaggttgcagtgagctgagctcactggaggctgggtgacagagcaagactgtgtctcaaaacaaataaataaataaaaattaccagttttgttttaaattatctgtttgaataaaataacctagtttttttaggttattataaagtcaaacttgtcaccatcaagatgggtttaatgagggaggaatatgtgaaaaagaaaaaagatttttacaaagaaaagaattacttatacagttgatccttgaacaatgcaggagttagggtgctgaccccctttgtggtcaaaaatctatgtataacttttgactccctgaaaacttaactactaatagcctactattgactagaagccttagtgaaacataaatagttaacacatattgtatatgttatatgtattatatattgtatttttacaataaagtaagctacggaaaagaaaatatcactaaggaaatcaggaagagaaatatatacttactgttctttaaatggaagtggatcatcattaaagacttcatcctcattgtcttcaggttgagtaggttgaggaggaggaagcagaggggttggcacaggtggaagaggtata

SEQ ID NO: 1494 - DNA, 1228 bp, Homo sapiens
aggagtgcagtctgttgacaaagatgagcatgttaagtaggtttttggaatttttactcttaaaaaattaccatgtagttcttatctcaacttttgttattttaactttcaccaattttacaaccgtttattgtcagcaaggaacttttaatgttattttaggttttctgtttcctgtttgtgaatccctgaacatactaaaggagtgatttattggcgtggtgtttctctagcattgtctttttttttttttttttttttcgagacaaggtctcactctgtcgcccagtgccgtggcatcgccacggctcactgcagcctcgaccagctgagctcaggtgatcttcctacctcagcctccttagtagctggctgattttttctttttaaattgggatagagacaaggttttgccatgttgaactcctggtctcaagcgacccaccggccttggcctcctaaagtgttggggtgagccaccatgcccggcctagcattgtctttaagaagtcatttgctggtcaaatgcagctttgactggtcatttcctgtgtagttgagaataagacaactatttggggttctgagaatctgggcagtcttatatgtaagctgtagggaagagaacacctccctgtgcttggcgttcattaatttttggtctgtgaatcatatctagactaattgttttccaaaattgcctagattaatgctataataagacagaaaccttaatgaactaaatggattcaccggatttaaaactttatgtggttgaagaataaaggagagtgggggctaggtctttatactttaatacagcatgagtcagaacacactttctcttacttgcttcacattgctaatttgaggagagcaaatttttaccttttttagaagacaaaggttgaataaagttattcatatcaataaaagaaactgagttggagttgaatttgttacctttgggaacaagtaatgaatttttatgtgtaacgtgaaatactttgacgaataggcatattttaaaatccagcttattccaatgattccttaaagttacctatgaatgtgttaattctgtgaagaacagcatagtattctgtagtcaagcagtgttctttgctggtttttccaacttgattatgacagttaaataatttaacaaatatcttggttaaattttagacattatagaaataatatgctcaagcaggtataaaacctc

SEQ ID NO: 1495 - DNA, 1626 bp, Homo sapiens
tcggtcaaaatagaaaccaacgagaacaatctggaatcagccaagggtttactagatgacctgaggaatgatctggataggttgtttgtgaaagtggagaagattcacgaaaaggtctaaatgaattgcgtgtgcagggcgcggatttaaagtccaatttctcatgaccaaaaaatgtgtggttttttcccatgtgtcccctaccccccaatttcttgtcccctcttaaagagcagttgtcaccacctgaacaccaaggcattgtattttcatgcccagttaacttatttacaatatttaagttctctgcttctgcatttggttggtttcctgaagcgcagcccctgtgaataacaggtggcttttcatggatgtctctagtcagagaaaaatgataaaggcttaaattgaggattaacagaagcagattaacctcagaaatcctgtctggctggcagatttcaagtaaaaaaaaaaaaaaggtgggttggggggacccttttctttctagttgtctttaaggaaaattaattttacttttttttttgttctggccgaaatttttatgagatatctctcacttgtcttccactttgaaccggttaaagctcatagctgtcagctctgaatgaggaggggagaagcccctgggtctttctttgaaaggaatccgctgcttgagggctgcctccctcatggtgtgcgtgtcgtttctcttcctgacgcatcttgtgatatcagaggtaactatgcaaagcatccaggcggttctgaatgtgaagcactacacccagcagagtcccggtgccctctgtccccactgccggcccatgttctctctccggaggtcaccaaggaatgcacaggtttcgactaccagaaaggggagtccttgggttctttcaaaaaattcgtgaggagagctgtctacagtggaatagggggtctccctggggaatgcaggccaagtccttttattttaacatgatgtccatgaagaggtttgccgtctgggcagccctgtcggcaaggagcgtgcatactgcgtttgtgtaattgtttgctgtatctcccttccctctgagctgtattgttctttaatggctgtcttgcccttccaaaaaaaattgaaaaaaaaaaaaaaaaaaaaacccgaaaagtaaaaaaaaaaaaaaaaagttttgtttagtttactgtgaaatgaactgtatggcttatttacagtatttttaattcttaataaacacttgagctttgttatgacttttccagagtggttacattctgagaatttcgtaattatgatgtgttttattagcacatggtataaacgattagcaaataggtaagtttactattttaaggctgttttttcttttaattctgaaaccgagatggcctcactcttgggccggggacctcctttgatggactgttagcaagtgtgttcaatgattacttgtctccagctctgttagcttcaagcacaggatctcaaccctcactacctattagaatcttcctaggagcttttaaaaaatgcctgggccctgcccgcacagatgctgattgaataggcataaagaggctggcactgttttttttttttttttttttgagacagag

SEQ ID NO: 1496 - DNA, 1188 bp, Homo sapiens
tttttccagatggcttttaatccaagggtaaaaaccttctgattagcctagattcccttgatagtcccttctcttacagcttcatcaaatttatgttaaagattggggaaaaaacaagcaaacaaacaaaaagtaggtagtgtaaactttaacagagtaatagaaggattgacatgggactcgtaactggacataatttttatttctcttaagtataattttattattaaataataaatgcacatggttttaaaaggtcaaacagaacaagaaagggttctttgtacaaaaaaaaaccatcagtccttgtctctcctcctcacccaactttggttaggtataaaagtctaggttgaaaattgttttccctaaggattttggtggccttgccacatggtcatctaaattccatgtaaattgtaatgtcactcttcttcctcgtgtttttgtgccctgtttctctttttccctccttacctccctcctactttattcctttctctctggaagcttttactatcttcttcccttcttgacattctgaaatttcataggctcttctttcattccttgtgctgggcaattggacaccgtcgcatcctggaggtttaagttccttcagttctaggacattttcttatatttatttagttaataatttcctcttcctcattttccccataccctttctggttttcttagtgatcaaatattgggacttccagattgatgctctagttttcttatctttttgccttcttgtttttctttttaggagatttgatcaacgttatttttcagatttttttaaacctatcatattttaaatttctaattaaatgtttaaagttaatttatattctttctctctctcttttttttttttgagacagagtcttgctgtgtcgcccgggctggagtgcagtggcgcaatcttggctcactgcaagctctgcctcctgggttcatgccattctcctgcctcagcctcccgagtagctgggactacaggtgcccgccaccatgcctagctaattttttgtattttttttagtagagatggggtttcactgtgttagccaggatggtctcgatctcctgacctcgtgatccacctgcctcggcctcccaaagtgctgggattacaggcgtgagccagcgcacccagcctattctttctcttatagc

SEQ ID NO: 1497 - DNA, 1177 bp, Homo sapiens
agtaaaaacccgcctgggtcgccatcaccctaggcttggtgcagggcctgccaggcgctcgaatttgttgaagaggtgggtgttcagtatcgaaagagccgcggattgtacattagaaagcctggctttgcgccgcgtccttgccacttgctgaccaggcccctccacgtggtccccgccggggcagcagctctcctcacccgtccaaaggcacggggaggcgcgtggcggccccgccagagctgagccccctgggatgtgaggccgtctcgctctgagcttcagagcagggttgcaggagacacctcagaaggtcgttttgaggacgggaggagatgaactgctcaaagcctgcttaactagataaatggtatcgattaacttttctttgactccctttccacacctataaaatgaagatgacgggaaacttgtcatactttttttgtggtgggtgggaaaggtctttatgaactgtgaagtcctatgcaaacgtgagatgtttcctttcgcaatctgattagcgaagcaaaaacacgcgagtcaaaaacatacacagaaagcaaaaaaaaaaaattcacaaaatggtttatcaactgcagaatattcaggatggtggaactgaatggtaactactgacaacatagctcagaaaggacgtgctaaaacatgctggatgaagctaactttgatccaggtcttaaatggaatggactatagtttatagcttcaacctaatcattaacttatgaaatcagagaattaaggccacttaagccactgtgctcagactgtcaagatatttagtttctcaaagcagaaagaggaaattaaatactcttgtcaattcaacatatgggttggatgattagcaggatccgtggattgttgtttatccagtatgtgaagaaacggatatcctctgttttctcgttattacacaaacttctatccttaatatgtgacctttcaaggttgaactctaggtaaaattatgaagtgcacaattacgtcttgtttcttcttccctttgcacgtcgttttacaagagaatctaattattattaaagtacaaatgactgacaagattgtagccactcctgggagattttgcatttttacggttattaaaagccataactcaaagcagcagttgaatctgtttcataaactaact

SEQ ID NO: 1498 - DNA, 1149 bp, Homo sapiens
caagctttacctagtttttttttcccccttaaatcacagaaaacattcaggaggaatactgttgcagctgaaattggtggggagttcaatacttttcaattaagttatttaaaaatattcttcattgatggaaagcagttacatattgaaatatgttgtttctaatgacatttctgtggtttttaactttttaatgaatttcacagaggacaattggtaatttgtatataaagaacttggcaagagaatttgcttaatgtaaatataaacagtcacaattagtatagacccatcgatatatttttgataatttttcatgtatggtaaagttaaaatgacaaattgatattctgatataaaactcaaagttttgaagtcagtgggaaaaaaggaggtttttagactttcttaaaagacgttaaaattttaggacagaattttcttgatgttgtttgatctaactttgcactctttgataataatgttttagataatgtgcgtaatccaaattggtattgtagcctctgttaacacagacagtatatgttttaaactttgatgtaaacctttttagacccaaacttgtggaagtatcatgtgttaagttctctgtctctgtttctttgttcatttattactaaaatgaacttgttattaaagtatatgcaaatatgaaatcttgtgtacgtgtttttttttcttttttggtaagggagagagtattgctgtatgatatatgattacaaattacaaagagattctataaaccacatcatcattttgaaggaacagctaccatatgtttagttaaacagtgtttttcaaaattatatgcaagaaagaggtaaaactaaagggacttttttcaagtaatggcatttgtaaccataaatcaggcagtatgggctagcaatcaatagagtgagctctcgagtcaaatgcccatttctgccattcattagctttgaggtcttgagcaagtttaaccttctatgtcttctttcttcttatctataaaatagggatgagggtagtatctgctttatagttcagttccatgtaaaatacttatgagctggcatgtgatagggtactcagtgttagccacagggctgccatgctgtgtcaccccctgtcgtgtacagtgca

SEQ ID NO: 1499 - DNA, 1197 bp, Homo sapiens
acctgcttcttaaatctttacttcaatattacttgagcttttcatttttcattttattttaatttttttcatggttgattctatttattattaagcttttatcagccagtcgttcatttagtcaatccataagcatgcattaagtgccagctataagcacaataatagtgagagataatattcatcaaattatttgtgtgccaggcaccattctaagtactttacatgaattaactcatttatcccccatgataactccatgaggtatgtattattattgtcatccccgttttacagatagacaaagtgaggctgaggatagctaatttgcccaagatcacagggactggaagtggtagcacagggattcaggcccagcaggctggctccagaacttgcttcctttgccaccatacttttgctgctgtgtgtccagccctttgccagggaggggggactccgggaggcctcacatgactcccgttcagcacagccagaatggagaaagagtgcagtgtcagaagggaactgctgggaatgggacagatcagggaaggtggtatttgaatcggactttgaaagatgaataggactttgaaagatgaataaaaccagccatttgaggattggaaattgggaaggtgttctaggtgagaggagcagctgtcaaaggttccaggtaggaaatccagagatagtgggggacgcatagaccaactgagacagactggcttgggggctggactgcccatcagctcgtttgcagaggtgcagctgtttaaccagttattaaaatgctgaaatgcttctctctatgggttagtaaaaagccactgcctcaagtgctcccaaagccacgatgtccctgccatccagcaacaacagcttggcatctggccctgcaggtgctccaggatgccctgtctgcgctgaggctgtaggagttgatcggtgcctgagccttaacagtagttaaatatttagaatatcatcctgagttgagagtgtcggggagaagatttttgtctgcaggtgtcatgggggcctttgatcctttgacagcagggttagggttgaaggtttggattggggagaagcataagcaaaatccaaatgcctctgctcatccttcaggactcagctgcatccccacctctcccgtgaaagatttgctgacctgcgcccctggcaggagaa

SEQ ID NO: 1500 - DNA, 1099 bp, Homo sapiens
ggctgtgatgaagatggacggcatgactatcaaagagaacatcatcaaagtggcaatcagcaaccctcctcagaggaaagttccagagaagccggagaccaggaaggcaccaggtggccccatgcttttgccgcagacatacggagcgtaagtgcttgcatggtagactagtgcaaacttcgtcctggctggcaccagttcatggatcacggggggattaacccgggatgaattagcttcctgttaggacagaaaagccaagatgtgctgttccttgtggtaatcactgtggttccactggagcaaggcgtccagagcaggatgcaagcctaggcagtgacctctgcctggtactggccaatttacacttgtcatttatttcagacagaaataaggcagtgattattttaaagtcccctttgccagttggatctgtgtgtttacaaagaaatctcatacccatgtgtgtgccagtctacggccctagctatgatccacataagctgtgctgttcgctggtttgggatgaggaggagatagcagaattgccaggtgactggtgaggtctgagaggtgatagtcacactgatcccctctgagtgtgactggtgctcagggttgatctttgccaaaactgaacaaggccaagtctgttgaagcagtttttacttcataaacagaattaaggaggcagggattatcttatcctttttttttttcaccttttaacttctggttatattaaaactgtcttggcttattttcacaaataaatgaggggccacgaattgttgcttcaaaaggtccattcagtgtttgctcttttaggagggggaagggaaggacgcagctgtctctactgcctcgtgccctgcagcgcccaagtgctgcagctcctcaggctgagaacggccctgccgcggctcctgcagttgccgccccagcagccaccgaggcacccaagatgtccaatgccgattttgccaagctgtttctgagaaagtgaacgggacgctgggagacaggaaatgccttacttcactctggcccggcggacctcccaccacccagcagtgcactggggatggacaggcctggt

SEQ ID NO: 1501 - DNA, 1260 bp, Homo sapiens
cttcctctatggcttccacttcctgcccaaagacccaacttctgtccgaagttgtgacggaacgcatgccattataatgagtttttatatctggtgggagcttttacagggtataaaataatgtgaatttagtgtatgtggagattttcctgttatctaagttcccagtttctctttcaatggcaagaaaacgggtttttgataaggcgcgcgccgcgggcagcttctgcctcagcgggtcttcggcggccgcgggaagacccgagagtcattagaagcgcaagatggcgactgcggccgaaacctcggcttcagaacccgaggctgagtccaaggctgggcccaaggctgacggagaggaggatgaggttaaggcggctaggacaaggaggaaggtgttatcgcgggctgtggccgctgcgacatacaagaccatggggccagcgtgggatcagcaggaggaaggcgtgagcgagagcgatggggatgagtacgccatggcttcctccgcggagagctcccccggggagtacgagtgggaatatgacgaagaggaggagaaaaaccagctggagattgagagactggaggagcaggtgggcccgggggtgggcagcgggcatcttccagtctttcaggtcctcgggtccccatgtcctggcccgcctccctagtcctcggcggcgataaagccgccaaggctgcaaacccgcttttcgtgacagtagctcctgtcggatttgagtgcttactgcctgcccattgccttgcaaacgttatctcattgaatcctcgccacgaccctgtgaaggaagccctgttatctatccccattttactggaggaaactgaggctcgtggaggaaagtttcttgctcaagataacacttcctgcaagtcaggccttgtactttgatcccattccagaactcccactcttaaccacacgtccaacagtagaaataaactcattcgcaagagagtgttattttgttatgtaggaatgacggcgatgatgaaacttgtggtaagaaaaatattgaccgcgatggtgataatagaaatggaaaggtttctggttctggaggttaaggcctcagttctagctgttcaactcttgtatgtgcttgtaagaatttcttaatttctctcaccctctcgacttccttatctgcagattgggagcaacaatttctgcataatataattgttgtaacagtaactatagctcagtgcctagcatctagtcataacatggtc

SEQ ID NO: 1502 - DNA, 1595 bp, Homo sapiens
acgtgtactgctgagtgttccttcttgcccttttcagcagcttgcccagctcttgagtacagtggtggggactaaaaatgtgggcatgtggagaggggtatttgccctgggtgatcctgtttccctgtgctgtccccatgctgtgttggaggaggaagtggctctccttccaccaacaaagctcctgctctaccctcttcctcacatgtgctgcgacctctctcagggctcccccagccattccttctttccttcctgccttttagctctaaccacattaagctaagacaaggccagagggtgcgattgaatgagtattgagactgaggagaatgatagagagtgaagcagaaacaggagcacagacctctgctgtagctttaatgcatacaaacatgtccctccgcacaactaacctgccctgcctctccatctctcaccaaggctgcgtcaaagcacagaggctccccggactcggagggggccagagactgagctctggtcacctgttcattcctcggttagctggaactttgccccgtttccagtttcttatagtgcatgcttgggaaacaagatttaaggagcctctgttttggaagggctgtctgtgattgaacgtgaaatgtgtagtgccattgggaccacgaagggaattcttgcacatgctcgtgctggtgtgggcatgggactggctggaaacgtctgtatgcagggagccagggtgagggcagagtgtggtgacagccgaacttggagtaatgtccgtgtagaaaaaggaccatgttcttatccagccaatactgggagtgctgtctccacaatttcagggcatctgaatgtttgatgtggttttgtgtgtgtgtatgtatgtgtttaatattgaagtggatcatgagatgtaaagaaaacaataatggcaatgacttatattcaaatctgtatttgtttctttatcaatgtaatctgctgaggaccttttgtctaagattcagtagtgttttaaggttctgatatcgaattaatgaagtaaagttgttgatggtggtgaaacaccgtagggcatgtggttcaaagagaagcaggagggcaagggaaagttaccctgatcttagtttgtagcttatgacttatttaatgaatggatgcccagccaagctcagagtaggcgcccaaagcattgtggattattttcctgttttgtctttttttttttttttttttaagccatgacatcccagaagaggacagtgaattactcctaggtcggctcttatagagtggccatagtgttctgtcaaaacacttgcttccattttcagagataaaaatcattgattacaaaatggtgtttgtgtttatttcacgccttggctgtctgtgaggcagcccccacctctctgcctgacatagcttctctgactttggtggacgagcacggtgccatactcctctccgggggtaagtacaggggaagcgcgtgtgggtggctcagttcaagtacaagtgaggtctccaagccagtcaagcactgtgttttggcttccagcagacctgagcctttggatcctgcctcagacctttgccagcggtgt

SEQ ID NO: 1503 - DNA, 1217 bp, Homo sapiens
agaagtgatataaatagtggaaagctcagacaggaatttggctgagggtggagcaggaattgagccaggggccagctgagctggggaaagtaaaccactatttagtattcttaggataattctgatcccaaccctctgtcccattgttcccataaatgtcccagaacactaacatttcagggtcgaagctacatctcccaatcttcctcagaccaggaggtggcccacagattcctcactaggtgtggtctggggcctctcagagatcaatagaggcataagccatttctatattttgaggctcttggcaaatggaaaaatggagaaatgttaaaacgggattacaaaacgatctatttgaaatatttccattgaacaagttaacagttttaacatatatataaatagctacatttatgatctcattgggagatgatatcaaaagtctaaatatggcatcattagagcaaaactggggccaaagttctcccctgactacaacccccatcagagaccctgatcttttatccagttgtgaggcagccatgaccctcagtcctaatgaacacctacacctttttacctgtatctgcacccactcctgggcctgcactgacacctgcacccccacttgtacccacacttgggccaatacccgcaacctgggccggcacccacaccctacacccacacttgggcctacactcacacctgggtctgtacccctacctgcacccacacctgcacccatacttgggccaatacccacacctgggcctcacccacacttgtacctacacttgggcttacacccacacttgggcttacacccacacctgagcctcacccacacctgtacctacacttgagcttacacccacatctgggcatctaccccacctgtacccacacttgggccaatacccacacctgggcctgcacccacacctgggcctgcacctatacctgcacccacacttgggcctatacccacacctgggcctatacccacacctgggcctgcacccacacctgggcctatacccacacctgtgcccacacttgggtctatacacacacctgggtctgcacccatacctgggcatacaccaacacatgcactcacacctgtacctgtacccatattcacacctacacccacacttgggcctgcacctccacctgggcttacattaacacctggcccgcacatctac

SEQ ID NO: 1504 - DNA, 1190 bp, Homo sapiens
tgcccaagcttgtcttgaactcctggcctcaagccatcctcccacctcggcctcccaaagaaagcatcacagccttggccaggcacagtggctcacgtctgtaatcccagcactttgggaggctgaggcgggcggatcatgaggtcaggagatcgagaccatcctggctaacatggtgaaaccccatctttactaaaaatacaaaaaaaaattagctggatgtggtggtgggcgcctgtagtcccagctatgcgggaggctgaggcaggagaatggcgtgaacccgggaggcggagcttgcagtgagccgagatcgcgccactgcactccagcctgggcaacagagcgagactccgtctcaaaaaaaaaaataaaataagaaagcatcacagcctttttgttcacccacctcactctcagtgtctctgagataactatcaactgccaccctttgggaatgtagagggtacactccccctttaggaaggggaaatggtattgaaagccggactagggcttgctgagttggtagtcctcatcagtctccctacccgactcctcctctctcccagttaccgaattaccatcggcaataagacgtgtgtgtttgagaaggagaacgatcctacagtcctgagatccccctcggctgggaagctgacacagtacacagtggaggatgggggccacgttgaggctgggagcagctacgctgagatggaggtgactgcagagccggccgtggggaatcctgaaccctcaaactcccactcttctggctttgtcccatgtctgaacaaacaggcctacctctccccttgaccactgtctgcaaatttctaagggaatcagtctgtggatttcagccaaatcccctgaagtattcaaagaaaaaaacttcaggctgggcgtggtggttcacgcctgtaatcccagcactttgggaggctgaggcgggcggatcacgaggtcaggagatcaagaccatcctggctaacatggtgaaaccccgtctctactaaaaatacaaaaaattagccgggcatggtggcaggcgcctgtagtcccagctatgcaggaggctgaggcaggaggatggcgtgaaggcaggaggatggcgtgaacccaggaggcggagcttgcagtgagctgagatggcgccactgcactccagcctgagcgacagagaa

SEQ ID NO: 1505 - DNA, 1332 bp, Homo sapiens
tgcatgtgggagccactccaagtccccttctccatggcccagcaggcatggccccccgaggcatgccaggtctgggccccataactggccacagagacagcgtaagtggcactgcatggactgcggagggcgggtagtgccctccagactgggtgtctacccccaccgtgaccctctgtctcctcctcttcctgcccagcagatgagccagttccccgtggggggccagccctcatctggcctgcaggacccgccgcatctgtactcacctgccacccaaccacagttcccgctccccccgggtgcccagcaggtaccaagggctcaggggagccctggactgagcagcagacaccctgccttgggctggccggggacccctctgagcctcagtttactcacccagcacatggggataacattccctccatgctcatgtcatggggtcattcattccgttcccccaaaactcctgccctgagtggagacaagattgtttcctggacggttgtgaatccccacacaaggtgttttgaaactggggtggggacagtgttactgtgagtgacgtatgttatttctcaccttctctctttctctgccactttctccctgcccctgcctgtgggaagtgccctcctgtgggcctctatggccccccatttggggtgcggcccccctacccccagccccacgtggctgtgcattcatctcaagaactgcaccccaaacactaccccaagcccatctactcgtacaggtgaggtccagggtgggccgggtcagggccaagggcggctccgggagagagggatgaggctgccctcagggcatctcagacagctagtgtggcagcccagacttccaagggggaggttttggggagtggggaacccccaggtgggacttgttctcaggaaggcgcatcatagggtcccccaggtcaagagcccactgcagacctgagtccagtgccacagttcacttcattcataagccacgtggccttggggaagtgggatgacctctctgagcctcgatttccccaaatgtaaaaagtcatcaaaataatagtattgtatacctcgtgggagtttggggagggggaaacaacctaggtaaagtctgaaggctcatagccattaaaattatggggatgcaataaagaggggaaagggtaagatttctcaagtcagtaccaattgttgtgcccagatcaaggagaaagggcaaagggtgggaaagacatcgggccatgaaaagatattgagagctcactgtgtgtgagtgtttagggtcaagcagggcaggcttcctggcagaggcggcatt

SEQ ID NO: 1506 - DNA, 1225 bp, Homo sapiens
caattctcctgcctcagcctcctgagtagctgggattacagacgcccatcaccacgcccagctaatttttgtatttttagtagagatggggtttcaccatattgtccaggctggtcttcaacacctgatcttaagtgatccgcctgcctcagcctcccaaagtcctgggattacaggcgtgccacttttttatagtaacaaccatgagacaggtactgacattatcccaatctacaggtaaggatactgaggccaagagacatgacttgctcaaaggcacacatttatgaaggggcagaacttatattattaatcacctgcccctaccttttagaatttattctagaggtcaggtccaacaagctccttttacagattgggaaactgaggcccagtgagatgacggaaggcaggcttctggcttcttggaccctcaccttctcccagggccacaaggctcagtggtcctccttctggatcctcgtgctggatgttcacttcccaaaatctcagtccctgctctaagaaatgaggcgaccttaggggaaagcccttcctctctctggatggtggttctcttatctgtggactgcaatgctgggcacacagtagataaaagttaatacatatgtactggatagatggatgaatggacaaatatcacgtgaaaataacacatccatggaaacacagggaggcttcatgctcaagggatgataaatttctcttgaacccacactgcgtgtggggatagtttaacccatatcaggtggcttcacccatcagttgtgatctccttggaaggggctccgtttcttaggggcagtaaccatcccgatgtcttcccatcccttcaccctcagggtggagagaacagctcctcaggtgaccttatgggcaaggaagagaggtagcctctctgtggtccgactctttcccagtcttgcagtttcatccctaaaaaacacatgtgtgcatgcactcacacacacatgcacattctaagtcccaagccaactcttgttctagaaaggaaagattcttttatccaaattcctaatcaaatcatttcacactacactgacccttggccaagctgggaatttctgagcttgctaaattgtatttgattttctttatcctgcacatggttacaaaagatgtgttagctaaataaacacctccatgaaatgcttaatccctttttgtgtaatggttggattgg

SEQ ID NO: 1507 - DNA, 1214 bp, Homo sapiens
aaaccaccccaaatttagtgacataaaatcacccttttattctcaccaacttggtgagcaaggaattcagaaagtgtataatggttggtcagatgtggtggctaatgcttgtaatcccaacatttgggaagctgaggcgggaggattccttgggcctgagtttgaaattagtctgggaaacatagtgagaccctgactcaagaaaaaaaaaaaaaaagtgttcaacagagctggcttgtctttggtcttcaatgtctgggacctcagctaggaagaccccaaggctggggtgggagtgacttgatagttgatctcaagtcatactaagactcactctcatgcctggctcctggactcggggcactaaaggatgaggtcaactgaccagaatgcctacaggtggcctttccatgcgctgggctttcttacagcttggcggcctcagggggccacatgctgcaatggaagctctgtctttaatctagccccggaagccacacagtgtcccttctgccacattctgttggttacaagtaagtcacaagccacctagattcaagggagagagttacactctaccttttgataggggagtggcaagatgtagaacaagtgggatgggagatactgttgtgaatgtctttggaaaatctaatctgcctaacttattttataagcttccccctgccatgattaagatgcttttgacaaaacaccacacctcttcaatgtgtctcttaggtattaaaattgtgtaattgatattagggtctaaaattctgctcagggagccaagagtgaagataatgggtgaacactgatttctttctacatttgttaccttatctgagaaagaaagtctcagttctcatttctttttctttttcttttctttttttttttaaattttactttaagttccaggatacgtttgcagaatgtgcaggtttgttaaataggtatacatgtgccatggtggtttgctgcaccatccaacccatcatctaggttttaagccctgcatgcattagatatttggcctaatgctctccctgtccttttcccctaccctccaacaggccctggtgtatgatgttcccctccctgtgtccctgtgttcttatcgttcaactcccatttatgagtgagaacaagtggtggttggttttctgttcctgtgttagtttgctgagaatgatgacttccagcctcat

SEQ ID NO: 1508 - DNA, 1201 bp, Homo sapiens
acactaacctaaggtacacatcccatctgggcggtggcttcactcctgagtctgcaaaatcccaggaaacttgggtcttgctgcccatccttcctcagcacagggaacccggaagcccgttgcactgacagaggctcacaccctctgggttttttgttttttttttaaacttcatttctcttccaacccattgtgttcctctgccctcattctttacctttgttgtaagaactttagctccagggaactgaggcagaggccctgtttgtggtctgtgttgacagccacccaccctctcccacctcatgctcctgcacctgcaccaccaaggttgatgccggattcgaagccaggaaggcccagtccctcctctgctctcctcaaagacgcaaaacattttccaacaagagctgtcacagtggcagcaaagcaggggccacccgtctccacagtccttcagagtttcagctgcatcctggtgtcccacccaggtcgagcccccaggcttctggaaaagagtgtgtgctctactttgatggaaacatggcaaggaatttaaagacaggaatgtattaatattattgaaggtgtgttcgtaacctctgattctgtggacttgccactttctccaaacgctcggttcctttgaagatttcttctgaacgtgtgtgcgcacgctgggcgggttcgtgcatacatgcggggaccccagactgtcagcacagggaagatggatcccatcctaatttttatcacctgaaggttggaaccagtgagggactgggagagagtgatttataagcaccaatatcaacttcatgtggatttttgacaaggaggggtagtttgtaatttcatttaaattcttttcagcagctggaaatattgcactatctgaaacactgaatctccttttgtaactggtgttcactgacaccttgatggctcttgatggctctaaaaagttgtaggattttttgtttttgtagctaacttatggattgagatgtgatcaaaggctttattaaatttgtacttcagcatatgatggctgcgttctgcatttcattccgccatatgcctggaccgttcacacttgggtatctgggcttagggagcatgtaggcttccacaatggagggaagatgtggaggggcgcagagcacatgtcctcatctccccagccagagttcagggatgt

SEQ ID NO: 1509 - DNA, 1195 bp, Homo sapiens
actagttgtcacactgggtgcaggggtgccactggcacctggtgggtggagaccaaaggtgctgtcagcatcctacactgcacaggatgcacaggacagccccgaacacacagaatgatccagaatgtcagtagggcctagtccagcagtgtcagcatcagccagggcaggaactagacctgcagagccccgggcccagcccagcccagccctcctgagtcagaatctgcacgtcgctgagatcccctggtgatgcctgtgcacactgtagtttgggaaacacccaaactgatcacgcacctgagccctgatcactcaaaggtgcaaaaaccggctcagagaggagtccaaagtcatctgccccatggggtagggccggggcaatggcctcatcctgcaggaatggccccagccttgacactggagtagagtccttggcattcacagcagctggcctcgtgtgccatccattaagtgcaagatggctgggcccccgccctccctgcacaatgtgcccagagtgcgtcatttatatctcctccttgtaggcggatatgggaagacccagttagcgttgatctctcatttcaaaccattctgtttgcttctctctctctgcccctccagactcagtgactatctcttcacgctagccagatatgcagccatgaaggaggggaatcaagagaaaatatacatgaaaaatgacccatcggccgagtctgagggactctgaaatcacagaaagtgggagcttggaggatccctccatggcgatggccgtggagagaggagcttgcccttctggggtcctggttcctgaagagctcacccagagaggctcaaagcagccttttgtcccagctcagctttgatctacacctcttgccaccttcctcaagggactgtgaccctttggggattctgtccctgaccctgcttccccaagctctcctgggtcttggagggatgtgggaatgaattggcattgcaggaaagacaggtaaagtgattgctgcaatgagaaggagctgtgcggaaaaggaataaaagttggaaaggctggagccgtgtgtgtgtgtgtgtgtgtgtgtgtgtgtgtgtgtgtgtgtgtgagagagagccctcccactgccagctcaggttgttcacagatttggaatgggaccagaggcccttgaaaatgtaattgtga

SEQ ID NO: 1510 - DNA, 1199 bp, Homo sapiens
ggtattgggtgcctgtaatcccagctattcaggaagccaagttgggaagattgcttgagcccaggaagttgaggctgtagtgagttgtgatggtgccattgcaccagcccgggtgatagagcaagacctctgtctcgaaaaaaaaaaaaagtatcagtatatatgttaaagtatttattaaagtatacaacaaatatatgtaaataatacagtcacagtatcagagtataaaatgattactgaaaaataaattaatttgaatagttactccagaaaataatcaatggggattctacttgaaaattcacttttttattttggaattgtgttgatttttatcctgacaccctttgttctggtattaatttccattactaagttttcccagcttacctcctttgaatgaattgggccttttgccaaccttttctcacactaacagtatcccaagagtggtaatgggtgggcatgaatgagaggttctaggttcttggtgtgggtcgcagagatctgttttttctgtctcacaacccgcttaggtgaatctgtctctgtcatcaagcacactgatcccgtccctgacccacgagctgtcaaccaagataaaaagaacatgctgttttctgtaagtactttatgaaatgtgtttttatttacagacatttccaaagcctaatcaaatgttatgtttttcactgccaaccatcactggctatcattctaaaggataatcacacttttcatggtcagtcttaggtgtcagaatatggcagtaacataacgtgtgacttagatgtcttttaattggcaagttttgggggaccaaaaaataatgactagcttatacatcttcaaactcttacctgcaaacatagttgaaaagtagatttgtttggaaaagccttagccaataaagggtattttcaaaatgatgtagatgacagctgctatttgtatgtggttcacaataaaaaggtgcgtgtttagagagagagagaaagcaaacatggcaaaccattaataatggtgagtctaggtgcaaagtatatgaatgttcattttactatttcactttttctattgatgtgaaaaattctttgaatagtgaggaaatgattttaagttggggacatttgtgggtttgtatgagaacctgactactacccatagtaagtaaatagaggtaccctgaaaatagt

SEQ ID NO: 1511 - DNA, 1197 bp, Homo sapiens
tttatatcaaggatgtgacatcctaaagctatgaacaaaatgaagaagctttggtactgtgggctcagaatagcacaagagttaaagaatggtttgataacgggtgtagtggtatttttttttctcataagaaaatgcaaaaaccgccaggcacggtggctcaaatgcctgtaatctcagcactttgggaggccgaggctggcagatcacctggggttgggggtttgagaccagcctgaccaacatggagaaaccacatctctactaaaaatacaaaattagccaggtgtggtggcgcatacctgtagtcccagctaccctggaggctgaggcagaagagtctcttgaacctgggaggcggaggtcgcagtgagctgagattgcgccatggcactccagcctgggcaacaagagcgaaactccgcctcaaaaaaaaaaaaagaaaaaaaatgcagaaacctgtctcaatgtttaactgggcatttttcaaactaggggacaaaaactagaacttgccacttttatttaaagtgatgctcttattttagaccaatctgaccttcgttggctgcgtgggcatgctggatcctccgagaatcgaggtggcctcctccgtgaagctgtgccggcaagcaggcatccgggtcatcatgatcactggggacaacaagggcactgctgtggccatctgtcgccgcatcggcatcttcgggcaggatgaggacgtgacgtcaaaagctttcacaggccgggagtttgatgaactcaacccctccgcccagcgagacgcctgcctgaacgcccgctgttttgctcgagttgaaccctcccacaagtctaaaatcgtagaatttcttcagtcttttgatgagattacagctatggtgagcatgtttgaacatgtacaggtgactcaggctacacaagcacatagtagcctctaattttgaccactgaatttttttgtcatagctccctaatttggaatttgtcatgatttgggtcttttctctagaattcggtgaatcagtggttagcatgttgtgtgctacttgcagggaagatcctagagtcgtttaaaacccagaagggccttccagatcagtcccagaggaacaatctggtgatctagtctcttttttaaatgagacgtgtttttattgtaagttttctgaaaattgaggatgtaatcagtca

SEQ ID NO: 1512 - DNA, 1366 bp, Homo sapiens
aacccttgccagtaagtggttgggtggggcttgggaccagccacctccttccaggggaggctggaggcgtgacacgtcttccctgtgtgtcagctcatcttccagatcacaccgctgaacgtgacccagtggctgatggtgctgaaaatctccttgcccgtgattctcatggatgagacgctcaagtttgtggcccgcaactacctggaacctggtaaagagtgtgtgcagcctgccaccaaatcctgctcgttctcggcatgcaccgatgggatttcctggccgtttgtgctgctcataatgcccctggtgatctgggtctatagcacagacactaactttagcgatatgttctggtcttgactgacagttttccataaagaagatgtttaacttaatcaattaatttttttattgtttaaagcaactgtctatttctgctgaattttcacatgaacatactggctggtgatggaggtttcatactctagattttgttttgctttttctgactccagtggggcaagattttccttttttatacacataattaaagtgtccattgacatgtacagagaactaacactattttatgcaaatatttttttgtagatgaaaaagcatgtacagtgttctgtttaatactcatccttgtataaaaaaaatagttgagccagcagacattgtcagcaaattaattggcagcagattttaggaaatgaatgtgtgtggttttttttctaaaactaaatagcatgtattgtgtcttttgcatgatgatccggatttaatttgatatcacagtctaatttttattcataagccaatttttctgcactgagcagagtcttgctacctcagtcagtattgttttggtttgctacttccctcacccactttggcctccgttcaccccaccccaccccacctctccccaccttacccccgccccgcttggcttcttctttaggattgtgatggttcgttctgtttacatcagttttaacgagaggtatgcctgtactcgcttgtgcagaaaacattgttccagattcaatcgactgggtttatgtcccttcacatagtttttaaggttatttatttaaatgtctaatgtattttattgtaacagacattgttttgccaacattgcctatttcagtggcacgtcatctagttttaaaaaaataaaacattttaaatggacagagaaaaataactgtcttgtctttaactcgtaagtggcttacctgggactaacagacatgtccaactttctctccagttcttagctcagaactttagttgtactctgcttgaggggaagaaggctcctgctctgctgtgtaggtagtcataggaattg

SEQ ID NO: 1513 - DNA, 1705 bp, Homo sapiens
agtaggattcctgttgtcacatattcaatcaagaaatacttaattatggtttttggccgggcatggtggcttacacctgtaattctagcaccttgggaggctgaggtgggtggattgcctgagctcagcaggtcgagaccagcctgggcaacatggcacaaccccgtctctactaaaaatacaaaaattagccaggcatggtggcgcgtgcctgtagtcccagcttctcggaaggctggggcatgagtatcgcttgaacccaggaggcagaggttgcagtgagctgagattgtgccactgcattccagcccagggggacagaacaagacactgtctcaaaaagaaaagaaatactaaattatggtttttctctcatgcatcgctcagaatagggaagcagttgccttttagccaagggaagatgtagcccgttgctccttgcatgtggaagagagatatcgtgccttactttctttcttctgctttctgttggtttaggcttgttgtccctttctgtaaaaggggcagaggtggcatccatgacaatgaatgtgatccaaaccgtgcctaacttggactggctctctgtgtggatcaaagcgtatgcttttgtgcacactggtgacaactcaagagcaatcagtaccatctggtgagagccacaaagttaattcagtgttcttgaggccctttgcttgtctggaagtctgatgtatctgaagtagcaaaaagaaaaatgagatgctttgctgttggtgctgcagccagtctctgggatgtgttagtcttttatactgaatggtcccaaatgtaatcatgtaatcatctctgttggagacctgtaaaaatagaaatctgactgagtttagctctgtgcctgcacaggtagtaacccttgcaaagcaaagcaggctaccttggtgtgtcatttttttttttttttttgagacaaggtcggtctctctctctctctctctctctctctctctctctctctctctctctctgtctctctctctctctgtctctctctctctgtctctctctctctctgcctctctctctctctctgtctctctgtctctctctctctctctctctctgtctctctctctctctctctctctctctctctgtctctctgtctctctgtctctctctctctctctctctctcccaggctagagtgcagtggcgcagtcacagctcagtgtagccttgacctgtcaatctcccgggctcaaaccatcctcctgctcagcctcctgagtatctgggactacaggcgcatgccaccacacccagctaatttttgtatgtttttgtagagatgggatttcaccatgttgcccaagctggtcttgaattcctgggctcaagtgattctcccacgtgggcctcccaaagtgctgggattatagacgtgagccaccatgcctggccttggtgtatcattcttcagcctggaagaaaatcattttgcactcaccagaagcttggtttattgcagtgtctaacctagcttgcctgcttaggactagggattttctttatattcagataaagttcaaggacaagaagagacttgggcttgtgttatgcaaagtcgtttacttgagtaataaataggtgtcacttgtgaatgacattacctttaacaccatgtagcgtatgttgtgttctgaagaactgcaaccacagagtt

SEQ ID NO: 1514 - DNA, 1384 bp, Homo sapiens
ggatcccctacaggttggagaaacacttttgtaaagaactttttcccctgtatcagaaggagtagctaaagatactaccaggtgtagacttcagaagattgtcattatactcagaggcaaaataatttgtccagataatagattttatctgttcgtcatagcgttaattaccaaatgtttacattcaacatagcttgtgttaatatgctaggggggcttttacagttgttggggcagttgtgaacaccatctgaacagaagatctgaatgaaatttaaggactcttaagatttggggttgagtatatttcctaaattaactgtcttttgaatctccagattttaaagcctgcagagaaaaagaagccaaatgccacgagacctgtaacgcctccaaggggtatgatcacaaagcaagcaaagaaatagatgtcgttttgacactgcctagtcgggacttgtaacatagagtatataaccttcatttttaagactgtaatgtgtactggtcagcttgctcagatagatctgtgtttgtgggggcccttccttccatttttgatttagtgaatggcatttgctggttataacagcaaatgaaagactcttcactccaaaaagaaaagtgttttgttttttaattctctgttccttttgcaaacaattttaatgatggtgttaaagctgtacaccccaggacagtttatcctgtctgaggagtaagtgtacaattgatcttttttaattcagtacaacccataatcatgtaaatgctcattttctttaggacataaagagagccctagggtgctctgaatctgtacatgttcttgtcataaaatgcatactgttgatacaaaccactgtgaacattttttatttgagaattttgtttcaaagggattgctttttcctctcattgtcttgttatgtacaaactagtttttatagctatcaacattaggagtaactttcaaccttgccagcatcactggtatgatgtatatttaattaaagcacacttttccccgaccgtatacttaaaatgacaaagccattcttttaaatatttgtgactctttcctaaagccaaagtttctgttgaattatgttttgacacacccctaagtacaaggtggtatggttgtatacacatgctgccttcttggggattcaaaaacaggtttttgattttgaatagcaattagtgatatagtgctgtttaagctactaacgataaaaggtaataacattttatacaatttccatatagtctattcattaagtaatctttttacagttgcatcaggcctgaacccgtccattcagaaagcttcaaattatagaaacaatactgttctatacgagtgaccgattatgctttc

SEQ ID NO: 1515 - DNA, 1114 bp, Homo sapiens
tctctgcatctatcgaaatgatcatatggtttttgtacttcaaaagcaggattccagagtctagaatcaattctgccaaattggccatgccccttacagaatgccacttggtaggggagtgcatgtttccctgcatcttcaccagcactgggtgttatggtcgcgttggatttctgctgtggtgcccggtgtgtaatggggcctacacctgcttgcccacctgcttactccttgtcgcccccccacccacgtgtctttcagcccggccgcaccacctgggtctccgccatgaacgggcctgccctgcagccctcctcgccctcttccgcgccctcagcctccccggcggcggccccgcggggctggagcgagttctgtgagttgcacgccgtagcggcggcccgggagctggcccgccagtactggctgttcgcccgggagcatccgcagcacgcgccgctgcgcgccgagctggtgtcgctgcagttcaccgacctcttccagcgctacttctgccgcgaggtgcgcgacggacgggcgccgggccgcgactaccgggacacaggccgtgggcccccagccaaggccgaggcgtccccggagccaggccccggccccgccgcccctggcctgcccaaggcccgcagctctgaggagctggccccgccgcggccgcccgggccctgctccttccagcactttcgccgcagcctccgccacatcttccgccgccgctcggccggggagctgccagcggcccacaccgctgccgcccccgggacccccggagaggctgctgagacccccgcccggcctggcctggccaagaagttcctgccctggagcctggcccgggagccgccacccgaggcgctgaaggaggcggtgctgcgctacagcctggccgacgaggcctccatggacagcggggcacgctggcagcgcgggaggctggcgctgcgccgggccccgggccccgatggccccgaccgcgtgctggagctcttcgacccacccaaggtaagtaagccctgcccgcggggttgcgcactgcactgcgcccttcgccttcaccctggggagagcgcgggctggggaggtgtgatggctttcc

SEQ ID NO: 1516 - DNA, 1191 bp, Homo sapiens
tcctaaattcctttgtactttttattttcttccttggtcttcaattatcttaagactaccaagaaaacaaaaattttaaaaatcttcttcagccggtcaggcgcagtggctcacggctgtaatcccagcacttggggaggctgaggcgggtggatcacgaggtcaggagttcaacaccagcctggccaacatggtgaaacgtcgtctctactaaaaatacaaaaattagctgggcattgtggcgcgttcttgtaatcccagctgctcaggaggctgaggcaggagaattgcttgaaccaggacccgggaggtgtaggttgcggtgagcggagatcgcgccactgcactccagcctgggctatagagtgagactccatttcaaaaaaaaaaaaaaaaatctgcttcagctattctgttaatcttttgacattacttagatggtctggaaataaattttgagaataacatgattagaagtgagagagtataagcatagttttggagatacactcagaatagcattatagattttctctttttactaattggaaaaatggcagttgttgaataatagttttcttccgtgacccttgtgacttaaaaaaaaaaaaacactgaaatgaaataatcgaaccattttctctaaacctttgaatctgagctctgcagttaggtttataatggtatatgaaacctattagatatatacttggaagtcatatgggatacaaaccctgcttttattatcttccccttttgactaacttgggtctcaagtttccttaattactgcacagtggaccttgatgttgctataaagaatgtgtagggctgggcatggtggctcatgcctgtaatcccagcactttgggaggccaaggtaggcagatcacctgaggtcaggagtttgagaccagcctggccagcatggtgaaaccccgtctctactaaaaatacaaaaaaattagctggttgtggtggcgagtgcctttaatcccagctactccagaggctgaggcaggagaatcacttgatacatttagttaggagagaaaatcatacttatgttagtaattgctgctgttcttcatatacttgtggttttgattgccagcaaattcctaacattttggaaaagaaaacagtaatgggataaagggtaagggctagagaggacagttttatttacct

SEQ ID NO: 1517 - DNA, 1099 bp, Homo sapiens
agggaaagcgttggcttctcccttctttctcccaaacattggaagtatttttggctgttaaaaagcaccccttgttccatgtggaatcccttgtttaaaagaagtaaaatatgtacctcctgtcctccacagacctgaggaccagtgtgatctcaagaaggttacaggtaaatgtagatgtctctaactgaaaggtggcttttacaggttagagaaaagagagaaccctgatctgaaggctattttatgaagtaattaaaatgttctaaactttaaaaataactgctcaaataattgtgttgtatagttacttatcaactggaggggctgataagtatttttctaaaacatttttaaggaaattttttcctattttctaatttgctaattttgctcaagtagtttgttagatattgttaatatagatgttggttataactgaatgaaagggaacaactactttgacattttgaaaaacaagcttcattttcttctagtctaatggatgggatcccaatgatatgtttcgatataatgaagaaaattatggtgtagtgtctacgtatgatagcagtttatcttcgtatacgtaagtttgaaaagtttgtttttattttagtgcatttgtctttgattttcatcagcttaatttatgatgaataaatgtttgttagtttttaagttaaacaattacatgaaataatttttctcttattaccaactgtgataaatttccattaaaaaaagggaataaatgtagtttgcctataccctgtttttatgctctaaacaaattttggttttgtctttttttttcttttgagagggaatctcgctgtgtctccaggctggagtgcagtggtgcaatctcggctcactgcaacctctgcatcccgggttcaagcgattctcctgcctcagcctcccgagtagctgggactataggcgcgtgctaccatgcccatctaatttctgtatttttagtagagacggggtttcaccatgttggccaggatagtctcgatctcttcacctcgtgatccacctgcctcggcctcccaaagtgctgggattacaggtgtgagccactgtgcctggc

SEQ ID NO: 1518 - DNA, 1194 bp, Homo sapiens
acgacgccctggccggggagttcatcagggcctctggtgtggaggcccgccaggccctcttgaagcaggggcaagataacctctcaagtgtgaaggagactcagaagaagtgggccgagcaatacctgaagatcatggggaagatcttagaccaaggggaggacttcccagcatcagagatgacacggatcgccaggctgattgagaagaacaagatgagtgacgggaagaaggaggagctccagaagagcttaaacatcctgactgccttccagaagaagggggccgagaaagaggagctgtaaaaaggctgtctgtgattttccagggtttggtgggggtagggaggggagagttaacctgctggctgtgagtcccttgtggaatataagggggtagtgggaaaagtggtactaacccacgattctgagccctgagtatgcctggacattgatgctaacatgaccatgcttgggatgtctctagctggtctggggatagctggagcacttactcaggtggctggtgaaatgacacctcagaaggaatgagtgctatagagaggagagaggagtgtactgcccaggtctttgacagatgtaattctcattcaattaaagtttcagtgttttggttaagtggacctgaagccattcttttttcttttcaaattatactttcgtctatgacctgctttcctctttgaatctaagctggtatagactccactttcccagggtaacaaactatcctcataacactgtggaaactggcatacctttgttattttccagtgatattcagactgacatggattgactgtcaatggtaaagtttgtctattttccagtccttaaaactcaatagcagtattgatgaatatattgaaccaacattgatggaccatggtgtaattattttccatgctttgtgaggtacacatagcaaattcttagttttactgatatattctgtgacttggatttacacagctaaatgatatagtccgatttcaaaattaaaaaatattttccatctaaatcactatcactaaataaatactaacttctagaaagcagaataaagagcacttgtgccaacattcacatcttttcttcagactcagaagcagttatctgcaaaagtgagcttcacgacagctctactttcatatttaaccatttgaaaatgtca

SEQ ID NO: 1519 - DNA, 1159 bp, Homo sapiens
aatctggggggatggtttttaaacaagactaattattcttgtctcctcctttataggaagagagaaaattttcaaagactgtgcaagggaaggtgcagagcagttatctgcactcacttctggaaatgggggagctgctgaaaaaaagacttgagaccacaaagaaactaaaaatttaaggaagtatctatcatgggcactgatgactctgcaacagaatatgacaccatcttcccaggcaaaagcaacatctggttgaccatgattttaatccagaacttcctcataaaatgcatgaaggactttgatcgtgaatttttttaggtgttaaatatatacaactgattaaattattgtatataaaccagaagcgggaccctcatctgggtttgaccactttttatacatgttcatatgcatatggcagcaacaagagaaccctacttttcttcttcccatcaccagaaacatcttttcaggggagcggggggtctataaaaacagcaatagaaattaagcataaagcatcaacctcatagcaactgaatagcccttccattataaataacattgagagtttttggtctggtccttgagccacaagaagtggaggggagaccatgcctgggaacagacccccttttcacagcagtaagtttgttttgaggctttctcagctacttggctcccacagaacccaaggcaggtacacaaaggaccttagatgagatctggcatatgcacccgcaatagaagggcaccacttggatgaccacaggcacttagtttttggctagtttttgtctgatagttaagacatccccatcctagcttctgtgagagttaaaaatctcaggtaagaaggcaaggaaggctctgttaatttatagctgtttagaggggaaagcagtgcagaccacttattaagcccgctgaggactagctttctgtctttcatacatttgggaaagataggaatgactgtttcaaagaagagaggtgcacataatttatgcaggcaagtatgatacttatttcattggttttgtgagtcatatatatacatatatatatatacacatatatatatgacttgaaaattaagatttaatactttaatgttttaagtgtggggggtttgggaaggaaggaatgtaat

SEQ ID NO: 1520 - DNA, 1137 bp, Homo sapiens
tgttaggacctttttgtgtgtatttatattcatagagaaaatatacagtattattgtattattttgtactttaaaaaatgtaaactcggccaggtgtagtggctcatggctgtaatctcagcactttgggaggcccaaggctggaggattatttgagctcaggagttcaagaccagcctgggtcacttagtgagtcctgcctcttttaaaaaaaaaaaaaaattttaaattcagttttatattcaagagatctgttcaagctaatgcctgtggatcaatcttgttcattaaacagctgcagaatataaatgcaccactgctgttggacattttaggttgtttctttatatttgcttttacatatgttaccgagtgaaatgtatttgtgcacacctttctatgcacatttgtatttctaaggaaaattaggtctgaagtactagtattgttgggtcagaaagtatgttcccggtttcttctacagttctaggctctgcagcactcaacttcatgtaaacctaatcagtcttcagccaacctcctttctctgtgagaactcaccccttcccttttgttttttgtgatctctactacagcaaacatttgccagcaaataataactcatattgaagaatatatagttggtctcttgaactcaggggctttgtcaatatggaggagacttgttaatattgtaactggaaatgatggagttggtaaagttgaggccattattaaaagtggctatgatgatgtacaaattagtaataaatttctacttttttctgatgaaaacaatcagaaatctcaaaatttccactttgcacaggttataacaaaatagtagggattttatgtccaaactagtcataattttctgtttttattgattaaaaagtagtgatcagaaatctcagtttttcttctaatttttttttttttttttttttttttttgagacagctttactctgtcgcccaggctggtgtgtagtggcacgatctcagctcactactacctctacctctagagttcaagcaattctcgtgcctcagcttcccaagtagctgggattacaggtgtgtgacaccatgcctggctaagttttgtatttttagtagagatggggtttcacca

SEQ ID NO: 1521 - DNA, 1197 bp, Homo sapiens
ggagtgaaataagccaatctcagaagttacacatagtatgattccgtttatttaatttttttctttttcttttttttgagacagggtctcgctctgtggcccaggctcattgcaacctctacctcctgggttccagtgatcctcgtgcctcagcctcctgagtagatgggactacaggcacatgccaccaggcctggctaatttttgtatttttagttagagacagggttttgccatgtttgccaggctggtctcgaactcccgacctcaagtgatccacccgcctcagcctttcaaattgctggtagtacaggtgtgagccactgtgcgtggctttattctataaaatagaacaagtgttccctactgttgagtttgcagagatttttatatatcttagatacaagttctttgtcagatatgtggtttcaaatgtattctcccagtctgtagtttgctctttcatctttttcatgaaattctgcagcacaaagtttacattttaaagtctagtgggctctccttttaatgtcttgtttctttgtttctttttttttgagacggagtcttgctctcgctctgtcgcccaggctggagtgtgttggcgcgatctctgctctctgcaacctctgcctcctggttcaagggattctcctgcctcagcctcccaagtagctgggattactggtgtgctactatgcctggatgatttttgtatttttagtagagatggggttttaccatgttggtcaggctgggaagattggaagtctttctataacagggctgccatcatccgttctcccagaaagccttctattgtccccatgtggaatgaatgaagtgcactgggagcacagtggatataattagagtatttttttagtgaccacatttgtagtccatgaaggttcagtactttggcagacttggggttacacatttgggcagatagagcagtgcattccccaactgataagtaaccagtggtctctggggttctgaaatgactgctgccattcacgttggtttagtaaagctctgtttgagttgctgtggttatagggctcaggccaagcctagaagtttctggataaattgtaacacatccagaaaggagagttatgggttataggaggatttaaaagcatataagagggaaaaatggttgagtggaggagaggtttggtctgtcaa

SEQ ID NO: 1522 - DNA, 1213 bp, Homo sapiens
ttttccctattgatgatacttggatttttgaagatctctttttttttcctttgtccttttgttattggctattgtaggcagtactacaataaattttttttcctttttataggcatctagagttaaatgaataaatggggccgggcacagtggctcacgcctgttatcccagcacttcgggaggtggaggcgggcggatcacaaggtcaggagatcaagaccatcctgtgaatggtgaaaccccatctctactaaaaatacaaaaaattagctgggcgtggtggcgggcgcctgtagtcccagctactctggaggctgaggagggagaatggcgtgaacccgggaggcggagcttgcagtgagccgagatcgtgccactgcactccagcctgggcgacagagcaagactccctctcaaaaaaaagtgaataaatgggatcttttaaaaaattaatacagaagtaaaattcaagatgacagttatgagctgatgcttgcttcgtaatattaactaggttacctaatttttctcagttttcattcttaaagcaataaaatgtacaagaccccatctcaaaaatatatgtgtgtgtgtgtgtgtgtgtgtgtatttaatttttaatttttgttttttttgagacagggtctcactctgtcacctaggctggagtgcagttgtgtgatcttggctcactgcaacctctgcctcctgggctcaagtgatccttttgcctcagccccaaaagcagcttgggactacaggcatgagccaccacgcctggctaatttttgtattttttgtagagatggggttttaccatgttgcccaggctgatcttgaactcgtgagctcaagtgatccacctgccttggcctcccaaaatgctaggattacaggtgtgagccaccgtgcctggcctttttttctttttgagatggggtcttgctctgtcacccagtctggagtgcagtggtgtaatcttgcctcccactgtaatctctgcctctcaggctcaagtgatcatcccacatcagcctcccaagtagctgagactacaggtgtgtgccaccacaattggctgctttaaattttttgtagagatggggtctccatgcattgcctaggctggtctcaaactcatgggcccaagcagtcctcccacctcagcatcccaaagtgctgggattttaggtgtgagccaccacacccagc

SEQ ID NO: 1523 - DNA, 1180 bp, Homo sapiens
gctggtgcgatactggtatcctattgacatgttggaaaggcccccagcaggctaccgaaggactgccaccaatgggctggtcacactggacaataccaaccttcaaattcacaggtacaattgggcccttctttctactgggtcacagaaatccaccaacttcgctctaccacatgtaccatgtaccatttatcctcagcaagaaagtttttccttcaaagctaacacttagagaaggcagctaataaagataacagcaaaattgcaggaggtgtgaagaaaagtcgggggatctaggggccaggcatggtagctcacgcctgtaatcccagcactttgggaggcccaggtgggcagatcacttgaggtcacaagttcgagaccagcccggccaacctggtgaaatcgcatctctactaaaaatacaaaaattagccgatcttggtgatgggcacctgtaataccagctattctggaggctaaggcaggagaatctattgaacccgagagacggaggttgcggtgagccaagattgtgccactgcactccaacccgggtgacaaagggagactccgtctcaaaaaaaaaaaaaaaatgggggatctagaatcatctgacttatgcaacatgcaccctgctgtgatttgggaggactgatgggtagctagagattgactgactcattgaacttaagaccacccaaacgctgcaatgcaatctcaaccggagacagcaagaggtcttgccgtctagacagataagcgtatctggagttctagtgagagatgagagctggagatacactcaacttgattcaaaattgtcaacatcacaagaaatcgtgatagctaatggatgaatagccatcacattccacggattggaagagcgtggagaaagttacggagagtaaagcaagtcaagaaaaggtaagaagatgtccaggtacagtgtaagctcctttcgctgtgaagccaatcaggtattgcttgagtgctttctatgtgcctagcactgtgcaggcttccagaagagaaggtgttcaaggcatgtgcctgccctcagtgggctgaaacctaaagatctggcaaagctccctcatgttcaccattgccaattcccctgagaattattcctttccatcttaaaatgtcttgtaataattcagaggaaaatata

SEQ ID NO: 1524 - DNA, 1288 bp, Homo sapiens
ccaggctagagtgcagttgtgtcataacagctcactgcatcctcaacctcttgggctgaagcaatcctcctgcctcagactcctgagtagcttggatgacaaggcatgggccaccatgcccagctaattgtttttattttttgtagagtcagggtcttgctatgctggccaggctggtctcgagctcctgggtcaagtcatcctcctgccttggcctaccaaagtgctgggattacaggtgtgagccaccgtgcctggcctgcagatacatttcttaaatatgctgactaacatacatgaagaagtgtaaatattatctgaatatgcagttgtttccttggggacaaaaaaaggacggctgttcaaagataattaaaggataattcttaccttctgttaagaccagtttaagtaagttattgatttcagtttcacctgggtacaagatatttaaaccagagctgaaatgacaaaaaagtcaaaaacatttaagcaaatgttctagaaaatcaactctaaatatttaaattcatatttttattaaagatgtcaattggatgtgagggcaatctggctgcgacatctgtcaccccattgatcgctggggttgattcggctgatctggctggctaggcaggtgtgcccttcctccctcaccgctccatgtgcgtccctcccgaagctgcgcgctcggtcgaagaggacgaccatccccgatagaggaggaccggtcttcggtcaagggtatacgagtagctgcgctcccctgctagaacctccaaacaagatgtcaattgattacataaaactgtgaaataacttttatcactaaaaaggcattaaaaaaaaattgagacagggtctcaatatgttgcccaggttagtcttaaactcctgagctcaagcgattcacctgccttggcctcccaaagtgctgggattgcaggtgtgagctactgcacctggcctaaaaaggcatttgaacctaaattcactgtcacgatccagtccaatcacttccctgataagtggcatccctctcctcctcttcctgtgaattacccaaatgataagtacttggggctagatgcagaactggttagagagaattggtaagctatgaaaagtcaatgtagtcaagcctacatataactattgtgcctccccaaaaaaacacttgagaaagtaaatttctaattctcagcttttccgaagagaagggaagaacaatattgcaaatggcatcagaatcttttttcttttcattaatttatttgtgtgtgtgctt

SEQ ID NO: 1525 - DNA, 1152 bp, Homo sapiens
ctttccccatcttgttctgttaatgcattttagccttgttttggcccagaagagtttggtagccccaagatcattgtttccagccagaaagtcctccatgatcagtatttttgtaacaatatcagtgacttctccatgttaataagtggacatttttctacttaagtctctttgaacttgggtttgacattggattagcaagtgattttcagttgggatataagatctataaactgctgccaaaagaaactacagtttgaaagccttgtatacatttagatcttttcccccaaatttttctcccctctaagttattgtggaaagtcaatatttgctatagtttggcagtcctgaagttaatgtaatacattcactttccttcagatgttttacatacttactcattttttaaaattaggtcgaaaatgttgtttgtgtctgttgtagcttgtgtggggtttctgacatagccaggtgattcagcctgtgctccatttcattccacagaggttttgtgtactgccggaacgaggagttggaaccaggatgggtggcttttggcagcggcagtcttctccaccggcctgtctctttcgataataaacctcactcccttttccaggtcattgaccagaacacccttcaggtaaacagaaaaccaaggcatttttaaaacatattttagaggcaataaagaaagttcctatatcatcagaagtaataataatacagttgatatattttcctcccagagtggcatccttttaattgttatagtttgggcattctgttttttatttaatgtcttagacttttcccatatgaactgagtgaatgtgttctctaagtttctgcagcctacaacaaacttttttttataattaagaaaaaattctagacagtcaaagatggtataaatactagctggttttttttttttgttttgtttttgtttttttttttgctttttttgaaccagatctattttgggaaggcatcatttccttattcaatttgttctaaacagcctctctgtgggaaagggagctttgaaatgagtgtagagtaaaatcattgtgtgctagggattgagagcttggctttagtgctctcgtaagcactctgccatggcacttgctgtattatactgca

SEQ ID NO: 1526 - DNA, 1213 bp, Homo sapiens
tgtctgtggttggttccttctgttaattaattttctgtctgcccaagatagatcatctcaaggcttgggatctctcagtgtcagggaccttagggtgccagatttgtgtcttgactcctcctcactgggcctgtgagtcctgggtaaggcctgcctcctttctgggactcagttcccttaagtgggaaacagacaaacacctcctgagggctcctagaactgttctgcttgctgatcccctgagctcaagttactggagaaagggtatatacctaaactgctcagaagaagactttgtgggccgggcgcagtggctcacacctgtaatcccagcactttcggaggccgaggcaagcggatcacctctgatcaggagttcaagaccagcctggccaacatggtgaaaccccatctctactaaaaatacaaaaattagccatatgtggtggtgtgcgcctgtaatcccagctactcgggaggctgaggcgggaaattggttgaacccaggagatggaggttgcagtgagccgagatgtgccattgcactccagcctgggtgacaagagcaaaactccgtctcaaaaaaaaaaaaggaagactttgtgaatattcgcaaagctgtaaagctgtacctttcaatttttttttgagacatagtctcactctgttgctcagggtgcagtcacagctcactgtagcctcaacctcctgggctcaagcgattctcccacctcagcctcctgattagctgggacaataggcaggcaccagtacacctggttgattttacagtttttctgtaggccggcgcagtggcttacgcctgtaatcccagcaccctgggaggccgaggtgggcggatcacctgaggttaggagttcgagagtagcctggccaacatggtgaaaccccatctctattaaaaattacaaaaattagctgggcgtggtggtggatgcctgtaatcccagctacttgggaggctgaggctgaggcaggagaatcgcttgaacctgggaggcggaggttgcaatgagccggaggtgctatgtgcaccactgcactccaggctgggcgacagagtgagactctgtctcaaaacaaaaaacgatttaaaaaataataaaattttttctagggcggggtctccctatgttgcccaggctggtcttgaactcctgggctcaagtagtcctcctgcctcagcctccca

SEQ ID NO: 1527 - DNA, 1611 bp, Homo sapiens
ctctctctgcctgcagtcctgagtctctccttcttcgtgtagtctctttcagtggcctggctggcagggtagctagacctctcacatgcagctcagagctcccaagagctcaaaagcagaaatggccaggccttctgaaaacttaagtccagaattgtcacagtgtcccttctacttccctctattgatgatgatgatgatgatgatgatgatgatgatgatgatgatgatggttttttctaatcagaagaaagctggggtatgccctctacttactaaacaagtcacaagcccagctcagattcaagaaaagggtgtgaagtagaggtgcagttaagtggggggccactagtctaacagacggtcacaaccagtgccatggaaaaccaaggatattagcaaaagcagaagttgctagtgaccttgggaagccgaagctgcttacagtagctgggacaagctgaaagtcagactaagaaataaagagagggccttcaagaagcttcctgaatgatttctgctagccctgagcctatttttggaaccagcacttggggaaactgatcttgtgaggatggatgtgtttagggacacagggcttttgagagcagcaccaccccactggggcatccccagacttgggaaacgtgactctttcttaatgccactgggttttagtcaggccacagtgagaaggaacagccctaacaggcctccagccaggttgaatgagctcatttttgttgtagccaaccagtaagatttgctaatgttctacattaagtgccttctccaaagacatccctctttgcctcatatgttgaatcatccagtgcggatatttcaatgaaaatatcattggttgacttttgtgatggtaataatgctatggcatctttgccatgaagttgtggcctccttggattcttctgactttggcttctgaaaggaaggcctagatccagccctggtggtagttcctttctgaggtctctcagtcccttgagactttggggtagtttggctgccattctcactgacaaaatgtatatcagcccccacctccaccccccaatattccttgaactttgaattgcttcagaacacaggtgtggcctgaaggtattcccttattagggaagtgtcactgctgtcttctagtcaaacttgtaaagaaaaagattccagttcagtatttgcagcaagaagcttgaatgctgttctttttatcgcattgttacatcgactcattctccattttgctttggttttgtcttgacttgacttgactttgggggtaaagtctttcaccagcacacaagagtttgattgtacaaatatatcttctgcattaacatctctgcctgttgcttaagatcagttgcttttatactcagaatggaaatacctgatcttggctagttttgttataagatattgatttcatttagatttccctccacgaggtcagcaaactatcatgttcttatgtaaacttaggccaaggccagagttatcatagtccctaggttgctacggcttatcatgtgcttggtaaaaggtgatcgcaggttctcagacgagtttactttacatgagatggaatcaggc

SEQ ID NO: 1528 - DNA, 1225 bp, Homo sapiens
ctgcactcctagagccatactgaagaggagctggaccttcatcctggggtggcggaaaagccccgggcactttaagcaggggaatgaccattgtttttcagggtagtgtctgaacattcattcatgctgccctggcaagagcagttggcaatgatggcaagaccgggcagtgtggaggtggcccagggacacggggtgcctactgtgttttgcctgaactgtgttttaagaggctgcataaccaagcagttgctgtgcacgtacagcttggcatctgagtctcccaccccccggcaccccatgtttgttacctgcctggtgcctgtaggcatttgagtttgtagcccctggttgaattctgacggtacagccctttggctggacaccatgcagctcagccaggggagtagcagaagatcaactatggacaggtgtgacttaggaagaggtggagtttggggtgctggggagagggaccgaacatcccagggaggggaaatggcataggctgaagtaaggaggggggttgcagtgagtcgagattgtcactgcactccagcctgcctgggtgacagagcaagaccctgtctcaaaaagaaaaaaaaaaaaagaagtaggaactcttctgagacccacaccctggacggggccagagactagcatgctgggggcagattggatttgggtgtggttacatgcactctggggtcagacccactgagtttgaatccagccctgacttctcctgctgggactttgggcagatgatgtaacctctctaagctttgatttcctcatccgtaaaatgacactaatattagtattaccttttaggactgttctgaggtttatacaagatagcatgcctcacacaactagcacagtgcctggcttatacagaatgagcattgggtggatgtcagccattataattagggtcaggggtcagagcaggcatatctgttttacagagtgcctaaaatgctgatggcaggagtttggacctggttgagttgggcatgggagctgctaaatgtgtttgggccagaaagcaagtgatgacagagcatcttcctgctgacatcttgccagctcgggatgctgtctctagccaacttgataagccctgagcttagaaaccctggggtgggtcagccctgaataggggttacttttccctctggagattgagaggtggatggagaggaaactgccaggctattct

SEQ ID NO: 1529 - DNA, 1130 bp, Homo sapiens
gacagagcctccctctggccttgtcctcttcccagccacagaacgggcagggtggcacccgaccccaggggagcagtacctggtcccccaccccctcctcccaaccacctccaaggccaagctgggtcccatagccagcacggcatggttctccccttccccccttcccaggtcaggggagttggacaagtagcaggtgtttgtttttaaagcacagccctttgggaaagcaacacattattgagactcactgtgattcccccgggagtcagactggctttgtcctcttcctctctggagggccatgggccatcagcaggagctccacatcgagccccaggccagaaccccctccctttcacagagagggaactttattgcacaattgggtgccttttagcttttgtgtgttgaaatgggcgttttggaagcaagggtcaggggacagcttctaaaggtgtgagtctctgacctgagcatctgggcctcgcctgggcccttcttcctccccaggggtggaaacgtggaggggccagcagcaccccggggtctgcccaggggagtcaaggccccgaggtgggggggcctattccaggaggagtgggatctcggccctgtccagagcgagttaatgtgtccatctgcccaaccctgtcctgagaaaggacctggttttggccaggacctgacaaatacccaatggcagcagtgtcaacagacgggagtccagccagggtgggtgcccttgtcattgaggttagggacagctatccccaggttatgcctggccccacccagcagggagttggggtccccccacaggctgtgagctctgtgggccctgggatgtgatctagctcagatgccctctcatccttgatgtcatagttgagtgcacccaagtggcacccactggcggccaggggcacagcctggtggtggtggcaatagaactgtgcccctcctcagctcctcgcttcccctcccacagccccagccttactccaccatgcggacaatcattttgtacggatcacgggagcaatgctgtacggttttgtacactggtggtttgtttcctagaaaacccattgtgtctctggatttctagcacattactaaaagagcct

SEQ ID NO: 1530 - DNA, 1401 bp, Homo sapiens
cctgcagtgtggccaagagcctgggtgccaagacggtggccgctcgggccctggagtgcatgcaggtgtgcaagattcactctgaagtggtggaggacaccgaggctgtgagcgctgtgcagcagctcctgggtgagtgatccctgtcctccacctgggctcagagacccacgaagtccctgcatcctctagcaagagtgtgttctgtcttatctgtatcctcagcaccaggcactggctaggtgtgcagttactgtgcactaagtgcacgtcgagtagatggaagggggtgaggataaagaaggagtgtatcttgctgtctctagcccccagactttcatacatgctgctcctctctctggctggccctgctccctattggtttgatgtgactgagggctatcagccatcatagcacctccttcaggaagcctcccttgatcactcaccccacgctgcctgggttgtggacctccaatgcaccactccctgtgttcataacctcctggttcttatccctctacatcactgatgtgagccccatgagggctggtgtgtcttagtccctgacgtgtccctagggccttcctggcatagggcatggcaggtagtaggcactcaatagatgtttgttgattgaagggatgaatatatgagtgagtggaaaggtgggtaatggatagatggacagtggatggatggacggatggatggataatgaagtgacggattgatgaatggtatagaaatgaatgaatggacagacacattgattaatgaacatgttgatggatggacagacagtcaaatgatggatagaggaatggatggatggctatgaatgggtggatggatggatatgttgatggatgggtacactgatggatggacagatagatagtctaatgatggatagaggaatggatggatggatagagagataaaaggtggatggtggaaggataggaggccaggctgatggatggggagagcgtgagacaagtgatggattgccagcagagcagatgaatggctgactggctggagagatggctgcaaggatctgccgtgcccagggcctgctgagcaccgagtggttcttcttccctttccttcctctctccatcccccgatcctggcagatgatgagcgtatgctggtggagcctgcctgtggggcagccttagcagccatctactcaggcctcctgcggaggctccaggccgagggctgcctgcccccttccctgacttcagttgtggtaatcgtgtgtggaggcaacaacatcaacagccgagagctgcaggctttgaaaacccacctgggccaggtctgaggggtcccatcctggccccaaagacccctgagaggcccatggacagtcctgtgtctggatgagga

SEQ ID NO: 1531 - DNA, 1206 bp, Homo sapiens
ctttcgcttgggaaaggaagatttcgagccccaggaaggagttgggagtgagcgacagcccagagcgtcccataaggtccttttggccatgtttctgccccggggggcttcacctagatcccccaccccaccccttacccctgttgcaaatacgtaagctggacgcgcctcggtgcggatccaggcctcgctgagcacggaaccggagaagcagctcacggcctcggattctactctcacccaagggtggaagggggtgacagggctcggatcttgccccaaacgctgcacaggcccgcaggagagcaaagaggtctcggacaggctgtccttccccagctctcggtcgcgacaaggtcccgacaggcccgggaaccggcgaaccgcctgcaggtaaccctgcgctgggtacctgccttccctctccagctaccggggcggggcgcggcgcggcgcggcgcggcgcggcgggctgcccgggtgggggatgaagaaagcacggcggacccagggcagcgaagcgcaggtctttttccttttgagaactaagatcaagattgcagggattcagttagaagccgctcacctacctccacctcccaccctaccctgtccgatttgtcttttgctgccgcattgattgctaccttcccccctcccttcgcttgcaaaggacacatcgggagtggacggtaaagaccttgcggggagccgtggggggcggggaggagtaaccaaaaatgaaagagaaatgtaggactctctgtctcccaaagtggtggaaaagcaattgcaaggagatggctctcgggagaataacaggctcagagagaacgcagccgagcgggggaatcttcgtgcgcgaagccgggagggttgcggggagggagagttctcctctcccaccgctggggtgtgtttttacatgttttcttagcagcaagttttataaacaggtcaaccctacgctgccagcccagggagttggagcctgtctccggcttctagtgccgacacccctctttcccattcaccccttgcaagccaaacgcgcagagttgggagggaggggaaacttccttccacttctgatgtgggggggacatttgcttttgaaaggctttccttgtcttcagacggtaaaatacgagttctccacatgtctgagtctggtacctcaagcatggatggatggggaagtggggg

SEQ ID NO: 1532 - DNA, 1142 bp, Homo sapiens
atttttaatagagatggggtttcaccatgttggccacctggtcttgaactcctgacctcaggtgatccacccccacctcggcctcccaaagttgctgggattccaggcgtgagccactgcacctggcccctaagtgtttgggctccagtgcctactttacctgcagtccacgcaagttcctactggcctcactggcggagctcaatggccatgtgtggctgctggctactgtactggatagtccatatctagaaggaaggaggaacatgagacaaaggatgagggaaagagcctggggcaagttaaggaatgcctttgagacctccttcctgctaagatctggaatgtattagaatctgagaaccagccttccctcttgaggctcacgcccctgctctgtgtgttctctttggcaggtttgttttggagcagtacaacgctctgtcctggctcacgtgcaatccggccacccaggaccgtacttcctgccttcccgtccactttgtggtgctcactcagttgtacaatgccatcatgaatatactttaattggaaaagcacttgttctctctggctcagttccttctccctgcaacctcagtccaaggaacctgctacactctgcaaataacccacatccttttcttcagaccactctccacagtcctgcactgtgattccttctcagcaggcacatgtcaattctgcagtgttcattaccagagtgactccttgacacttctctcatggacctggaaacttccataagtggtgactttcagccagtgcggtggtgtgtgtagccccaaccactggtccccaggaagtggtggtggttgatggcttttcagcgggaaacagaagagacagtgtccttttgcacaagagtctgtgttttcagcctctgtatacaattgagggcagtctagccctttggatgaaatcctcttagttactggtgtatggcctgtgggttacctgaactccataatctgggactttttaaaaataagaaccagctcaagtacatggtttcatactggggtttctgtctccctagtgttcccatccagattagcatgagtgctttggttgacttcaaacctgtgtgtcaatgcagaaggtctggagacagcttcatt

SEQ ID NO: 1533 - DNA, 1183 bp, Homo sapiens
actccaccatctttggaacagcatcctgcattttctcctgtgatgaattataaagatgggatcagctcagagacagtgacagcattaggcatgatggagagccctatggtcagtatggtttcaacacaactcacagaattcaaaatggaagtggaagatggattaggaagtcccaagcccgaggaaattaaggtagttgtcaatatattaacatttccagggcagagcagtttccaagtggattcacatacatctgctttaaaatggtattgtctgtgtgccatatatacataagttcctaagaatccttttaattagaacatgaggcacaccagcaggcatattaaatagtgtcttttgattgatttaacatttctgcattagcattttctaatgatcataggagagaaatactgaaatacgatcattttggttgctgtttttatgatagcactatgccactgtggtgtgttctacagagtttaccaatattaacactgaccccactttgttgtcacaggacttttcatatgtgcacaaagttccatcctttcaaccttttgtgggatcctccatgtttgctccactgaagatgttgccgagccattgtttgctacctctgaagatacctgatgcctgtctgtttcggccttcatgggcaattcctcctaaaattgaacaactgcccatgccccctgcagccactttcattagagatggctacaagtatgtatagggattgtgtcatttacttgccatatttgatgcaatttttatcttaactaaatgtttgttaaaaatgatgacaaggtccgggcgcggtggctcatgcctgtaatcccagcactttgggaggtggaggcgggcagatcacttgaggtcaggagtttgagaccagcctggccaacatggtgaaaccccgtctctactaaaaatacaaaaaattagctgggcttggtggcaggagtctgtaatcctagctactcgggaggctgaggcaggagaatcgcttgaacccgggaggtggaggttgcagtgagccaagatcgcgccactgccctccagcctgggcgacagagtgagactctgtctcagaaagaaaaaaaagaaagaaaaaatgatgacaagtagcatatcatttgaaactttcctttattggtcgttcatgtttttgtgcaaatta

SEQ ID NO: 1534 - DNA, 1417 bp, Homo sapiens
actacctcttatactcatctccccaaattatttgcctcccttaaataagttttcctagaaggtaagctggtcaggcaatttgaaaaatattagatcccaagaaatctattccgtttgcattggacttctcggattccatgtgtttgcagcaggactacatcgaactctgatgtgccggattgtggcatgtctgcatgtctcatccatctattgtttttggtaactcagtttggaatttcagtgtctgtcttccctgggttgacattggaatcagcctctcctttgagcttattttaactcttgagcaacataacatagatttaatgtgaacagtttataccaaagggcagcctgtgcctgtttatggatcctctctgcctttgtacttgaagagcgcattttacatttccagtcctttcacagacaggagctccaaccttacgatggagaattaaacttgcttgtatttccactttgtggatgaggaactatgagaggtggagtgacttcctgggtccccgctgagacttagtgacagatcccagacaagaacttcatctctgactccaggtctagtcctcttccccctgtctcttgccaactccagccctgacaccgtgggcgtctcccctgagagcagatatatttcaattgtccaggccaaaagaggggcgaggcggcataaacacccaaattaggtggaggatccaaaagtcattttcatttggctgtggaatatgttttttgtatttcaatcagctaggggtgtgttcactgtttttggaaattcacagcgcttgagcctccataatgaagctgggctgcagagcacctggcacgtgctccaggctcccagctcccaacctaggacctctccctgccctccactctggttggtttgtggttccctcgaccgagggtttctagaatcagggaccttgtctaagttttgtttgcccagagcccagcgaagtgtgtgatacaccttgggagtttaggagatcacaaaagggatgaaaacacctttagaaaacatttcattggtggggcgtggtggcttatgcctgtaatcccagcactttggaaggctgaggcaggtggatcacctgaaggcaggagttcagaccagcctgaccaatatggtgaaaccccatctatactaaaaatacaaaaattagccgggtgtgggggcgtgtgcctgtttttgtgagactctgtctcaaaaaaaagaaaaaaatattgttaataagtgagtgttttcggctcaagggaattgagtcatacgttgcatctcccccagttctgcatcttatttgctgcgcttgctggagttgtaaagattggtcctaacagggaaagaagcacacaagagactgtgaaaagggctctgagacaagcaaggacaaaagagggaggg

SEQ ID NO: 1535 - DNA, 1239 bp, Homo sapiens
ctttttgctcatgtttatagccctgttcttttcccagtgaaaaccccttagtgacctagagcagcttttctctagctgtgtgtgctcactcccttcctagttgagagtagtggtggttgtcctgggaagaggggtggcctccctgatttcaagcctcactttcttggccgcctgctgctcacctttccttagaggtcaggaggctttccacagaccttgacggtgattcctgtgccgtataccaggctggaagatagcacccctgctgctttgtgaagcaccatgggaaatggtcatatgggtttcctaagtgaatataaggagtgaaggcgtgtgggggtcagagaatggaggatggctggcagattctgaaatagttccatgactgcctggtgaaacagtatggatgcctccctcctgggaaacagcctcatctatcttgttaccacctaagaatatctctggtcatttaaagggcctgtaaatttgagttattttcatatctaaaaattataaacttctttcttttttttttcccctcagaatgaaatgaatgatgtgcctttctttgatatccaactgccttacgaattggcaatcaatatatttcagtatctggacaggaaagaactaggaagatgtgcacaggtaaggtgtcaccaacagatgttccagattttcctaaatgtgtgattaaggtataggactctccggggtaatagaaatttactcacagaattataaactttgcagaattaatgaattggatggcaagtttacttgaaggaaagccaccttgaccttagaggattatgttccacatcactactcggtgtgtatctttctgtgacccaagagctcttttctccctgcagtctgagttatggctgacctgtggcagtgtgctggtggccgacaacttggtgctaagcctttattgagcttgtctgtgctgttaatgcactcacagtttttaatgcaaagatgtgagcccttggttaaatcgagcctgttattaggttggtagctgagggggtcagcacgaggacagaacatgttttaggtgaagtcatgttttaggtgtatagtccaaattaccctttaaactttaggatctcactcagtgaggtgcaaggcaggtgagaactgagacccaccaagggaattacagatcaatgtcacccgtctcacacttactctggggcatatgcctgtggagtggaatggtgggagatatca

SEQ ID NO: 1536 - DNA, 1731 bp, Homo sapiens
aatgtatagtttatctatattcttttctggatacatgtaaagattgtaatataaaaaatgattagggtttaatatatcaaaccaaacaaaaaatgtcatattcccaaatgacccattctggcttcaccttgtaaactgtccatcaatggagaaccagttaaataaataaatatgatatgaccatataataaaataaccacttaaggaatgaggtaatctatgtgcaatgcaatatgaaaagatgttaaaaatgttttggtcaaaaacaagctataaagtagaatccaatttttgcaaaatagtaataatgtgagtatacgtgtagaaaaaattataaaagaattgcttcttttccgagaaaacaacaaatggcggatgacgccggtgcagcgggggggcacggaggccctggtggccctgggatggggaaccgcggtggcttccgcggaggtttcggcagtggcatccggggccggggtcgcggccgtggacggggccggggccgaggccgcggagctcgcggaggcaaggccgaggataaggagtggatgcccgtcaccaagttgggccgcttggtcaaggacatgaagatcaagtccctggaggagatctatctcttctccctgcccattaaggaatcagagatcattgatttcttcctgggggcctctctcaaggatgaggttttgaagattatgccagtgcagaagcagacccgtgccagccagcgcaccaggttcaaggcgtttgttgctatcggggactacaatggccacgtcggtctgggtgttaagtgctccaaggaggtggccaccgccatccgtggggccatcatcctggccaagctctccattgtccccgtgcgcagaggctactgggggaacaagatcggcaagccccacactgtcccttgcaaggtgacaggccgctgcggctctgtgctggtgcgcctcatccctgcacccaggggcactggcatcgtctccgcacctgtgcctaagaagctgctcatgatggctggtatcgatgactgctacacctcagcccggggctgcactgccaccctgggcaacttcgccaaggccacctttgatgccatttctaagacctacagctacctgacccccgacctctggaaggagactgtatttaccaagtctccctatcaggaattcactgaccacctcgttaagacccacaccagagtctccgtgcagcggactcaggatccagctgtggctacaacatagggtttttatacaagaaaaataaagtgaattaagcgtgaaaaaaaaattataaaagaatttataccagaatatatatcagtgataatccctggagcagtgctatctgatagaactttctttgatgatgggacagttctatttctagattgtccaaaagagtaacatgtgaaatgtggctagtgtgactgagaaaataaattttaaattttaatagttaacgtgcctacttgctattgtattgaacagtacagcagaaagtaagattaatcctaagggggactttggttttcaggattacttatattttataataagactgtattacatatatacatgcctacatttatgtatgtatatatgtgtattttttatctatagaggttgccttgtctcataattatgtctacttgtcttctccatactccaaatgtaacagttcattgaaagtacatatgaaaaccattaataattcaagtaatag

SEQ ID NO: 1537 - DNA, 1183 bp, Homo sapiens
gagatgtaaattggaattgaagctctgccatttcctggctgtgcagcttagggtttctttgagccttggtcgtcacatctgaaaaatgctgctcaggctgaaagaagagctgggttaccagaaaatatggaaaagaaagcccactttagataaaaattcaaaatatcttcctattatgggcacaagatatcaataataaaatgaactaatgtttatcttgtgttcattatatgccagtcactgtttaaaagctatttgcattaacaaatgtaattcttctaataactttattaagtagatactattattaggtaggtacttatatcagttttaaacatagtggttaacttattcaaacaaatatttactgaatgtgtttgcatttctcagcaaaataggattagttgatttattcattaaaatgtatattaagtacctactgtgtaccaggcatatataattctggagatatattggtgagcaaaattaagagtctttgctcttagagaaattagcatcttgcctacaaccataccaccctgaacgtgcccgatctcatctaatcttggaagctaagcaggatcgggcctggttaatacttggatggcagaagttagagtctgggtaaaaaggtagattgtattcagcttctctaaaaaatgatgaattgttataaagtgaacaatatgtgaaggatacagcgacttgctcctgtaagagaagctaacaaagacatctgttgtagactgggaaagtgacttgggtgctgaaatctaaaggagatgccagaattgattaagtgaggaacagagcataggtgggtgtgttccaggcagtgggagcagtccttgcataggccccagagtgggaggaacatgggttgtgagagagagcccccctttaacccatttccatctctctttcccatcctggaaagtgaagaggatcggggcatttttccagcactttaattaagagggccactgtgctgttgagtggtaaagaggaaaaggtgtgttataagatgtggaatcatgaccataactcagttttgttcgaaaacgattttctggggctcttgccaatgtctccttgcttccctagaagctgagagacccaagtcaaggtaaagagaagaaggaacctctgtgaatgaagcctaaagaaccaatatggcagctca

SEQ ID NO: 1538 - DNA, 6942 bp, Homo sapiens
tgcacaggtttagatggtaaatattttcggctttgtgagccatatggtctctgtctcagctgctcaaccctgttgtggtcatgcggaagcagctgtaagacaatgcataaccagatgggcatggcttcattccaataaaactgtatttataaaaacaagcatcttccggatttggccctcaagcctgttctagagtctctccttccacaataaacactgtctttgctgtcgcttctcaattatggacgttgacagaagaggttctgatacagttagaccaataattgaagaaagaaatgaacaagttgataaaattatagcctcttccaatgagaaggatttaaatatcaaggattaagatagtcctttgggaaaacacttttcttgttttaatttttagttttagttttttagaagcggggtcttgccatattgcccgggctggtcttgaactcctgggctcaagcaattctccttccttagccttcctaatagctaggactacaggcatgcatcactgtgcccggctttttcaaatatttttgaagagccttctttaggatccactgcaaaagtccaatgtgtccaacgttggtgtcagagcatgttagcagcaattttgttgagacaattagcacaaaacaaatcattctgtgattcatgcttggttcatttttggaatcagcatgtaattgcattgtaatttaaatactaaaaatatctagcataaaataagtttatattccaagataaagcctcaatcaaacaaaatatgttttcaagtaatattcactgtaatttttttcctccattttaagtagggccttttccaagcacaaattatgctgagataatagggaccctagtacttttagagctgatcaagggtgggaaagaattgactcagaaggccacatttcagttctctctgtgtttgtaggtcttactacatcttcagagagggagtttggcccctgggtctgctgaaatcttcatttgaaatatccaggccaggagtgggtggaggattgggttgggttgtacaaaaaggccgcagtgttttcaactgcttggttactaattatcaacctttgaggcctgggacgttttctgagcccgctttactttgtctgccctgctcagtttcctgactctatcaggcctgatccctacacctctcggtcgtcttattgtcatgactgagaaccatccaccttctgagcatctgcatttgcatcaggtgtcagagactcttggaaagccacatgggggcagaggtgaccaaacacgaggcccaggagtgggacagacatggcagttaacagtgatcagtacagggtttctccaaactgcttccttgcactgagggcctttgtgggtccctgacttctgggtcttagtaggctgacctcctagttgatgacttccttctgtgccttctaggctctgggaaatagtaggtcagtaggatattatatggggcttatgacatcaaactggtcttttttttttttttttttttttgagacggagtcttgctctgtcacttaggctggagtgcagtggtccgatcttggctcactgcaacctccgcctccccagttcaagcaattctcctgcctcagcctcctgagtagctgggactacaggcacacgccaacacgcccggctaatttttgtatttttagtagagacggggtttcaccatgttggccaggctggcctcgatctcctgacctcgtgatctacctgcctcggcctcccaaagtgctgggattacaggtgtgcgccactgcgcctggcctatcaaactggtctttattggaatcccagctctaccactcattagctcaggcaagtcacctaactcctgtctgtccccattttcttgcctgtacagtgagggtcatgcttgttcatagctcaggagctgctgtgatgatttaatgagataatgagagatggcagatgaagaacttagcacaggcctggcacacagtaggtgctcagtaaatgaaagcctgcactgaggaaggtgggttgtcttttgttgccatctttgctctcttccctgtctttgctaccaaaatcaaatgcaggcaaagtccaaagaactccaggtctaatctcttgataatcagtggtgaggctgggtcaaggagggggttgctcaggtaagaaggaaaatgcccctctggggttgtggcctcgcagctccctacgttcctcttgtgtcgccagcagccccaacaagcgaggcccacccacgtacaacgagcacatcaccaagcgcgtggcctccagcccagcgccgcccgaaggccccagccacccgcgagagccaagcacaccccaccgctaccgcgaggggcggaccgagctgcgcagggacaagtctcctggccgccccctggagcgagagaagtcccccggccggatgctcagcacgcggagagagcggtcccccgggaggctgtttgaagacagcagcaggggccggctgcctgcgggagccgtgaggaccccgctgtcccaggtgaacaaggtgaggcagcattccgaggcctgtgtgtctgttgcggaggccaggagtgacttggggaactgaggcccccacggggccactgttgtttaaaaaaggaactccatgactgtaattcagactttgcgagacacaggaatttaggaagaaaatgtaccttaagaaatagcttcctggccgggcgtggtggctcacgcctgcaatcccagcactttgggaggccgaggcgggtggatcacgaggtcaggaaatcgagaccatcctggctaatgtggtgaaaccccgtctctacgaaaaaaatacaaaaaattagccgggtgtggtggctggtgcctgtagtcccagctacttgggaggctgaggcgggagaatggcgtgaacccggagggcggagcttgcagtgagccgagatcgcgccactgcactccagcctgggtgacagagcgagactctgtcttaaaaaaaaaaaaaaaaaaaaaaaaaaaaagagcttcctaagcaaatggataacgtgtgtgtaattgaaaaggaaaatatgtatgcatgtaactcaaaatataatagctaccaaaaaatgttttcccttctccagaggcaagtggtagcagtttctagagatattctgtgcgtaccagcaaatatatatgtgtgctctccttttgaaacccaaatgatagcatcctatatgaaatgttgcatgcttttttcaaacatagatatagattcacacacatacacacatatgcttttctttttttttttttcttttgagagacagcgtcttgctctgttaccccaggctggagtgcagtggcgtgattatagctcacggcagcctcaaactcctgggctcaagtgatcctctcacttcagcctcctgagtagctgggaatatgggctgtagctaccatgtctggctaactttttcccccactttttgtttgtttgtttgtttgtttgttttgttttgttttagagacagggtcttactatgttgcccaggctggagtgcagtggtgtgatcatagctcaccacggccttgaacttctgggctcaagtgatcctccagcctcagcctcctgaatagctgcgactacaggctcaagccaccatctgtctgattcccacccccacccccggccctttttattttttttagagacataatgtcgctatgttgcccaggctggtcttgaactcctgggctcaagcaatcctcccaccttggcctcccaaaatgctgggattacaggcgtgagtcaccacgctcagcccacacatgtgtatatataaattgtttttctggaaggctacacagaaagtgttcacagtggttgccttccagaagaactttgaacttttggaaatgtttaaatcatgtgcatgaatgatctgtgtaattttaggtttgcgatcgaggagagggatgggtgtggaagaccaggggctcccccaggcagggcatggctcaagtgcttggtgcctccttagcaggctaagcaggtcaaggagccacctttctgccatttggggctgattttctgggtggcattctccttctgatgccacctgcagttcacctgctggtaaagaaagaaggaaacaccatccatatggcttcttatccctcccaattgaccgatgaaactgtgtatgtgcatgtgtgtgtatcacatgcttacagcatcgcaggtacacacacggctttgggattttccagtgagtttcactccctggcttccccaggctctggagcgggtgctgccctgccaagcactcactgctagctgctgaaggggatagcccaggggctgcagattcccatttgcatcatgcaaggtgagcacagcaacttctggcctcggatggctaacactcctccttatttcactcctaggtctgggaccagtcttcagtataaatctcagccagaaaaaccaactcctcatcttgatctgcaggaaaacaccaaacacactatggaactctgctgatggggacccaagcgcccacgtgctcagccaccctctggctcagcggggcccagacccacctcggcacggacacccctgtctccaggaggggcaggtggctgaggctcttcggagctgtcagcgcccggtgcctgccctgggcacctccctgcagtcatctctttgcactttgttactctttcaaagcattcacaaacttttgtacctagctctagcctgtaccagttagttcatcaaaggaaaccaaccgggatgctaactacaacatggttagaatcctaattagctactttaagatcctaggattggttggtttttcttttttttttctctttgtttctttcctttttttttttttttttttaagacaacagaattcttaatagatttgaatagcgacgtatttcctgttgtagtcatttttagctcgaccacatcatcaggtctttgccaccgaggcatagtgtagaacagtcccggtcagttggccaacctcccgcagccaagtaggttcatccttgttcctgttcattctcatagatggccctgctttccccagggtgacatcgtagccaaatgtttactgttttcattgccttttatggccttgacgacttcccctcccaccagctgagaatgtatggaggtcatcggggcctcagctcggaggcagtgacttggggccaagggacctcgagacgctttccttccccaccccccagcgtcatctccccagcctgctgttcccgctttccatatagctttggccaggaaagcatgcaatagacttgctcggagcccagcactcctgggtctcggggtcggggaggggacgggggcacccacttccttgtctgtgacggcgtgttgttccccactctgggatggggaagaggcccgtcgggagttctgcatggcagttcactgcatgtgctgcccccttgggttgctctgccaatgtattaataccatcccatagctcctgccaaatcgagaccctctgacgacttgccgactaactggccaccacaagctgcagtctgtagcactgaacaaacaaaaaacaaaacgctcaagccttacgaccagagaaggatttcagcaaaccaccacctcccactcagtgtcccctccaaacttcacacttccctgcctgcagaggatgactctgttcacacccaatccagcgcggttctaccccacgaaactgtgactttccaaatgagcctttccctagggctagacctaagaccaggaagtttgagaaagcagccgcagctcaactcttccagctccgccagggttgggaagtccttaggtgcagtgcggctcccactgggtctgcggaccctcctattagagtacgaaattcctggcaactggtacagaaccaacctagaggctttgcagttggcaagctaactcgcggccttatttctgcctttaatctcccacaaggcatctgttgctttgggtcctccacgactcttaggcccgcctcaacaacccaggcacctcctaggtaggctcaaaggtagacccgtttccaccgcagcaggtgaacatgaccgtgttttcaactgtgtccacagttcagatccctttccagattgcaacctggcctgcatcccagctccttcctgctcgtgtcttaacctaagtgctttcttgtttgaaacgcctacaaacctccatgtggtagctcctttggcaaatgtcctgctgtggcgttttatgtgttgcttggagtctgtggggtcgtactccctcccctcccgtccccagggcagatttgattgaatgtttgctgaagttttgtctcttggtccacagtatttggaaaggtcactgaaaatgggtctttcagtcttggcatttcatttaggatctccatgagaaatgggcttcttgagccctgaaaatgtatattgtgtgtctcatctgtgaactgctttctgctatatagaactagctcaaaagactgtacatatttacaagaaactttatattcgtaaaaaaaaaaagaggaaattgaattggtttctacttttttattgtaaaaggtgcatttttcaacacttacttttggtttcaatggtggtagttgtggacagccatcttcactggagggtggggagctccgtgtgaccaccaagatgccagcaggatataccgtaacacgaaattgctgtcaaaagcttattagcatcaatcaagattctaggtctccaaaagtacaggctttttcttcattaccttttttattcagaacgaggaagagaacacaaggaatgattcaagatccaccttgagaggaatgaactttgttgttgaacaattagtgaaataaagcaatgatctaaactaatgtgtgctttagtgcaatgacctcttctttttttgag

SEQ ID NO: 1539 - DNA, 1225 bp, Homo sapiens
accagttctgaacgtagatgttggagggctgggggaggagggtgcagtgcaagcattacatccttcccctgttgtcttccaagatatgctggagtagatgcttggctctgagcagtgggcttgggctctcttgcccacccgtctgttcccagagcctagcgcagcacctggcacagtattcactgagttaatgtttgtcattccaccagctgacaacgccacctgtcaacacccgggtgctggctttcctttcgtcagtggctggtgatgccctcacccgtcatcttggcgtgatcctcccagcggtcatgctggccctgaaggaaaagcttgggaccccagatgagcagctggtaaggggcgagcctgctcctgctttctcatgtcccgtctgcccggaggatccctgctcagcacacatgtcccttgtggtttgcaggagatggccaattgtcaggctgtgatcctctccgtagaggatgacacagggcaccggatcatcatcgagtatctgctggaggccacccgcagccctgaggtgggcatgaggcaagctgctgccatcatcctcaacatctactgttcccgctcaaaggctgactacaccagccacctgcggagcctggtctcgggcctgatccgcctcttcaatgactccagccctgtggttctggaggagagctgggatgccctaaatgccatcactaaggtgaggggactgctgaccccacagccaacttttgcttttagaaaattccagacatttacaggaatagacttataagaatcccccacgtacctgtcactcagcttcggcgtttacccactcgtggcaagtcttgtttatactcccgcccacgctttccccatatattctttggaagcagtcttgagagggctgtacatcctctcgctttttcctggattcctgcagaagctggatgctggcaaccagttggcactcattgaagagctgcacaaggaaatccggctcatagggaacgagagcaaaggcgagcatgtgccaggattctgcctcccgaagaaggtaagccagggcctcgtgcagggggctgtgggcgtgcagtctgttgtgcccttctggcccttacccctgtcccaggtctgcggtaggggctgctggagcagtagccgtggtggttggtgttcagcaccttcgcagacagcatgttttcttccatggcagtcagatggggacagggtt

SEQ ID NO: 1540 - DNA, 1509 bp, Homo sapiens
actaagcagtcatgatgtatcactgtattttttcctttaccttggaacacttcacttaatttttaaactggaatgtggaccttggtacttccacggacagagctaacttgcaggaggagttcaattctttagcccactgccatgtacttggtttttcttcatggcttttggaccaaaaactgaagcatccccttgtagtggtaagacagtggttcctacctgctgatccacagcctcctgctattgatatgtgacagagttttcactggcttttggtaaaatgtgaaaatgatgacaatatagtaaatttttccttaaaatttttttgaacaaaaggaatacgctttttctgaggtttttatctgtctggtttatttaacgttttaattttcacattaaaaaaacattttaccacctcacactctaaggaacttacttagagttaattttaattgatttaactttagccacatgcggttagtggctacatcttggacagtacaacctagagagaggtgaggaggcaggtcagaggctcttctgaaagatgatgcctcacacggtccaatcccaccccttccaggggctgatggaactccacatggtattgccagcacctgatactgatgagaagaatggcctgaaccttctgcggagactctgggtggtcaagtttgacaaggaggaggagatccggaagctggctgagaggtgagagagccagcatgtcgctttctcctgctgcatcctctcttcctttaggaaataactgaacccagtgtgctcagcctccagtgggaagaagggctgggctggcagggcaagtgctgcagatctttgtctaagcagcccctgccttggatctcccacaggctctggtcaatgatgggcctagacctgcagccagacctctgctccttgctgattgacgacgtgatctatcatgaggcggctgtaaggcaggcaggggccgaagccctctcccaagcagtggcacgttaccagcggcaggcggcggaggttatgggcaggctcatggagatttaccaggaaaagctctacgtgagtgacctgtgcagccctgatgcagtctgggtgtgtgcggttgggtgggtctctgctcaccccgctactgctccagacaggaatctcggggctcacggtggctcagggtagctgcggctagtttcctgcctcacaatcctggtgcccaggtcattgatctgcccgttgcaaagcatttaccaacttgtctgttgcagcggccgcccccagtgctggatgctttgggacgagttatttcagaatctcctccagatcagtgggaagccaggtataacaattgttcagcctcgttctactccaagctttgtgagatgtggcaggttggctgggtgggtgctgtgaggaggcagcatgggttaatgaaagagcaggacctccctcagagtcggggaggcctgagttccatcagcccctggaaggggtgggattggaccgtgtgaggca

SEQ ID NO: 1541 - DNA, 1509 bp, Homo sapiens; identical to SEQ ID NO: 1540

SEQ ID NO: 1542 - DNA, 1177 bp, Homo sapiens
ggcaaatagggcttgttattcttgtgtcatatgaattgaccagggttctaggagttcaaatgacttgcacagggtctcccccgacggagggagaccctcaaagacctggctgttatttctgtgctctttgtgccgtgttccactgcttccctccctcccaaagcctgttgaggaatgtgggccagtgacagacttgccaccacaggctgggtctcctggaccagttcctggtgccttctttacccctgcaggctttttagatgcaaagccacaggtgcttccttcttccaggcacatctcacagcctgtgggtcccattgcaggaagctgggcatccatttctactccagcaaggaccccagggaagaactgagtgaggggccgctgtgtccgtagcatatttggttcctgtgttccaagcctgcacagggctcttagcagtattatctcatgtgtctccacacaggtgctgcccttagaggctttggtgactgatgctggagaggtgactgaggcaggcaaggcctacgtgcctccacgggtcctgcaggaggctctgtgtgtcatctccggtgtgccagggctcaagggtgatgtcaccgacactgaacaactggcccaggaaatgctgatcatctcccaccacccatccttaggtccgtggctgcggtgggtgtgggagagcccagagctttaggggatggggtaagagcaggccaggcagaaggcctcaaagagctcccttccccttcagttgccgtgcagtctggactttggccagcacttcttgccaggatgaagatcgatcctgaagcctttatcaccaggcacctggatcagatcattcccaggatgaccacacagagtcccctaaaccaggtgacgggcacatgagctggtctggcctcaggtccgggagggggccctctcatcacagtgtacaggaagagaggattcaaagaagcaggtgaagatggatgaaatgtaggcttggacccttggttgcacgtgacagaaatgtaaactggtttaagcacaaaagggaacttactgcctcatttacctgcaaagtccaaggatatgactggctacaggggttcacatgttgcccttggaacattgtaggtgatgtctctcttactctgtcccatccatctttgtctgttgtctctgtttt

SEQ ID NO: 1543 - DNA, 1438 bp, Homo sapiens
aagcaattaggcagcattgtagagcatagcttgtattacattttcccacacttagaaggttttcagacacaaaacccaaaggaattgtgtaacaatccggataaacacgcctagattgtttttacaaataataatgttgctatatttgcttaacgtggtgcttttaatgctgtgaatctagccctcctcttgaccaacttacttggaacattccttttttatcctgttaaccattttagtgaatcagaagcatgcctggtaattgggaaaaattaaaaactaagtaaaaaaagaaaaaactccttgattgaatgtagaaacctaattttcagcgttcatacccagctagccaatcatccagtttggcagtgttacaacgtagctcccaatctccctctgacttcaaaagcttagaagaaagggagtgggatggaaacaaattgtggggttcagtttcttctggcattttttccctctctcttcctgttaaacttggctcctctggcttgttttttgtagcaactattggatgattatccgaaatgtttcattgtgggagcagacaatgtgggctccaagcagatgcagcagatccgcatgtcccttcgcgggaaggctgtggtgctgatgggcaagaacaccatgatgcgcaaggccatccgagggcacctggaaaacaacccagctctggagaagtcagttcccctggcagttttgtcctttctccccagtgcccgtctccctcttcctggagaatggtgctgaaaggtgattgtctcccataaacttctctttgcagactgctgcctcatatccgggggaatgtgggctttgtgttcaccaaggaggacctcactgagatcagggacatgttgctggccaataaggtaaggggacaattgggttggctaaagagactttgttgttgctccttaaagcaaaatggaccattctcaggttgtgtgagtggagaggcttttctcactgtttgttgtctttgtcaggtgccagctgctgcccgtgctggtgccattgccccatgtgaagtcactgtgccagcccagaacactggtctcgggcccgagaagacctcctttttccaggctttaggtatcaccactaaaatctccaggggcaccattgaaatcctggtgagtggacctggtttgcctgtgctaaccaggcaaatggggagctgcttttagtggccatggatctgctggttgtccaacaggtgtttactgccccactattatctggttcagagtgatgtgcagctgatcaagactggagacaaagtgggagccagcgaagccacgctgctgaacatgctcaacatctcccccttctcctttgggctggtcatccagcaggtgttcgacaatggcagcatctacaaccctgaagtgcttgatatcacagaggaaactctgcattc

SEQ ID NO: 1544 - DNA, 1210 bp, Homo sapiens
ctgcccgcctcagcctcccaaagtgctgggattacaggcgtgagccactgtgcccggcctcctcccctcttcttaccacatcccttccctaccctctgtcctcttgcgggggaagacttcgcatctcctctgccttgttctccttgggaatctgggaactgccaagccagtacaaggccagaaagcatctctcactatcttctttcctttgcctctcaaagcttccccaacaagcagaaatcagctgagccttcacccaccgtaatgagcacgtccctgggcagcaacctttctgaactcgaccgcctgctgctggaactgaacgctgtacagcataacccgccaggcttccctgcaggtaggaccgggtccctggggcagggtctaccagggcccagggcccatctgctgacctctagatcccaggagggctcaagggctgagcagcctttttctctcctctctgcaagatgaggccaactcaagccccccgcttcctggggccctgagccccctctatggtgtcccagagactaacagccccttgggaggcaaagctgggcccctgacgaaagagaagcctaagcggaatgggggccggggcctggaggacgtgcggcccagtgtggagagtctcttggatgaactggagagctccgtgcccagccccgtgtgagtacccactgggccctccccaggtggggaagggctggcccagcctgccccgggtccagtgtctgtccccttagccctggtatcacccactccctcccgtgtctgccatttgccaggcactggggggatagtggtgagtcacatggacaccatccctgccttcagccagtcactgccagtcagaaaggacagacgttgtgcaggctgagggcgcctggagcttagcagctcttagcacaggctttggggccacacagtggggttcacatcttggctctgacagttactgtcagctctcaagccttagttttcccatctgtaaaatgggacaagaacttatgggatcactgggataagaccacctacctcagtaagggtgagaaccagtaatccatgtaaagcgcttggaatggtttctggtgtgtagtgcgtggcacacatggtgagtgcccaacacgcgagctcttaccagtgccgtcgtgttactgcagtagcctcacctccatgtccagtgttgtggaggaaacacagggcg

SEQ ID NO: 1545 - DNA, 1218 bp, Homo sapiens
aaataaataaataatttttaaaaagtacatttaaaaaaatgtcactactggacgggtgtggtggctagtgcctataatctcagcacttagggaagccaggcgggaggatcacttgagttcaggaaaacagcccatctctacaaaacattaaaaaattatccagttgtagaggtgccaacctgtagtcctaggtactggggatgttgaggaaggaagattgcttgagcccaggagttggaggctgcagtgagccatgatcacaccattacactccagcctgggtgacagagcaagtccttgttccaaaaaagaaagagaggagcgcagcactgccgcctggcccctccagcttcccggaccacggccaacctcgagcgcaccttcatcaccatcaggccggacagcatgcagtgcggcctggtgggcaagatcatcaagcgcttcgagcagaaggggttccgcctcgtggccatgaagttcctcccggcctctgaagaacacctgaagcagcactacattgacctgaaggaccgcccattcttccctgggctggtgaagtacatgaactcagggccggtcgtggccatggtctgggaggggctgaacgtcgtgaagacaggccgagtgatgcttggggagaccaatccagcagattctaagccaggcaccattcgtggggacttttgcattcaggttggcaggaacatcattcatggcagtgattcagtaaaaagtgctgaaaaagaaatcagcctacggtttaagcctgaagaactggttgactacaagtcttgtgctcatgactgggtctatgaataagaggtggacacagcagcagtctccttcagcacggtgtggtgtgtccctggacacagctcttcattctactgacttagaggcaacaggattgatcattcttttatagagcatatttgccaataaagcttttggaagctggaaaaaaaaaagagagaaagagagaaggggagggaggggaggaagggagggagggaggaaggaaggaaggaaggaaggaaggaaggaaggaaggaaggaaggaaggaaggaaggggaaagttaaatagaaagaaagagacacagacgggccgcgagcggtagctcatgcctgtaatcccagcactttgggaggctgaggtgggcggatcacaagatcaggacatcaagaccatcgtggctaatacagtgaaaccccgtctc

SEQ ID NO: 1546 - DNA, 1232 bp, Homo sapiens
tagtagcgaccccgtttcaccatcttgtccaggctggtcttgaactcctgacctcgtgatccacccgcctcggcctcccagagtgctgggattacaggcgtgagccaccgcgcccagccgtgttctccattcagattttgtcacagtgacgtcctaaaattattcccaactccccccaccctgctgtttccgcaccctcgagcacagctagtcgtccgtctgcgccctccaggctcgctttcccactgctcactctcctcgctcaaaattcaagtctcaaccgagtcatctctgtgacgtcacgttgatttgcataagattccccagcgtcccaagcgaatattcttatggttttcaaaacctgaatgtttgacacgggatgttccaacaacaagaaacctcctatgcagatgggccttaaatacggctggtggagtgggaacacgtcgtatacacggacacacgggcaggcactcaccctcaatgtaatggtagtcatcatccgtgggggagcggggcgcgaacagaacctttccagctttgcgcagtggcagtatcgtagccaatgaggtttatccgaggcgcgattattgctaattgaaaacttttcccaataccccgccatgacgacttgaaatatagtcggcattggcaatttttgacagtctctacggagactgaatttttaaaagtctaaagaaaagggttttaggaagttgtattatagcaggttgtgtcttatgtttggtttgataagttatgagctgttcctatgatagttttttggttgttgttcaggagtattccgtgattgaatgtccggggttctgtgcgggtactgtgagttgttttccaaaatgtatgacactatgttgggaactgggttctaactaagacagttatcgttaatcttttttatccaaatgcagccagcgagtgagctactccacttcctttgtcactgaaggtcacagattcccttaaagggaaggggaactctaaaactaacacattaatacatccaaagtcttcctttttttttttttttttttttttgagacggagttttcgctgtttcccaggctggggtacagtggcgcgatctcggctgactgcaacctccacattccgggttcaagcgattctctgtctcagcctccggagtagctgggattacgggagcccaacatcacgcccggctcatttttgtatttttagtggagacggggttt

SEQ ID NO: 1547 - DNA, 1248 bp, Homo sapiens
atgggtacagagtctcagtttccacccttgggcatgaaagataaagttctggaggtaagtagtgatgatggttacacaacaatgtgaacatattctatgccagtgaatttacacttaaggttaaaatggtaaattttatgtatactttggcataatttaaaaaaaagtttgaaaaagaaaaaagacaaaacaataatcgtctttggagaagtctgttacactgaatctggagccaagtgaacagaaccctgattttgatcccttttctctcaaaagcccttcgcagtctctgaattaagtctattagcatgttcctcccatagtgctttgcttcatatcaacaaaaacctagctaagtgaaatcagcaacgatatgcagaaaccacctacgcaggtcacaaacatctttctatgattgtataattttcaagcaagcaataagtgaagatttttccataggccctaaactcacctttgcgaaataggaagctggtttattgggagtgatgagcagggggcgtaacaaattagctttgcgcagtggcagtatcgtagccaatgaggtctatccgaggcgcgattattgctaattgaaaacttttcccaataccccgccgtgacgacttgcaatatagtcggcactggcaatttttgacagtctctacggagactgaattttcttgcagttgaacaacagaggctttttttgtgtgtgtgggggtgcttggttttgggaggttgaagagtacttgttcgcaaactctctaaatgagagatggggaagtgtcttaccagctgattcgcgagagcacctgcaagtttacctgttttagtgatttgcgtttatgaaagttggagttgctgattttgtgatctctacttttaaggtaaaagcagggcggtgttgacttttcttgccagttggctgtcctgttttctttctcgcactgttttctttttgagacgaagtctgtcgctcaggctggagtgcactggcgtgatctcggctcgctgcaaactttgccgaacccctgtttagcgatttccgtttgtgaaagttggagttgctgattttgtgatctctacttttaaggtaaatgcagggcggtgttgacttttcttgccagctggctgtcctgttttctttctctcgcactgttgttttctttttgagacgaagtctgtcgctcaggctggagtgcactggcgcgatctcggctcgctgcaaactgccgcccgggttcaagc

SEQ ID NO: 1548 - DNA, 1320 bp, Homo sapiens
tttttttttttttttttttttaaagaaaccttttttaaactatttctaggtttgtgaatgtgaagccccaggccgcagggggcaaggggccaggtgccccccaccagctgagaacaaagtgtctatctgggtgtgggcccctggccgcctccctccagccctggagaggagggcagggctgcggggaggccaggccgagcccctggaaccatcccgtcctgtatcatatgtaaatactgtgaggtgatgtgcccacccctctctaagacccctcgggggtgaggggctcccccctcccctgtttctgtcccctcagacaccgttactgtaagcttgcaggcctcagctgtggccacggcaggcccgctctctcaggccctcagggtcaaggccttggttggacctgcccactccaaaaacccagtgtgggggcaaagggcgtgggaagagcagggcttgcccagcgacactgctggacaggaattaactctccaaaggtctcccctgctccctacctaggttggggcttcatggtttctgctcagtctgtcccccttccccctcgacccccgcaatgagtgggcaccaggggacgctctggcgagggcagaccccaggggaaagcaaagggcgtctcagggaacccccacattctctcactgaagtttcccaccaggatgaccccacagccagagtcccttggcagcccctcaccccagaccccccttctaaggaaaaagagaggttcagagcgttggaccttcatgaacagtggcctggctggcgtggcagggccaaggcccacccactgccatcccccttctgtgtgtccctctcccccagttatgaggcccagggcctgagctctcttccccagcattgcccccacccggaaaccccacctttggagagttaattgtctgtgtgaggtgcttaacctatcagccctgagaacacaaagcaataatctttgttactgagatgcgcggctgttcgtgttttgggttttttttttttttaatgtttcctaataaaagagaagctgcattttattggtttttatttttaattttctacacgtttgagctgagtcctgagacacttagcttccctctccctcattcccggacccttccaccccactgggcccaaccatgggctcaggaccctggaattccgttttctgatttgctttgggattttttttttttttaagatgttacatggtgtttcgaagccagcaagttaccatcctccggtgtctcttctctccacatctgtaacttctttttccaggttttattttcagttttaaattcc

SEQ ID NO: 1549 - DNA, 1200 bp, Homo sapiens
ggtatgattccaaattacaccattcccagattattctgagaatgctgcagtgccaaactcttggtatcacagactttatattctagtgggggagacagacaaaataataatataacgacgaaggtgcaatgttatgtgctatgagaaaacgcagtcggaggatggcgaggaaggggaacggaattttagatagggcggtctgggatcagaacctccagatgcccgtccatggactccaacgaagggagcgattccaggtaccagggcaccctgcacaaacctctcttgagcttccgcctcgcccaggtggggacggtagggagaccggagggcacacgcatgcgcacgaaggaaacggtaaagcctgaagggaggtgcagagcgcatgctctctcttgcccgagatgccgaggattttgacaaggactccgtcgtcccggatgatagtgctcaggttaatgccagtgggagggcggcgcccaatagtaacttcctttggaggttgtagtaccgcccccagagccaattttccacttccgcttccggcgctgcggcagtccagatcaaaaatggcggtagttggtgtgtcctcggtttctcggctgctgggtcggtcccgcccacagctggggcggcctatgtcgagtggcgcccatggcgaagagggctcaggtactggggccggggtcgacgggtcgagcctcagccccactcgggcgagacagggagggactgtgaccttggcccgaggccttgcgggagggaaagtgagacccgggcccgccccataccggcgctgaacgtttgtggcttctccgcagctcgcatgtggaagactctcaccttcttcgtcgcgctccccggggtggcagtcagcatgctgaatgtgtacctgaagtcgcaccacggagagcacgagagacccgagttcatcgcctacccccatctccgcatcaggaccaaggtacgcccttgtacatctcttcaagcgtccgttctcttttcgttatgtgtgccttagtgcaagttcttcattctctgaaggcatgggtgccaggcgtgtacagcttgtttatcctcacaaacagaaaatgtattttcttccattttgtggatggacagctgacacttgggattacgtctcaattctcttcttcaaggtcatacaataagtgctcttcagtttcccttttctccgat

SEQ ID NO: 1550 - DNA, 1191 bp, Homo sapiens
tgggctgcagtttcccagcccagatattgtttgaagtctgggatggtgccagaaatctgcatttaattaagcatctccctcccctaatactgccaccattttgatataggtgatttgaggattacactttcataaacacagcactggatatactagttactagggagaggatgatgagtaactaacttgagcttgcattttctgccatccatatttgtttctggaattaaaactgtcctgtagccaggataactttaagggctcccctggtagttataagagctccttaaataatgggaaggttgaactacaccagtagataaaggactaatttccattttgtttttatatatgatctgtcaccccgttataagcagttcatgacggtgttctttctaaattattttctggaattatctaactgacatcttcactccacagccgtttccctggggagatggtaaccatactctattccataaccctcatgtgaatccacttccaactggctacgaagatgaataaagagaatctggaccactacccgggcaccagggaccacagcactggtttggaccgttactctgcacatggaccagaaaaagtatatgggaccttaagctcaccttctttacttgtatcaaatgatgactggtatactggtctcccatccctttgcttgtggcaggagatggcttaaataaataacttaaatttagattggtcatgagctgagagttactttctttggttgtgttttttcgcagaaattagcatttgagcttcaagtcagtgtccaagttgaaaagaaattggcattagttatttctgtttccacagtgaaggtctaggctgctgtttagtgttacaggtccaattcagcccattgaataagtgtttataacagcccctcttggtttattgtgcctgatgtggataaagggaccaagtggagtggtgctaattaagcatcaagattagtccttggtcaggtgcggtggctcatgcctgtaatcccagcactttgggaggctgaggctggcagatcacctgaggtcaggagttggagatcagccgggccaacatgatgaaatcctgtctctactaaaaatacaaaaattagttgggtgtggtggcgcactcctatagctgggtgtagaggcttgaacccgggaggtggaggttgcagtg

SEQ ID NO: 1551 - DNA, 1196 bp, Homo sapiens
gcttgtggacttcggcagccgcgaggcagtggcgcgactggagaaagctatcgccttcgccgaccggctacgcgccgtggacacagacggggtggagcccatggaatcggtcctggaggacaggtaaactcgcggctgcagccccgaagccttgaccgtggcccgttcgcagccgtttaatgtgacgattagcgaacagttttccagggggttaaagagtgttagcaagattcaggaacttgcccacagtcacctcgcgagtcagtggcttcactcttccccttgttcattactgatgctctcgctagtgtaagtggaaacaaaacccgaactgctaatcactgcctttgtttttttttttgtttgtttgttttgtttttttttttttgagacggagtctcgctgtgttgcctaggctggagtgcagtggctcgatctcggctcactgcaacctccgcctcccgtgttcaagcaattctctgcctcagcctcccgagtagctgggattacaggcgactgccaccaggcccggcttattttttttgtatttttagtagagacgtggtttcaccatcttggccaggttggtcttgaactcctgaccgtgatccacccgcctcggcctcccaaagtgctgggattacaggtgtgagccaccgcgcctggcctaatcatcgcctttaaggccctactccatagagtccctacctactcactccaacgtactcttctcagtactctccttggctaccttgactgcttctccagcaagacaagttcttttcctctctagatctctgcactggcccttcgtttttttccttcctctcagtatttgcatggctgcctccctcttggcacaggtctcagcttatcttctcagaaagggctctcctaaccactccaaatcccttctccccttctagttagtaactcatcctattgggttttttccctaacattttaatggacttttgttcatttgttatatctcttttattaaaatgtgagctcattatgtagttactgttttattcctgccttgaatttttattttatttgtttttgagatggagtctcactctatcacccaggttagagtgcagtggcatgatctcagctcattgtaatgtccacctcccagactcaagagagcctcccatctcagcctcccaagtacaggaccacaggcgcgt

SEQ ID NO: 1552 - DNA, 1331 bp, Homo sapiens
gatctttgtgatgaggaatgggatgggctaattttttgccgttttcttggaattgggggcatggcaaatacagtagggtagtttagttctctacacagaacatgataaactacacctgttgatgtcaccgtctgtcaatgaatattatagaaggtatgaaggtgtaattaccataataacaaaacaccctgtctttagggctgacctttcgtcctttgacctcctcagcctccattcccatcttcgctcagactgcaagtatgtttgtattaatgtactatgtaggcggcttggagctggggaacattctttcattctaagaatttgcagatgctgacgttcctcctttctgcccctacaggctctggcttatccaagaggcaaacactgacctctggtaattaaaatcctagttcttttcttttgtcttttccaggaatttgacaagaagtacaatcccacctggcattgcatcgtggggaggaacttcggtagttatgtgacacatgaaaccaaacacttcatctacttctacctgggccaagtggccattcttctgttcaaatctggttaaaagcatggactgtgccacacacccagtgatccatccaaaaacaaggactgcagcctaaattccaaataccagagactgaaattttcagccttgctaagggaacatctcgatgtttgaacctttgttgtgttttgtacagggcattctctgtactagtttgtcgtggttataaaacaattagcagaatagcctacatttgtatttattttctattccatacttctgcccacgttgttttctctcaaaatccattcctttaaaaaataaatctgatgcagatgtgtatgtgtgtgaattacaatttgttcaaataacagcgttgaagacggtcacttgatcagatgcccaggttggtggggatgagtccatccttacagaagttaagtttctgtggggtatttcagtactctttagtcacattctctcacccatcctgcaactgttgtgcatgttgagaaatgcagtgcatgataaagaaacatttaaattaaatctttagtcctaatctgaaaaaaatcaatgtttaaggatatttgttaagacattgctatagaatgttctgggcctttggcctcaggttgtggtgatggatgtgtatgtagtagtacttgaagctttctatggctataaaatggaaataagctcaaaacaaagttgggataatgaaatggattccaggacccttgtctagccccctcccctgcctagaaagaaggtggccttaggggaaagtaaatgtttctgagcagcagttttc

SEQ ID NO: 1553 - DNA, 1165 bp, Homo sapiens
gcctctctgggaaagcatgggtcctctccctcacgcggggaaaaggactgcgtctcttaggtctggagagtgtccattgcttctcctactagaatttatgctcatgctgctccctgagaaaagaagagggggcgggaaagtcggccacgccccctccagagcctatttggtctcaggagctagagcaccggaagtgctggcgacatgtcagtgcgccctaccctaaaccttccccccccaggccacctttcccattcagctgtgggattccggggccgcctgggcgctgcacccgccacttccgcatcgaaccgccgcttcaaccgaactcactccctctgcgcgcgctccatctggtgcccgactgctgggccggcgcctgggagaagccacgccctttcccgcgcctgacagccaatgagcgggcgcctcccggcggggtggtgggtaattaatgagggccgggcgctgattggctgcagcgtcgtggccgggggcagggcggcggggtaggttgttcctgaggtgggaggcggtacccgtggctgagaagaaggaggcctgagagcgacatgtccccggcggctcaggcggagcggcccgtggcgctgtttttctgagtccggggtggcctggcagccggccgaggacgagggtcggcgggggctgcccccgtggtggtggccgccatgctgggagcctgggcggttgagggaaccgctgtggcgctcctgcgactgctgctgctgctgctgccgccggcgatccggggacccgggctcggcgtggccggcgtggccggcgcggcgggggccgggctgcccgagagcgtcatttgggcggtcaacgcgggtggagaggcgcatgtggacgtgcacgggatccacttccgcaaggaccctttggaaggccgggtgggccgaggtgagagtccccctgccgagccgcgggatccagggcctgctgtgctgggcgcagccggccgggggctgcgggccccgagcccctttcgaccctggggccgcgtctctggagcgaagtttctctctgcagcttcttcgggggcccgctctgagctcagggcctggcactggctccaaggtacctagagtcatacaggcagagagttggccagaagttagttatatttggatttctcatcctg

SEQ ID NO: 1554 - DNA, 1099 bp, Homo sapiens
gggcattccctctagattcaggtttgggcaggggtcctatagtccctgccatggggctgcttccctgtcccttccctcccctttgctggcctactctggcataattcaagtgtcttcttgccttggggatccttagtggcatcaaatggcaacatggaatattgtcctccatgcccctccagaaggacctaggagagtaggtgagctttccaaagtgagagacgaatctttctttctttttttttttaaagggcaggatgggtatgctttgggctttctccttctgtggccccggaggaaggagagactgaggcaaggcaaagtgatagtacacggaagcagaaccggaaacacccaggaactgttcagaaatctcagaagaaatctgcttctcttcgatggaaagatataattaacgatcaaagagctctaagaaaattgcaaagaagccttaatgttcaagctttagaaagatcagagcaatttttctctttcagtccaaactaagactctctgtatttaaatctctctggggcaagagggctagatttcctcattttgttatgagactagattggtaccagtagatcagctgcctagcgagggcaggtttcttctttgcatctgtgtggcttgcttccagtctggcctgtcctttccagctgccttttgtctagcctgctatggggggccagattatcttgataagagcaggtgatttggggactagctgggttggcaggaaaagagcaggatggatctcttgggacaggttcccccaggagtataaacacaaggagccaggattgtgctggcagccaaggaaacagtagtgcctgtttgagttggcagagagggccttggcacctcttgcatccaggcagtcttgtgagatgggggcacatagcactggggaaagcagaactccattctcacctctattttgagcttcagtgctttatttcagtatgaggaaaaacaacaacaaactgaagtgcgctttccgtcctttcaaaggacaactgtcgggaagggagagccgagttgcgaggtaggaggggagcactggcagggagagacattcttgactcctctcttc

SEQ ID NO: 1555 - DNA, 1740 bp, Homo sapiens
tgtcctcagacccttagtggacagactccacaaaccctctgatgagacgattgatgtggccagggtccagttagcatcagtagaaggatgtcactaggaaaggcccaggtatctggtaagtgactgtgaggtgtcacagtacctgtgacaggagagtgtcctgatgtgcttgggagaaaggccgtatgggggccagggatggaagagacagtgtgtggccacagaaattcctgtccatccaccaccagtgctgctccctgtgtgggctttagggcgagtggccccgaaccttggcccagtgctttgtcccaggccagagtcttggcaatgccacatgctggcagctttctcactgagaaggtcctagcttacccctgtgtgctggccttggattcagccccgagagaggggagagaccattcctcctgtggagtgggttccttatcaccagaccggccactctcagaactggcgtccactgtaaatccaggtgccttacgtgtggctctgtcccttatgctgcaggggaaagctgcattgccattgttcccacctcctcactggcagaaagatgccagggctgttagcactgtctcctcaccttctgtttctcattgtggctcctcaaatgggatttgcatgttcctgtcaagcgtaacaacaatcccttctctctttgacagaggcccaggtgggacagtttctactatttgatatttgagtattatctgggatgtggttctggagctgcccagagctgtgcttagtagagtgtgtcttggaaacatgcccctgggcacactgtatctgctacattagtgggctatctcttatctgcagtgttcgcttttgctagaaagaggatgtggaggaaggaggaggtgggcaatctggcttgagttgtgctgtatcctcttccttgttagcttgccttagtctcactggagaccatttgcggatagtgcttggtccatgcccagcaggacagggctttgctgcttctgaaagtctggtgttctgtatctggggctgtgggttcctgtgtctagctgctcaggaaatcttgagaagcattccactctggggtgtaaaccagtatgagtttgaaattcaagcgtttgtacctgagttggggagagaattgcaaggcatactttctctgaaagtaacagaaccattcaggctgccatgttattaaggaatctgaactgttgatagcagttaccttgtgggtgatacaatgggaggcggcaaaaaaactacctgcataggagaccctgccctttgtcaagagctgggagcacatttcatcagagtagcaggcccacctggtgccagagggcctgcccctcctgcttctgttcctttgccttgcagtctcctggagagagcctctcttttcctgtacagcctttgggccaaaatgcccttctagcttctccaaagaagatccgagtttatttcattctatgttttaagaggtaaaaggacataacaagtgaaagaagttttgggctaaagtaggctatgtctccttatgtattactcaatactgttttgcagagaaaacatttttcaagcatgtgcttcctgaagacacctcagtctttgggccatttgatttccaatacatagggtggaagaatgtgattttggggctgaccataaactggaaatttgtgaaatggcagtgattgggcaatcttcagtttattttttcagttgaagtggaactcattt

SEQ ID NO: 1556 - DNA, 1124 bp, Homo sapiens
gcccgagcccaggagtttgagaccagcctggccaatatataggaagacttcatacctggaaaaaaaattttttttttttaaagaatcagacagctgtgtgtgcctcatgtttaaatctgtaacttagaaagtcccttgtttcccagggcgacctccggcggatgtggtctgagcctttccactccaagtccagcagctcccgattcctggaagtatgatggatcacgtggaaagtgaccagatggccgtcatagtccttttctctcaactcatggtttgtttcctcttagagctggcctggtactcagaaatgtacctgtgtttaaggaactgccgtgtgactggatttggcatttaaagggagctcgtttgcaggagagaggtgctggagccctgtttggttccttctcttcctgcggatgtagaggtggggccccttccaagagggacaggcctctccccagcgcgccttcctcccacgtttttatggatctgcaccagactgttaccttctgggggagatggagatttgactgtttaaaaactgaaaacagcgaggagtctttctagaacttttgaacactaaaaggatgaaaaaaattagcaaaccgaagtttcttcaatgacccctcgagaactttgggaccagtttcctataggggactcagtttcagagaactgagacagaagctcttctgtcgttatattcttctttcctttttttggatttattaaatattttctgtggtgtgaagtgacttattaaatccacagacattgagtgacttcttacaacatccacataagaatttgttgtaatgagttcatgtccacccagatgttgtgttggcagtgaacaagggcacggtttttatacatacgtacatatatatatataaacacacacatagatatatatgaataaacaaaaatgaaatcctgctaagatcacgctgtgtagctgacaggggcttgctgtcgttttgagcatgtcgagcagtttactgtggcttccttgtatatggataagctgctgtccttccccttcacaactgaccccgcagttacaaactagtatagcatttgtgctgattgatgatagactcatggacttcaggagccct

SEQ ID NO: 1557 - DNA, 1209 bp, Homo sapiens
tctcctgccttagccgcccgagtaggtgggattacaggcgtgcaccaccacacccagctaatttttgtatttttagtagagacagggtttcaccacgttggccgggctggtctcgaactcctgacctcaaatgatccactcatctcagcctcccaaaatgctggaattacagctgtgagccactgcacctggccattttatataaaggactttagcatatgtgaattttgttatccaagggggatcctggaatcaatcccccgtggataccaggataccaagggatgattgtactttcagtgatttatcactttcatttgtcaacagattttatgtcaattctgctttctactttgccagctttttttctttttactttttaaaaaactgtggtaaaatgtatatataacataaaatttaccattttaatcgtttttaaatgtactgtcatgtggtattatgtgtattcacattgttgtgcagtcatcatcactgtttacctccagaactttttctttttttttttttttttttggagacggagtctcactctgtcgcccaggctggagtgcagtggcatgatctcagctcactgcaacttctgcctcctgggttcaagcgattctcctgtctcagcctcccgaataactgggactataggtgcctggcgccatgcccggctgtttttttttgtgttttagtagagacaaggtttcaccatgttgcctaggctggtcttgaactcctgagctgaggcaatctgcccgcctccgcctcccaaagttcatcttcttaaactgaaactctgtacttattaaacagcaaccttcattttcctctcactgagcccctggcagccaccattccactgtctatgaatttgactgctctagctaggtcacataaatggaatcctttatttgtccttttgtgactggcatacttcacttatcatgtcttcagggttcatccctgttgtagcatgtatcagaatttaagaattaacttttttttttaaagctgagtaatatttgaatgtatagataggccacatttttcttacccattctttcatcactgggcatgggttgcttccaccctttggctattgtgaataatgctgctgtgaacattgctgtacagacatctctcaagactctgctttctgttcttcccagtttgatttttgcatttatctttgtatctttt

SEQ ID NO: 1558 - DNA, 1175 bp, Homo sapiens
catgtctctattcatgagacacactggtctgtgatttttttaggtctttagttttggtatcagggtaatgctggccttatagaatgagttgggaagtgttttctgtcctcttctggaagatggtgtagaattgataattctttcttcaaatggttggtagatcactagtgaagtcatctggacttggagttttctttgtgggaggattttaagctacaatttcaattttgttaccagatattggcctgtttaggctatatattgatttagggtttgtatgtatctttatcccaatttatgttgaaattggtagtttgtctctttccatttcatctacgtagtctaatttgttgtttgtataagtttataggtttttttttctaccttttaaatgtttgtaacgtctgttgtgatgttccttctttcattcctagtgttagtaatttgtacttctccctttctcctgatcagtttagctagatgattttatcttttcaaagaattgcttttagtttcattgctttttctctagtgtttttccatttttttgatgtctgcactcatgtttatcacgtccttctttctttgcatttaatttgtgtgtgtgtgtgtgtgtgtgtgtgtgtgtgtgtatgtgtttctcaaggtagaagcttagatcattaatttgaaaactttctttttttccagtataggtattgaaaattatacgtttccctctaagcactttttagctgcatgctgtacatactgtacattttggtctgcttgattttcattcaagtcaaaatattttctttcttcttttttttttttttttttttgagacagagtctcgctctgtcacacaggctggagtgcagtggcgcgatctcggctcactgcaagctctgcctcccaggttcacgccattctcctgcctcaccctcccaagtagctgggactacaggtgcccgccaccacgcccagctaattttttgtatttttttttagtagagacggggtttcaccgtgttagtcaggatggtctcgagctcctgacctcatgatctgcccgcctcagcctcccaaagtgctgagattacaggcgtgagccactgtgcctggcccattcaagtcaaaatattttctaatttcccttattatttcctttgacccatgagttatttagaagt

SEQ ID NO: 1559 - DNA, 1162 bp, Homo sapiens
gttttcattttaaatcctagctgattgttgtggtcaatgaaatacccagtttctggagggccaggtgggaaatgctttcactggaccaacacacaaatgatcatcctgaggatctgagcttccctagactccacacaataaccttggggcacccttttagagaagactgttgaaacccacagcactcgttggggtatgaggaaaccagggcttggcacaggaagttcccctttgtagctaaaagtccagaaagaaagggttcatctttttgacttccaactgatattgggaagtttggttgaggttcaagtgtgactccttccagagccacaggtaggggagtgtgaagttgagggggaggaaagctggaaggactctgccttgggagattcccagctctgctttccagcgcttggtggaatctgggctggggaaagacggcaccgggaaactctgcttccccattgtttccatctgatcagctgtggtgtgaggacttctcagacaaaggcaaggcctcgtgcccctgcccagcccattcatggagccctgggccttcttggcttccatagatcctaagctcttgactgtagtttagccagacttgttttgctatcttataagcagttcagaattagggaatgctggttttgaagagcaaaggacaggtagtctagagagggtcgtctggcctgcttgctgggtctttgtaacccagcacttcctcttgccctcctggctttatgtttatggggagaggactcaatagctccaccccttctggcaccagatggggcttggttagtttgcaataagcaccttgcagaggttaaagccagcgggtccctagtcttaggcccagcctgcttgtgtgggctctggcctggcctggtggctggcccagggggcagcagtgcttagagcttctgcagggcttctcttgtttacacagctgcatcagacaatgccatttctccccaccacggaaccttccatctaagatttcttccagggaatgccagcaatcaggcagcacccagctgtgggggcagtggggtgggggagacccacattgatgactttttttttttcttttaatgaagaaacaccaaagaaagctgtggaaaggacctgccccacatgaaaaggataagccaagatg

SEQ ID NO: 1560 - DNA, 1113 bp, Homo sapiens
cgggtctggaactgctggtctgaaccacaaagccgcccccgctcggttccttccttggctgaccttcggcctcacgcctggcctaacttgctctcctggcccattaacctgtgttccccttttctcctctccccaaggatttggaaggagtgccaccctctaaaaagatgaaactggaggcctctcaacaaaactccgaagagatgtagacgatgctttaaagcctccgatccatgttccatggaaggtacatcagcaattaattctagagcaactttgccccagcgattcctcttgggtgcgaacagaactactaacgtttcaagtttaccaagtgcaaatccaagaagacccagaacggcgtcacttctcagacactgaagaactctgctgtgaagcaaaacactcaaacctttaagggactgtccttggggaggcaggcggggctgacagctcaggagtgtctgcacactgtctcggaagccaggattccatttgtgttgctgctgtattttccccccacttctctatgtaacgatataagctatcggagggtggtaccgatcaggaacgctttttggcggggctttccactgttcaaccgattccttccgctttctttttttgtgccttgtgcccttgaggtgacctctggcatgtatcctggtggttcttacatccccctctgcaaagtgccctcttggtttggttcgggcggcggctgccaccctactcaccgctctcctccctgccccaggacttcatcggagcaggcagggtggagcgaaggagctccttagcccacctggtttgcaggtgcagggggaccttaggcacgccccaagcaccaggcaccagggcccaaggacgcgcaggtgttggggcacagtccccaagggctcggccccttggatcaggctgggcactcgctgtgctctcccctccttggggcgtttaggactgggcgtctccaagcccaccatggcccagatggacgtgcaaagcccttggaattttctggcacttcctctctattgcccccaccaccaccacccccatcactgctttctcccagacctccgaatacgaaatggcttctctggctgactgcaa

SEQ ID NO: 1561 - DNA, 1151 bp, Homo sapiens
agcccggccgagggtacctcctcgtggaaagaatgcactttaaagctctgctgaggagttcggagcccaggctttcaggcgacctctgccctccctgcctctcctcaccctccctctcttcctgcagggcctgggaagggctttgagggagcctgggagccatgtgaagaggggcacgcctgggctgtcccacagtttagatccagttggaggttctccctggctcctgcaggcctgcggggatctctccccacttcaggcctccggccagctgcctgccctcttgtctgtgcttcagccctgcacaaaagcagcttggtgacaccactcagccacccagagtacgtgtttacaggctttccagatcaccttcctgtggggtgaacgtaatgaggcggggctggtccttggaatttcccctggaaaatggtaacagactccatccttgacccggggatgagcatgaaggcattgtcccaaaggcagaggccaccgtggtaggaattccaccaaggccagaagggaaaaaggaagaacccaccgtgtctggctgtgcgggccctggggagggtcgtgagtgcagcccctctctacttctgtgcctttgtaaaacgtgtagataaccgcagtggttggctgagccaagaactctcctaaatcagtggctttctccccaccccttgctggggagtcatttttaaaaaaatctgtgggatataaaattggcctcctgctgcttcagcctacctctccctctgctgacttaatgtcgtgattctgtttcttcagatatttaaggctgttaggttgtgtgagccttgaagtgtgtgtgtgtgtcccagcgactgtccactgtccaggagatgcatgtctttgtattggagatatttctgtaactcattctcttggtgctcacgattgccatggccatagggccacagtgccgtatctgctgcagacatgattgtttcttgttctagaggttttcttgttttcgaatcttgcctgatgaatccagccagaccaaggggcctagatttgacctctgtcctgggctcctgggccaggtgcaggaacatctgaggccactctgctggccacctccagtgggtgctgaccacaggatgggctttgtttacactcattttcac

SEQ ID NO: 1562 - DNA, 1217 bp, Homo sapiens
ctgacagaattaaaaagagaaattgaaaattcaacaattatagctgaaggcttcagtaccccatttcagtgatgggtagaacaactatgcagagatgaagaaggaaacagaagacttgaataacactctaaatcaacaggacctaacagtcatctgcagattgctccatccaacagcagcagaagacacacacttctcaagtgcacagggagcattctccaggacaggttatgtgttagaccataaaatgattttcagtcaatttaaaaaggtgaaatatttcaaactattttcccttaccacagtagaaaacattagacattatacataaggaaatttgggaaattcaaaacattatatagccttatgtatctagtttctttttaattttttgaaacggagtctcactctgttccccaggctggagtgcagtggtgcgatcttggcttactgcaacctctgcctcctgggttcaagcgattctcctgcctcagcctcctgagtagctgggatcacaagtacacgccaccacacctggctcatttttgtgtttttagtagagatggggttttatcgtgttggccggctggtcttggactccaacctcaaatgatttgccgcccatctcagcctcccaaagagaaaatctttttctatttttaattttaatttattgatttttaattattatttttctttttttttttgagatggagtctcgctctgtctcccaggctggagtgcaatggcacaatcttggctcactgaaacctctgcctcctgggttcaagcaattctcctgtcttagccttctgagtagctgggattatagaggtgcatgccaccacgcccagctaattttttgtatttttagtagagacggagtttcaccatgttagttaggcaggatggagtctctatctcctgacctcatgatctgcctaccttgcctcccaaagtgctgagattacagacgtgaggcactgcacccggccctatttttatctattttattattattatttgagacagggtctcactctgtcacccaggctggagtgctgtggtgcagtcttgactcattgtagcctcccacttcagcctcctgagtagctaggactacaggcgtctgtgtcacatttgattaattttttgatctttttatagagacaaggtctcactatgttacccaggctggtctcgaactcctgggctca

SEQ ID NO: 1563 - DNA, 1138 bp, Homo sapiens
ctttttttctttggactgctgttaataggtggctacagtttcagaaaagtcacgtataatggaactggagaaagacctagcattgagagtacaggaagtagctgagctccgaagaaggctagagtccaataagcctgctggggatgtggacatgtcactttcccttttgcaagagataagctctttgcaagaaaagttagaagtcacccgtactgaccaccagagagaaataacttctctgaaggagcattttggagcccgggaagaaactcatcagaaggagataaaggctctgtataccgccacggaaaagctttccaaagagaacgagtcattgaaaagcaagctggagcatgccaacaaagagaactcagatgtgatagctctatggaagtccaaactggagactgccatcgcatcccaccagcaggcgatggaagaactgaaggtatctttcagcaaagggcttggaacagagacggcagaatttgctgaactaaaaacacaaatagagaaaatgagactagattaccaacacgaaatagaaaatttgcagaatcaacaagactctgaacgggctgcccatgctaaagagatggaagccttgagggctaaactgatgaaagttattaaagaaaaggaaaacagtctggaagccatcaggtcgaaactggacaaagcagaagaccagcatctcgtagaaatggaagacacgttaaacaaattacaggaagctgaaataaaggtaaaggagctagaggtactgcaagccaaatgcaatgaacaaaccaaggttattgataattttacatcacagctcaaggctactgaagaaaagctcttggatcttgatgcacttcggaaagccagttccgaaggtaaatcggaaatgaagaaacttagacagcagcttgaggcagctgagaaacagattaaacatttagagattgaaaagaatgctgaaagtagcaaggtttgtattgacatcctccattcttttcttttccatttgttattcttgttttgcattatgttacttttgagttgagatcattcatcttccaaattgctgatttaattaaattgcttgatgtccccagttgagtatagtgtagtatgttctgagtatctcaagtat

SEQ ID NO: 1564 - DNA, 1156 bp, Homo sapiens
agatttgtccatgatgctagttgttccatttcctttaggggataataaccttgtgttatgaattgcacctttatcaaattaagagaaaatgagaaagcagctttgtgataacaactttgagaccaactaaaagaaaatagctgactgggcgcagtgcctcacgcctgtaatcccagcactttgggaggccaaggtgggtggatcgctaagtcaggagattgagtccatcctggctaacacggtgaaaccccgtccctacgaaaaaaaaagaaattagccgggtgtggtggcaggcgcctatagtctcagctactcgggaggctgaggcaggagaatggcatgaacccgagaggcagagcttgcagtgagccaagatcacgccactgcactccatccagcctgggcgacagaccaagactccgtctcaaaacaaacaaacaaacaaacaaaaaactatttgtaaaaatactttatgtggtaggaacaaaacttatgttcatgacgtacttttaaacagaagttttaaaatgggccagatgtggtggctcacgtctgtaattccagcgctttgggaggctgaggcaggaggactgcttgagcccaggaattggagaccagcctggcaaacatggcgagaccctgtctctacaaattgttttgttttgttttttttgagatgaagtcttgctctgtcgctcagcgtgaagtgcagtggcgcgttctcggctcaccgcaacctctgcctcccgggttcaagcaattctcctgcctcagctttaaattagctgggcgtggcgaaggcacggtggctcacgcctgtaatcccagcactttgggaggccaaggcgagcggatcacaaggtcaggagattgagaccatcctggctaacacgccatggtggtgggcgcctgtagtcccagctactcgggaggctgaggagaagcagaggttgcagtgagccgagatcgcgccactgcactccagcctgggcgacagaagcgacagagcaagactccgtctcaaaaaaaaaaaaaaaaaaattagccgagcatggtgttgtgcacctgtagtcccagctacttgggaggctgaggtgggaggatcgcttaagcccaggaggtcaaggctttaatgagctgtgatcatgccaccaca

SEQ ID NO: 1565 - DNA, 1180 bp, Homo sapiens
ctggtcttcaactcctgacctcaggtgatccacctacctcggcctcccaaagtgctgggattacaggcgtgagcccatttccttattatctgtctcctgcatgagtatgtcatctccaggagagcagggatctttgttctttttgttcatgacaaagaacaaagaacagcacctggccgcagtgggcactcagtaagtatcccttgaatgagtggaatcttagtacccgggaagttgatattgccattttacagatgagaaaactaaggctcagagatgtcaagtgactttctcaaggtcacacagccagcgagtggcaaacctgaaccccttgtgctgatgtttgctgttgtccctacaggcctggcctcgccctgtggatgatgatggccttgcccccgtgagctacaacctggccttcagcacccgcccacctccaaccagcaggatgcggctgtggaaggcggtggtggtgactttggccttcatgagtgtggacatctgcgtgaccacggccatctatgtcttcagccacctggaccgcagcctcctggaggacatccgccacttcaacatctttgactcggtgctggatctctgggcagcctgcctgtaccgcagctgcctgctgctgggagccaccattggtgtggccaagaacagtgcgctggggccccggcggctgcgggcctcgtggctggtcatcaccctcgtgtgcctcttcgtgggcatctatgccatggtgaagctgctgctcttctcagaggtgcgcaggcccatccgggacccctggttttgggccctgttcgtgtggacgtacatttcactcggcgcatccttcctgctctggtggctgctgtccaccgtgcggccaggcacccaggccctggagccaggggcggccaccgaggctgagggcttccctgggagcggccggccaccgcccgagcaggcgtctggggccacgctgcagaagctgctctcctacaccaagcccgacgtggccttcctcgtggccgcctccttcttcctcatcgtggcagctctgggtaagtaaggacctcggggacatgtggccaccagaacatcaaattaggtggatatgactgccttagattttaaaagattttacttacgtggttcagacatcaaattgatatgaaaaggaaaagaggccagg

SEQ ID NO: 1566 - DNA, 1152 bp, Homo sapiens
tggaaggatggatcctcttgctgtttcagaatgggctttgctggctggtcctgtgcacttgctgacctcaggtctctgcctctgtttcaggcatcattcacgctagaggactggttcgggagtgcttggcagaaacggaacggaatgccagatcctagctgccttgttggttttgaaggatttccatctttttacaagatgagaagttacagttcatctcccctgttcagatgaaacccttgttttcaaaatggttacagtttcgtttttcctcccatggttcacttggctctgaacctacagtctcaaagattgagaaaagattttgcagttaattaggatttgcattttaagtagttaggaactgcccaggttttttttgttttttaagcattgatttaaaagatgcacggaaagttatcttacagcaaactgtagtttgcctccaagacaccattgtctccctttaatcttctcttttgtatacatttgttacccatggtgttctttgttccttttcataagctaataccactgtagggattttgttttgaacgcatattgacagcacgctttacttagtagccggttcccatttgccatacaatgtaggttctgcttaatgtaacttcttttttgcttaagcatttgcatgactattagtgcttcaaagtcaatttttaaaaatgcacaagttataaatacagaagaaagagcaacccaccaaacctaacaaggacccccgaacactttcatactaagactgtaagtagatctcagttctgcgtttattgtaagttgataaaaacatctggaagaaaatgactaaaactgtttgcatctttgtatgtatttattacttgatgtaataaagcttattttcattaacaatttgtattaaaatgtgggttccttgaattcttacgtgctgttttatttttttgagacagggtcttgttttgccacccaggctggagtgcagtaatataatcttggctcaccgcagcctcaacctcctgggctcaagcaatcctcccatctcagcctccctagtggctggaactacaggtgtgtgccactatgcctgaataatttttaaaagactttttgtattgaatgaatgggtgtgtgatggaaaaaaaattttttttg

SEQ ID NO: 1567 - DNA, 1158 bp, Homo sapiens
agtctgttaagtgttgacttcaataagatagattatttctctcatggacacatttgggtaggtggagcagggcttgtatgccctcttgaagtccaggcatcttccgtgttgttcattaaattatgtgggcctccatttccaagttacctttgtattccaagatacctgttccagactcttgtcagtacctctacattttacctaacagagaggagacaaggggatgagaagggcatgtcgcctacttttaaggacatttcctgtgcatcatacattttacctacaccttgctggctggagaatgttcacacttagccgtaagggagactgggaaataaaactggaagtcttcattattgagaaagaaggagagaataggcagtctgctgaaggacttcatttaaggcactggcctgcttgttcttatgcaaaagtgactttatttttcttatatttgacacagaatattgctatcatctcagaagctgccagctcgggtatttcattacaagcagataggagagctaaaaatcaaaggcgaagagttcatatgactttagaattaccttggagcgctgatagagcaattcaacagttcggtaagttcctacaaactggatttcacttaatggatagctaggaatcattggggtaaatttgcgcataccaaaacctaggtttaggccgggcacagaggctcacgcctgtaattccaacatttcgggaggccactgtgggaggataacttgagtccgggagtttgagaccagcctggtcaacgcagtgagaccctttctccaccaaaagaaaagaaaaacagctgagagcagtggctcgtgcctgtaatcccagcactttgggaggctgaggtgggtgcatcacttgaggtaatagtttgagaccagcctggtcaacatggtgaaacccagcctctactaaaaatacaaaaattaactgggtgtgttggcacacacctgtaatcccagctacttagggtgctgagacgggagaattgcttgaacctgggaggcgcaggctgcagtgagctgagatcacgctattgcactccagcctgggcaacatagggagattccatctcaaaaaaaaaaaaaaaaagaagaagaaaagaaaaacttgctgggtgtggtggcgtgtgcc

SEQ ID NO: 1568 - DNA, 1223 bp, Homo sapiens
gcccactgcgcatgccctggagggctctgtgggttccgccttcagttttgcttttcacaggaggggcaaagtcttttttttttttttttcctttttgagacagtcttgctctgtcgcccgggctggagtgcagtggtgcgatctcggttcactgcaacctccgcctcctgggttcaagcgattccactgcctcagcttcccgagtagctgagactacaggcgcccgccaccacgccctgctaattttttgtattttactggagacggggtttcaccatgttagccaggatggtctcgatctcctgtcctcgtgatccacccgcctcggcctcccaaagtgctgggattacagccgtcagccaccgtgcccggccaggaggggcagagtcttaccccgaagacccaggaaggagaggcttcatttatttttttgtttttccccagagacagggagtcgcccaggctggagagcggtggcgcgatctcggctcactgcagcgtcgacatttcgggtcaagcagtcctcccgcctcagcctctcaagtatctgggaccacaggcgcgaccccacgcccggagaattgattattgattgattgattgaaacggggtctcactttgttgcccaggctggtctcgaatttctgggctcaagcgatcctccagcctcggcctctcaaagtgctggtattacaggcgtgagccagcgcgtgcctggccaaaaattttctaaatttgtataataatttataattgtaatgcatttttatagacaccatatgatctaatcttcacaaaaacctagtgaagtgacatttagctacatttcacaataagaatcctgaagctcaaaatttactgacctcaaataatccacccgccttggcctcccaaagtgctgggattacaggcatgagccaccgcgccctggcccccaccattcatttcggctctcatcccctgttgatgagtaaaatgagaatgaggcccaggcgcggtggttcacgcctgtaatcccagcactttgggaggctgaggcaggcgggtcatctgacatcaggagtttgagaccagcttggccaacatggtgaaatcctgtctgtactaaaaatgcaaaaattagctgggcgtggtggtgtgtgtctgtaatcccagctactcgggaggctgaggcaggagaatcacttgaacctgggaggcagaggttgcagtgagccgagatt

SEQ ID NO: 1569 - DNA, 1137 bp, Homo sapiens
tgccatgacattgggacagatctactacctgaagagattttttgaagtccggagagttgtttaaaaagcctcttcctgatgatcccaactcagaattcactgtttaccaaacaccttggtcataataatgtcattagtttctccatttttattttctgaactgtacattcacaacttatgtttctttgagattaatagatattgggggaaaaacgcctttttaggaaaattatagtgaaaatttgacagttgattggcataatttcttgtttgaatgctgcctccattatataggtccttccaggaactcaaacactgtaagtgaaatatgggagtatagtttttattatttcttcttttccttttgttttcataatataatgcagtttgttcaggaaatcagcacaaagcctgatagtactttactaaaatgactgcattctttggattccttcagtctatggttcaagtcactaaagattcatttttgttgagtccttatgagaaacagcagtatgaatcttgacggtttctgcccgtcctaatggcagagctctctgacttgggtgtatgctgccaggctgggtactttcatactttgttttcttgttttgctttaaaactacgactcagcatacattttcccacatacatttttacattgtaccttaggactcagtcatctccacttaaattgatgacacaagcagctaataaccatttctgggtttctgcctaaccccctaattgtctgttaaagccaattctctgggtgtcccagtgagtggtggctttttttctttccacattggcacattcacttctcccactcttggcatgtaagaaataagcatttacataattggaaaaatctggatttctgatgccaaagggttaaagcttcttggatttcatttcattgatatacagccactattttatttttgatcagtggcctttgggccactgttcagggtactgaccatcagtgtcagcattagggttttggtttttgtttcttttgggtctttcttttttggcacatgtgaatcttgttttgtgtaaaatgaaattactttctcttgttctctgatgatgggtttaaaattaaaagagcatccggttttggtatgggga

SEQ ID NO: 1570 - DNA, 1183 bp, Homo sapiens
caaaggattagacccatacagttttggttttcaaatggcagtgctgtaatttttaaaatccctttgctgtctctcacctccctccaatttttattggaatttatgaagtcccagagatttgtagaaagaagaaaaaatcaaaatattaccttaaacatttgcttctgtgagaagctccagcacctgtgtgtcactgtcatcgagatcagtaggctgtttgatggtgatgaagatggtggcctccttactcagaatgcttttttctcatttcctagtgggattttagtgtgcactgatgtgatggcccggggaattgatattcctgaagtcaactgggttttgcagtatgaccctcccagcaatgcaaggtatggtacgaggctgccacccactctctgttgaggaatttagcctaataaaggaggaatcccgaagaagataaacagataatgatgttcactgaaacattttatagcaagcctccagcgtgcttgggtctgcagtgaccccgtggattcctacagggcttgccagaacagttttgaaatggtttgaggccttgccgtgctccatgtagagcaaggttatagaaatttcagacaatgagagaaaacaaaaaacaacaacattatttgaggctgggcgcggtggctcacgcctgtaattccagcactttggggaggccgaggcaggtgaatcgtttgagcccaggaattcaccagcttgggcaacaggacaaaaccctgtctctacaaaaaatatatatacagattagccaggcgtgtgttcctgtagtcccagctacttgagaggctgaggcaggagaatcgcttgagcgcaggaggcagaggtggcaatggattgtgccacttcactccagcctgggcaacagtgtgagactctgtctcaaaacaaaaacccgttgttttaagtagcaaaaataggcaaatggatgaataacccattcatggtgaaatcgtgatactgtattggtagcaattaaaagtactttcaaatattatcagttcttgcagaaacacacaatagaatgtctaaatgaaaaaagcaatacataccaccacatgtgaaaattacaattactttcttcaaagtcagcatatattcctaatacatgcttccacgcataggaaaatgcctataaacccccaagtgttgatgatta

SEQ ID NO: 1571 - DNA, 1255 bp, Homo sapiens
ctatttgtggagtaatggcattaatcaacatagaacatcttatttgaatcaacagttaacttcagtagtcatgtgaataaaattcttattgtctaaattgagacagcctcagatatttgcagatatttactttttgtctgatatcagtacatatttggacaaagtcatctaaataatagtttgtcaccaaataactacaaaatctcattttaaatgagtaaggagaacgtgtacagaagcaaattttcttcaaaatagttgtgggaagagcttatatgtgaaagcttatgactggttttgagggagaacttactggagaaaatggactctatgttaagtatggttttcagatagaattctttccttttttaatgaggaaaaaaaatccacattaatattgaaactgcacctgtaatcccagcactttgggaggctgaggacagaggattgcttgagcccaggagttcgagagcagcctgggcagcaaagtgagaccccatctctactaaaaatttaaatgtatttattaaaactgttctctagaagctttggactgaatcccaaaagtgtttataagttcaaaagcaaaagtatttgtaatttcaacaacaaaaaatgtatttctttatgtaatcttgaaattattaaaagtccttttagcttctagcacatatttgtacaaagagtttaaggaatggtggctggtttggtttgttttttaaaaatgtttactgacgaggccgggcgtggtggctcacccctgcaatcccagcactttgggaggccgaggcaggcagatcacaaggtcaggagttcaagatcagcctggccagtatggtgaaaccctgtctctactaaaaatagaaaaattagccatgcgaagtagcaggtgcctgtagttccagctactcgggaggctgaggcaagagaattgcttgaatccaggaggcagaggttgcagtgagccaagatagcgcctctgtactccagcctgggtgacagagcgagactctgtatcaaaaaaaaaaaagatcgggcacgttggctcacgcctgtaatcccagcactttgggaggccaaggtgggtggatcacgaggtcaggagtgatcaggctgggtttctgttttgttttgttttgtgagacagagtctcgctctgttgcccaggctggggtgcagtggtgcaagctcggctctctgcaagctctgtctcctgggttcacgccattctcctgcctcagcctcccaagtagct

SEQ ID NO: 1572 - DNA, 1193 bp, Homo sapiens
agttgtggtacaacaataatctgtgacttaactcctgtcagcaaatgggaacataagcaaaagccaaacaaagtcagaaaactcctttgctttcttccccccatggacaactcagcttgccttgtttcttgcagggtggaggggggtttgggcattttctgtttactagaatttggttctcaattggtggaatagaaagtaatttcaggtgtcacctggataaaccttttattttcatagatagatatttgttttactgcagattaaaaaactatacccagctcagcaaacccatgatttcacagatattgttgcttaggataaggctagaataggtatttaatttttcaaaggcagaacttaaagaaaaataaaggtatggtgttaacatatgaaggtggtccgggaatggctgcagtttggggacacagctcgtcattccctcgtgcagtctgggtgccgagtggctgagtggccctgagaggacctgtcaaaggcaactgctaggaagccagagctcttttctccttttgttttcgtgtgtgtgtgtgtgtgtgtgtgtctgtgtgtgtctgttgtgtgtctgtgtgtgtctttgtgtttgtgtttaaacctgttcagtgattcccagcccaaggacattgttgaattttaggaagctggaattgggaatgagcttccaggaatcattgagggcaggagtggaatttggatcccagagggagtttgctaaatttatctcactcagcaggtgcttgttgagcatctgtatgcacagcccgaccaagggcagatgactgcatctgcacccgtgtctcccaaacggctgctttcattccgttttgccagaagatgtgccggggaggtgaacgtgtttagttctagtgctgacagatgtgagactgtgttcaactcttgtcttccagctaccactgccacgtgtacccctatccaaacacagccgaggagcggagggagatccaggaggggctgaacacccgcatccaggatctctacactgtgagtaagctggaagtggattgcctctttatctgagggctgccaaacatttacacgtatattttctctcttttttaacatagataatattggtcgtagacaaatcaagatgttctagtgagattggaatgttgcttccctccctcctccccatggaagttttattttagcaa

SEQ ID NO: 1573 - DNA, 1175 bp, Homo sapiens
gtcgtcctgtttgggtgttgatgtctctgaggtgtgttctttcctttctggcctctgtctttgctcctggcctgggtgaccccacatccctgagaatgccaccttttacccattttcagcacagatgctttgggcctcaaggcctccagcccagaaccaaagatggctacccaagttagggccaatctcggttggcagagggcagacccgcggagactgcgtcctgctcacatctggatggctggaggaattgttttctggtggggcaggcaggccattttatttcaactacagtgtggtctgttttctcccctcccaagtcccttggaatggtcctgggcagagcaagcgagggaggaaaatcagacccgcagggtcatgcggggcccttgtctctgccctggggttcaccctgggccatgttaaagggggaagtcctaggacattccctaggaactgaggttcacccggatctctataggttccacaaaacaaaatctcagggtccccaggaaccactgccaacaggaaccgcgcccatgcgtgtgagaagtggacggcctgaccctgaccctgtgatgagcaaaggcctggcctgcgggtttctgagggcaccaaatccctgagcttcttgcccgacagtcccagcttggaaaacagtgttcatggtgtggctgggtctgccctggaggcaggcagccagggccattgtgcctggatagcggggtcagggcagacggctccccgccccgctcctgctggctgtggggacagagtcatagaaacacatgtttctgccttcgccgggggaccgctgaggtcatggggcagccccattgataagctgcctcccagagtctgtattttgggtccatgtggctggccccggactggggagccgggggatcagcttgcatcctgtccgtccccagaacactcaggctaggcctgaggccccgcagggcacttgcagcctcccgtcctctcccctgcagccccgcccagggccgtgtcctccctccccgagctgggcctggcgtacgtccaccccttgcccagtgtccagcacacagcccccgggtgcaggagtcctcggctgggagtcaggacacctggtttgtcccgccctgtgcgactaggcccaggcccccgcccttggggcctgctttgccctc

SEQ ID NO: 1574 - DNA, 1174 bp, Homo sapiens
ccaaggcagagaaaagaaggaaacccaggaagaggcgcgtggggcgtggggcgtggggcggtcccgatgcacaaggcttggaagaggctattcaggacctcaaatatcagggaagagaaggctgaagccagggaaaagagaacccggacctatgtttggggaaggctttgagtttgcccggctgtgggctggagtccttgtttcccataagggctgggggtgacatggcgacgtcagcgctgtcattaaccatagcaacagcggtgactgtgataacaggaaagacttccatcatgtttgctctgggccaggcctcgtcccaagtactttacctatgtattaactgatctgatctttgtgataatcctgtgaagtatgtacaattagcattcccattttacagatgagaaaactgagacacagaggttaggtcatctgtccgaggtcacccagccggtacgtggaagaggcaggatatgagcccaggatgtgagctcctggctcctgccctgaatgcctgtgctgtaccctgctcagcgtcctctttctctgtcccacagacagtggctgagtgcgtcctctattactacctgactaagaagaatgagaactataagagcctggtgagacggagctatcggcgccgcggcaagagccaggtaagaggcaaggtgggggtgactgtccttgcaggctccctgcatgctcagcggccacttgcttggtggccagcaccccgcatggctggcggtaactgtctccatgagttgttgttgcttggccaccggcagtgtgagtgcaggctcccctccgtggtagcagcagatgtggggagaccccctctggggtgctcaccctgccaggctatctcgagcctcccgtagtggccaggaagatagctggggagaaacagccacgggcctcctcagcctgtgaaatcccagactcctgactgggtgacctgtgatctctgtgcgtaaaaaggctacattccaaaagtaagagcttcccaggatgacttggggtagttcacaaacttcatgtttaaaatgttaatggttgtgtgtgtttatcttaatacatacttgaaagaaaaaatagccagtacttcagctcgccgttttttcagacgccgttgcttgggatgagactgaaagattatttacgctagagc

SEQ ID NO: 1575 - DNA, 1375 bp, Homo sapiens
tgtccatcatgtctgcctgcgagaccctgtgtgtgcatctgtttgtctgcctgcgactgtgtgtgtgtctgtcatatgtctgcctggatgaccgtgtgtgtgtgtctgcctgcctgtgtgaccgcctgtgtgtctgcctgcctgcctgtgtgatggactgtgtgtgtgtctgtcatatgtctgcctgcatgaccatgtgtgtgtgtctgcctgcctgtgtgactgactgtgtgtctgtctgcctgtgtgaccatctgtgtgtctggctggctggctgtgtgacttatgtgcctgtgtatatatgtgtgtgtgtgtgtctctctgtgtatctgcctatatgactgtctgtctgcctgtgtgactgtgtgtctgtctgtctgtctgcctgtgtatctgtctgtgtgtctgccatgtgactgtgtgactgtgtgtctactgtgtgtgtaccgtgtgggtgactgcatgtgtgtatgtgactgtgtgtgtctgtgactgtatgtgtgtgtatctgtgtgtctgcctgtgtgacttgtgtgtgcctgtatgtatgtgtgcctgtgtatatctgtctgactgtatgtatgtgtgcctgtgcatatatctgtgtgtgtgtgtctctctgtgtatcttgtgtgtgcctgtatgtatgtgtgcctgtgtatatctgtctgactgtatgtatgtgtgcctgtgtatatatctgtgtgtgtgtgtctctctgtgtatctgcctatatgactgtctgtctgcctgtgtgactgtgtgtctgtctgtctgtctgcctgtgtatctgtctgtgtgtctgccatgtgactgtctgtgtgactgtgtgtctactgtgtgtgtaccgtgtgggtgactgcatgtgtgtatgtgactgtgtgtgtctgtgactgtatgtgtgtgtctgtgtgtctgcctgtgtgacttgtgtgtgcctgtatgtacgtgtgcctgtgtatatctgtctgactgtatgtgtgtgtgcctgtgtgtgcatgtctgtgtgactttgtgtatctgtgtgtgtctgtgactgcatgtgtgtctgcctgtgtgacttgtgtgtgcctgtgtatatctgtctgactgtatgtgtgtgcctgtatgtgcatgtctgtgactgtgtctgagtatatgtgtgtttgtgtgactgcatttgtgtgtgcctgtgtgacttgtatgtgcctgtgtgcttgtgtgcctgtgtgtatctgactgtatgtgtgtgcctgtatgtatgtgtctgtgtggctgtatctgactgtatatgtgtgtgcctgtgtgactttgtgtgtgtgcgcacgcacctgtgtgtctgcctgcatgtgagtgggcaggggggaggcggcgggtgccaggtgcaggagcatct

SEQ ID NO: 1576 - DNA, 1684 bp, Homo sapiens
ggggtgtcttccagccctcatggcgtgggctccagaacctcccgcctctactctccagggctccctccctttgcctgtctcagggtccctgtcccctttcttcgggtcttgtctctttccctctccccacttctctctctttccctctcctagtttcatcttcctctgagtctctgtccccttcctttggatcttgtctctctgtgactgcctctctctctctctctgatcctctctttctcatctctctcactccagtctcacctctcagtctcatctcctgtccatctccaggtctctgtcctttcttggatctcatctgtctatctatctccgtctctgtgtctccccttctcccagtctctgtctctttctcacctctgtctccctgtctgtctccctctctctgggtccctgtttccctctctgggtctctgtctccgtctctctctctctgggtctctgtttccctctttctctgggtctctgtctccctctctctgggtccctgtttccctctctgggtctctgtctctctctctctctctctgggtctctgtctccctctgtctctgggtctctgtctccctctgtctccgggtctctgtctccctctctctctgggtctctgtctctccctctgtctctgggtctctgtctctctctctctgggtctctctctccctctgtctcagggtctccatctctctctctctgggtctctgtctccctctgtctctgggtctctgtctccctctgtctctgggtctccgtctctctctctctgggtctctgtttccctctctctgggtttctgtctccctctgtctctgggtctctgtctctgggtctctgtctctccctctgtctctgggtctctgtttctctctctgggtctctgtctccctctgtctcagggtctccatctctctctctctgggtctctgtctccctctgtctcagggtctccatctctctctctctgggtctctgtctccctctgtctctgggtctctctctccctctgtctctgggtctccgtctctctctctctgggtctctgtctccctctctctgggtctctgtcttcctctgtctctgggtctctgtctccctctgtctctgggtctctgtctccctctctctgggtctccgtctctctctctctctctctctctctctctctgtctctctgggtctctgtctctctctctctctctggttctctgtttccctgtctctctgggtctctgtctccctctctttctgggtctctgtctccctctctctctctgaaactcccgtctcccaggacgtgcctccttctcttggagcctgcagtggtgtgtgtaacctgcttggttgagaccccatgggccctgccctgaagtctgagaccgcccccgcccgggggtttcctgaagtccatgcctggtggccccaccagctgccccacactgcttgtgtccctccccccgcagcaggactgggtgtgctggaggtccatgcacagcacctggttggagccaatcctggggccacacaggccacactctgacacccggcctgtgggcggcagcaggtctcggggtctcgggctctgtggcctgtattcctagttggaggctgtggctgtttctccgtggccatctttccgtgggcagatgtggctgccggggtgcat

SEQ ID NO: 1577 - DNA, 1178 bp, Homo sapiens
taacctcatatcagtcctgtcccatgtcatggtgtcagcctcctgcacagggtcatagccttgcccaggtcatgctgtggcctgtggcccgtggcccgcctgagctggccctggtccctgctgcccgggacagcggtgtgtgatgtccctgctgccggccgcccctcctgggacaggtgctttctgggaattctgccctgtgacttagaaacccgggggccatggagtgaagttggatgggcttaggggggctgggagccatctgggtggtggtgagggcagcgcagagtccctgtgcctgccgggtgaaggcctgggtggggaggaggcctctggtcccttgcgtggcttgcatggctcggagggaccttgaatgccatgcctgtctccttgtgctcccggagaacaggtgagtgtggcagtggatggaggagggtccaggcaggcccctgggtgctcgcgtgtcctcacgggaccacaggaacgactcggggacctgtgcacggaggagccagctgccccgtggctgatcttgtttttcttttcttgttttcccgcaggtgccagtgacggggtggcccgtgagctgatgacgaggactggcttttaatccttggtggtgattaagagaaagcttattggggcctgggagcagctccccgccgacccccaccaccatgtcgggatccacacagcctgtggcacagacgtggagggccactgagccccgctacccgccccacagcctttcctacccagtgcagatcgcccggacgcacacggtaagggggtgcacatgtgtgcgcctggggctacctttgagacccttcttccattccactgagtcttcaccccttcctttctcctgggagccaggctcatgtggctctgagcctcccagggcagaggggaggccgccacagagacccctggtgtctgaagccttttccagaatatctgataaaatctctttgctcccattttaaagctgggaagatggaggctggggccaggctgagctggggctctgccctctctggactggtagtgggattggcacgcgaatgtggagctcctgctgtattcactttcctgcagcctagcctcacctctgctcccccgctgccgcagtattgggtaggattggggtggcttccagggggcaagggggccggata

SEQ ID NO: 1578 - DNA, 1183 bp, Homo sapiens
ttgcacacctgcacacacgccctggcacacatacacacatgcgtgcaggcttgtgcagacactcagggatggagctgctgctgaagggacttgtagggagaggctcgtcaacaagcactgttctggaaccttctctccacgtggcccacaggcctgaccacaggggctgtgggtcctgcgtccccttcctcgggtgagcctggcctgtcccgttcagccgttgggcccaggcttcctcccctccaaggtgaaacactgcagtcccggtgtggtggctccccatgcaggacgggccaggctgggagtgccgccttcctgtgccaaattcagtggggactcagtgcccaggccctggccacgagctttggccttggtctacctgccaggccaggcaaagcgcctttacacaggcctcggaaaacaatggagtgagcacaagatgccctgtgcagctgcccgagggtctccgcccaccccggccggactttgatccccccgaagtcttcacaggcactgcatcgggttgtctggcgcccttttcctccagcctaaactgacatcatcctatggactgagccggccactctctggccgaagtggccgcaggctgtgcccccgagctgcccccaccccctcacagggtccctcagattataggtgcccaggctgaggtgaagaggcctgggggccctgccttccgggcgctcctggaccctggggcaaacctgtgacccttttctactggaatagaaatgagttttatcatctttgaaaaataattcactcttgaagtaataaacgtttaaaaaaatgggatgcctgcctctgtgacagccttgtttgctgaggtcgtgggggtgggggcctctgggaagttccgggctcctcttctcttggtcaatagctcctttctggtggctgccaagagcgtctctcccagggccgggctgctggcttaccttcctgttgttttcaaatttcaaccttgtgcaatgttgagtttcatagaaatactgcatgagtacgcccttgtttagaagcagcagggtctgagtcccatcccacagcccccagtgcagacgcttttgccacttttgcatggggccccctggatgtgtttctgtgcatttatctacaaatcctggtgcccataggacatgccccgtgttgttctaggcctttg

SEQ ID NO: 1579 - DNA, 1162 bp, Homo sapiens
tcagccacctggaatcgccttaccctggcctttggtttctagcaaatgggatggaagtgagtccccatggagggcttgctccatgaaggtgtttttcctggatgagtcttggccccagtggcgatttgctgcaggcttgttggcactgtcattcgtgggtcctgcatggaggttccttagtgtccagagggtgattccatgtctgtggtcagcaaaagagaggcccctggggccataagccacaccccccaaggctgaacccagagagtttgtggtttaaatcttgggcctggaggattctgtggaggagagttcggtccaggccttctgctccaggaggcgctggcagctccgacaccacagacacattaattgtgcggagaattcaacgctagggctcagtcaaaaatcaaaaacgcaaaacaaaaagagaatcccttttatttacctcgtctccctccccctgtttggacatgaccttgagctctgctggcccacaagtggccaggctggagctgtcttgcaaagagaaacaaaaacaacacaaaaagctgcgttcttgactttgaagccttaaagggcccaggggctggctccctgtgggtgttgggggcgattttcctcccaaagcctgcgtgagatatggagacactccgcctgctcagaagctccccaggtcccgggttccaggaagcctcatggcccaaggcctggccgtcttaattttcttgttttctttccctccactccactgtttcttcctgttcactgattgcctgtgctggggagggggaaggaacgggaggggcctgaccttgttcacttcctggcattttgggtgaagttccttacaccttctctggaagcttctagaaggacccttgaggcgctttaaatctccattctctgggttttcctcccaccttcctggctgctctgtcttcttgcctgctgatgcctcctcatctccctggcctcctgcctcctgctggtggagctccaggcatcctttctgtgtgtcctcatccctcatccctggggtgggctcctccagccttgcgcctgaatggcatctctgtcctgaccactcccaaattggtatccctgggcccagacctttcccctgaaccccacccccgagtgtccaacagcagagtccgta

SEQ ID NO: 1580 - DNA, 1199 bp, Homo sapiens
ccttcgctaatgcgggaaagctcttattcgggtgagatgggctggggcaccatctggggaccctgacgtgaagtttgtcactgactggagaactcggtttgtcgtctgttgcgggggcggcagttatggcggtgccgttgggcagtgcacccgtacctttgggagcgcgcgccctcgtcgtgtcgtgacgtcacccgttctgttggcttataatgcagggtggggccacctgccggtaggtgtgcggtaggcttttctccgtcgcaggacgcagggttcgggcctagggtaggctctcctgaatcgacaggcgccggacctctggtgaggggagggataagtgaggcgtcagtttctctggtcggttttatgtacctatcttcttaagtagctgaagctccggttttgaactatgcgctcggggttggcgagtgtgttttgtgaagttttttaggcaccttttgaaatgtaatcatttgggtcaatatgtaattttcagtgttagactagtaaattgtccgctaaattctggccgtttttggcttttttgttagacaatgcagatcttcgtgaagactctgactggtaagaccatcaccctcgaggttgagcccagtgacaccatcgagaatgtcaaggcaaagatccaagataaggaaggcatccctcctgaccagcagaggctgatctttgctggaaaacagctggaagatgggcgcaccctgtctgactacaacatccagaaagagtccaccctgcacctggtgctccgtctcagaggtgggatgcaaatcttcgtgaagacactcactggcaagaccatcacccttgaggtcgagcccagtgacaccatcgagaacgtcaaagcaaagatccaggacaaggaaggcattcctcctgaccagcagaggttgatctttgccggaaagcagctggaagatgggcgcaccctgtctgactacaacatccagaaagagtctaccctgcacctggtgctccgtctcagaggtgggatgcagatcttcgtgaagaccctgactggtaagaccatcaccctcgaggtggagcccagtgacaccatcgagaatgtcaaggcaaagatccaagataaggaaggcattccttctgatcagcagaggttgatctttgccggaaaacagctggaagatggtcgtaccctgtctgactacaacatccag

SEQ ID NO: 1581 - DNA, 1606 bp, Homo sapiens
atcccagctacttgggaggctgaggcaggagaatcgcttgaatccaggaggctgaggttgcagtgagctgagactgtgccactgcactcctgcctagataacagagtgagatcctgtctcaaaccaaacaaacaacaaacaaaattctccaggtgtggtggtgggtgcctgtagtcccagctcttcaggaggctgaggtgagtggattgcttgagccgggagaaggagtttacagtgagcctagatcacaccgctgcactccagcctgggtgacagagggagactccgtctcaaaaaacaaaaccaaacaaaaaaagataattggaagctttgacatggttgtatcttagaatatgtgcaaataaaaatgcaaataaaaaatgtgtaccaactcactgaggcattttgttgaggtgatgtatcattttcctcattgccagcaggtgacacaagaagagtttaaaacaacagcggcttttaattgcttacagagctttctcaattaaaagtctagtgttgtgactgcttaaaaaatcagatcccattggctgaggagccaatggggcgaagctaccatctgtgggattatgactgaacgcctcttaagtcagaatcccgcccaggcggaacgatacggcagccccgcggcgcctcggttggcctcggtcggcctcggatggcctcggtcggcctcggtcggcctcggtcggcctcggtcggcctcggatggcctcggtcggcctcggtcggcctcggtcggcctcggatggcctcggttggcctcggtcggctcggttggcctcggatggcctcggatacctcggatagccggtccccgccggcgggccgccccgccccgcgctgggaccagggtccggtgcggagtgccctttgtcctgggaaacggggcgcggccggaaaggcggccgccctctcgcccgtcacgcaacgcacgttcgtggggaacctggcgctaaaccattcgtagacgacttgcttctgggtcggggtttcgtacgtagcagagcagctccctcgctgcgatctattgaaagtcagatctccacacaagggtttgtaaaaaaataataataataataaaaataaaaaataaaaaataaaaaaaccatcagatccccatggctgacagatgctttaaaggtagtgaccccatccctccaggctcagctgcttcctccactttctcctcctccaggaagccttccctgaccacagcagaccatgatggtctttcccttctctcacttccacgctctgaccccacagttggggtaagcaccagtttatcccaaagctaaggagctccggggcctctacggaaaatagaaaagtttcttaacgttaccctaataagttgtaacaaatgtagtggctaaaaacaatataaatttattatatgacagttcttttttttttttcttgatatagagtctcactctgttacccaaactggagtgcaatggcacgatctcggttcactgaaacctccgcctcccagattcaagcaattctcccacctcagcctcccgagtagctgggattacagacacctgccatcatacctggctaatttttgtatttttgt

SEQ ID NO: 1582 - DNA, 1166 bp, Homo sapiens
tgagctcaggtgatccacccacctcagcctctcaaagtgctgggattacagacgtgagccacattgcttggcctatctggattttttaagacaggaataatgttttccagtatagccagccatttaaagaccttctgaagaatgtgtttccaggccctaccctcagaatatggcagcttggttatccagaatctcatttagcattaattacttcagatacttttttgggatgaggggagtattaatggtgaagtatatcagggagatttgatagggtcagctcatctctcttaggaggaattgtgtattaacatttttagaattgacagagaccttgaaagtgaggggagagatacaggtgactcgttgaggtctaagactataactagttgaatcctagtctctggttcttagcattcttcacttgtgcagtaaactgagtgtactaattcccacaaatgtttcttcagcccagtgtgccatcataatgtttgatgtaacatcgagagttacttacaagaatgtgcctaactggcatagagatctggtacgagtgtgtgaaaacatccccattgtgttgtgtggcaacaaagtggatattaaggacaggaaagtgaaggcgaaatccattgtcttccaccgaaagaagaatcttcaggtgtgtaaaattaaaacttcctgagttatttctcttagcggagattatatgtaagaccatgaaattaaccagtgtctattatatatggaaatgatttttttttccccaagacggagtcttcctctgtcccccatgctggagtgcagtgtcgcaatcttggctcactgcgacctccgcctcccgggttcaagcagttttgtctcagctcccctagtagctggattacaggtgtgtaccaccacgcctggctaatttttgtacttttttttctagtagagacggggtttccaccatgttggtcaggctgatctccaactcctgacctcaagtgatccacttgccttggcctcctaaagggctgggattacaggcatgagccactgtgcccggccggaaataattttgtcttttttatactactgtttttaaagaatgatagagattgggtttcactgttggcccggttggtcagctgaaatgtttgtgtatttatatatttgttgttcga

SEQ ID NO: 1583 - DNA, 2225 bp, Homo sapiens
cagccttctgagtagctgggctcacaggcactcaccaccatgcccacctaatttgtttttttgtggagttggggtcttgctctgttgcccaggcctgatcgtgtactattggcctcaggcaatcccacctcagcccccgaaagtgctgggattacaggcatgagccaccatgccttgccaagaatcttaacattttcttatcttgcaatgtcctagaaaaatcgtcatcttaataatgaattttaaaaagtaattttacctttcttttaaacagtactacgacatttctgccaaaagtaactacaactttgaaaagcccttcctctggcttgctaggaagctcattggagaccctaacttggaatttgttgccatgcctgctctcgccccaccagaagttgtcatggacccagctttggcagcacagtatgagcacgacttagaggtattgtggccactttgctgttcagattgttcggtttggcttgtttattcctggcagttttgatctggagtgttaacgtttttccatctcttcgtctaggttgctcagacaactgctctcccggatgaggatgatgacctgtgagaatgaagctggagcccagcgtcagaagtctagttttataggcagctgtcctgtgatgtcagcggtgcagcgtgtgtgccacctcattattatctagctaagcggaacatgtgcttcatctgtgggatgctgaaggagatgagtgggcttcggagtgaatgtggcagtttaaaaaataacttcattgtttggacctgcatatttagctgttttggaacgcagttgattccttgagtttcatatataagactgctgcagtcacatcacaatattcagtggtgaaatcttgtttgttactgtcattcccattccttttcgtttagaatcagaataaagttgtatttcaaatatctaagcaagtgaactcatcccttgtttataaatagcatttggaaaccactaaagtagggaagttttatgccatgttaatatttgaattgccttgcttttatcacttaatttgaaatctattgggttaatttctccctatgtttatttttgtacatttgagccatgtcacacaaactgatgatgacaggtcagcagtattctatttggttagaagggttacatggtgtaaatattagtgcagttaagctaaagcagtgtttgctccaccttcatattggctaggtagggtcacctagggaagcacttgctcaaaatctgtgacctgtcagaataaaaatgtggtttgtacatatcaaatagatattttaagggtaatattttcttttatggcaaaagtaatcatgttttaatgtagaacctcaaacaggatggaacatcagtggatggcaggaggttgggaattcttgctgttaaaaataattacaaattttgcacttttttgtttgaatgttagatgcttagtgtgaagttgatacgcaaggaaaatggtccatgtttacccacagttttcaggtactcctagactttaaagatgtcttgaacatttaagttcttcagcagttcacactacaccgtttttttgtttttttttcccccccgggagggtttttttgtagggcagcacagcagagcaggacatggatgaaatactaggaatatgcacagtggggcagtgtgggggcttctcagtaatggagaacagttggtgaaacttttttttttttttaactaagcatttaatttatcttgcatattttccacatttaaaaatgaattaggtctattaggataattaggagtttgatcccatcaacactattcttgtagcagttaggaatcttgagctatttttttctcatacgattactatagtccagtttaccaaagttttctttagatgtctgataatcttgagatgattgcttaccttaaaaggtatagaaaggatcacttaaatatatggaaaaatgaaataagggtgaagctgaataaagttctacttactgtattaactggcaacagttgagtttcttaagatctgaattgctgtgtatgttacgctgtattcagaaccagtttctaaccagcctgtgagatgggaagttttttccccataattgggatgaaacctttcattcaggtattttgaattgaaggtgtatgtgttgtttgtaaccttgtggagattgcaagtggtgttgacattctggatcttctatgtaac

SEQ ID NO: 1584 - DNA, 1133 bp, Homo sapiens
ccatccaccacctgggaccccagagccctgcagccgcgggtggggccggcctgcagcccctggccagcccaagccacatcaccacggctaacttgccaccgcagatcagcagcatcatccagggccagctggttcagcagcagcaggtgctgcaggggccgccgctgccccggcccctgggcttcgagaggacgcccggcgtgctgctccccggggctgggggcgcagcggggtttgggatgacgtccccacccccgcccaccagcccttccaggactgccgtgcccccaggcctttccagcctcccactcacgtctgtggggaacacgggaatgaagaaggttcccaagaagttagaggagattcccccagcctctccggagatggcacagatgaggaagcagtgcctggactatcatcaccaggagatgcaggctctgaaggaggtcttcaaggagtatttgattgaactgtttttcttgcaacactttcaagggaacatgatggatttcttagctttcaaggagagactgtatggaccattacaagcatatcttaggcagaatgatttggacattgaagaagaggaagaggagcactttgaagtcattaatgatgaggtaacagttctttgttttggtgcttgtcatgggaggcagagctcagggcttatgctgcgtgcaggtgcaacgcagagcttaccatctcagagcatgcgttctaggcacttcactttaaagacacactgtggctgtgaatagtggtttaaagtccctcagagtctccccacatttacagagggtggttccagggatcccagcacatggctgaacccccagcagcatggaaactccagtggtgttcagtcaggcacctctgtggcaggtgctcacggcggcagcgtcctggcacctttcttggaatgccaccacatttgcctgctcctaaacggttgtgccgtgcaagatgagaaccccagagtccacccttgccagctgcctgcagtcagggctggctggtctcaaagccaagattccaagttcctgaacacacatctcaatgtcaagagtttctgaacaagttacagctctaacttagaatatacagagcaaaaatttatagaatttcatttt

SEQ ID NO: 1585 - DNA, 1197 bp, Homo sapiens
cggcccagcattggccgggaccctccgtgtgcccagcggggttttggggggcagagtgatggtggagatgttgcctctgctcccagcatccccctggctgcttccctctgccccagcgggctcctcaagtgaactggctcctgccccagggcctttgcaccagccacagctgtggcctctgccgcttttccctgtgttgccctggtttgaacgtcccgtccccgtccccccgggaggccttccctggtaccccgtgcgtggtagtcctgcacaggcgcccctccttccccactcttcatgctgtcccgcccgagccctctcagcactcccgctgcagcagggcagacagggcccgtcctcttgctgtgtcccaggcagcctgtcacaccgggtacgctccagagccctggcccccctccccgccctccttgggctcctggggcagggctgggcctaggtgctggcatcctgagctcatgcggccaccagaggccgctgcagccttgcccaggcctgcagcgcccgagctgccctgctaggtttcacctcgccggggtctgcagtatttcctgctcggattcagccagggcctccctcctgacatcacggagggtttgtgctgggctgttaggcggatctcggatgatgggcgaggccaggaggagagtgaaagcgcctccgagtcagccaggcttggattctgtcgtcagaggggctctgtgtctagcaacctccacgtaaccgtgttcggtcctctgctccctgtgttccccgcatgagccgggcatgaacagggacctccttcaccgcctgaggtcccctctccctggctggtgacccccatctctgagagcacggggacgtcccctgtgctgtggaggagcgtgtgctctccgagatccaggtgctgcccccgaggagcgcatgccctctgaaatacaggtgttgccgccatccccgagagcacggggacgtcccctgtgctgtggaggagcgcctgccctcccagatccaggtgctgcccaccaggcggtgttaggagtgcctcgtccgcaagggcgccatccttgttaatgggattcaggcctttgtaaaagtggattcttcacgtggtgctgagccggctgctctctggcctttggcctcctgtcaggttgggcgcagccaggaggccctcgctagaggctggtgccttca

SEQ ID NO: 1586 - DNA, 1220 bp, Homo sapiens
gtcgcgccttccccgctgccgcccccgccccgggctccgccgccctcttggagcccccggagcgcccctaccgcgaccgcgagccccacggctacagccccgagcgcctgcgcggggagctggagcgcgcgcgggccccgcacctgccgcccgccgcccccgccttggacggcgcgctgctgccctcgctgggagccctgcacttcccgcgcctctcgcccgccgcgctgcacaatgggctcctggcgcggaccccgcccgccgccgccgccctcggcgcaccgccccccctggtgacggcggccgggccccccacgccccccgggccgccgcggagccggactactccgctggggggcctcgggccgggcgaggcgcgcgactactccccgtcccgaaatcccccggaggtggaggcgcggtagccccggggccgcagacgcctctccgagcggagcgcaccgctgtccgtctctccatcagttcctagaactcaagcacagctcccgccgatcctggggcggcgccgcctctccacccgcagcctgcggaggcggggacttgggtgtcggcttttctgagggtgatcttttgttttccgagtttgggattcggctgttgggaaaaaaaaatcgcgtttgtaccttttccccccacagatgagaagtgtttgtaatggatttgtatttttcttaattttatgctctttagacgtttaaaagaaccaaaaaagaaacttttgcttcttcgttttcggttgggatttgcagtttaatggcctcagatccttctccagatccccagggtttctttgtcttatttatggagaaaaaccggtcactttgtccagcgcactgtgaggcccccactcaggccagccctggcccccccttggtacttggaaccgaagttacagattatattaaaataataatgtacaaaactttgtttttttgccttattatgcagaagtgtaatttcttttttggtttgtttttttaaaagcaaacgaaacgtgtaaatagtctgttgatataaatatatgacgttactaaattcttaatctagatagactttataaaaaccgtttccagaaacccctctggttgtttgtctaacatggtcacaaaaacccaggcgctgctggctgtaaacattatcagaagtttaatggcagcaactttccttcaactatgcaagcgcttcccggcggctctgct

SEQ ID NO: 1587 - DNA, 1100 bp, Homo sapiens
gtgcacagtttaataaaataaaagccaagccaggcgtggtggctcacgcctgtaatcccagcacttgggaggcctcggcgggcagaccacttgaggtcaggagttggaaaccagcctggccaacatggcaaaaccctttctctactaaaaatacaaaaattagctggatgtgatggcatgtgcctgtaatctcagctacttgggaggctgaggcacgagaatctcttgaacccaggaggggaggttttagtgagttgagattgcaccactgcactccagcctgggtgacagaatgagactctgtctcaaaaaaaatataaaagctaaagttttgtgtgtgtgtgtatgttttaaagtattgccacacaggcatattagagagctcttgaaattgcagccttctgcgtctcaggctagagaagggcatggcctagaggagcacagtccagggtgagctcagactctgccccttgatttctgcagtgttttacccattgtctttctctaggcagccaacatgcctgactctgagctattcgagctcatctctgagaaccgttccatgtctcggaagctggaagattacggggagcagaagtctacgtccatcagcacagcaaagcgcctggccgagttcctgggagaccagatggtcaaggatgcagggctgagttgccgctacatcatctcccgcaagcccgagggctcccctgtcacggagaggtgagggctccccccatcacggagaggtgagggctcctcccatcacggacaggtgagggctccctccgtcacggagaggtgagggctcccctcatcacagagaggtgagggctgccctgtcacggagaggtaaggggttccttacagatttgggctgtgtttaacaccaagtttggggatggcataagtgtccatcaaccagaaatggataattgccattttgtagggaatgagatacactataccagagttcaaagggttgaattgcagctacaggttacaacactgacagtttgaaaccactttggagaaaaaagcaaaaatcaggttgaaggaagacccttatgcctccgtgtatgtaaaacttaaaaacatgg

SEQ ID NO: 1588 - DNA, 1177 bp, Homo sapiens
ggccgccaaggccaagctaggctatgatcccgtggagctagacccggaggacatgtgccggatggccacggagcagccccaggcacgtaagccacatcccggctgcccctgctgccgtgtgcacgcatccagatggccacggagcagccccaggcatgtgagccacatcccggctccccctgctgccgtgtgcacgcatgtatgccagcccgctccacccagcaggctgtgtctccgggacacacgtgttttgtcctgtgccggtctccttactgtgtgtgcggcaggctggtcaggccaggctttgctttctgtgcttcacacttgaccctgggctcttgatttttgatggccctgctctctggcgttctctcctcagactctggccacgtattctgtgtcagatgctgtcgccacttactacctgtacatgaagtacgtccacccattcatctttgctctgtgcaccattattcccatggagcccgacgaggtgagcattatctgtcctgtcggcaccctggcctcctcagcccttgccccattccaaatgcactggagctgaatggaggtggatgtcccaggagtgctggcaccagaggcggcagtagaattctggtgtgtgacgtcagggatgtcctttgggaattctctggccctggtgtgaggaagaaaccacaggaggcagaatttgcagccatttaccacgaggttttctctcctttcacactgaagttcagcttaggttcctggactttgcctgcaagtcagggcctttggtgttgcttttggctggaagccttggtttctcttgcaggtgctgcggaagggctctggcactctgtgtgaggccttgctgatggtgcaggccttccacgccaacatcatcttccccaacaagcaagagcaggagttcaataagctgacggacgacggacacgtgctggactctgagacctacgtcgggggccacgtggaggccctcgagtctggggttttccgcagcgatatcccttgccggtttaggatggtgtgcttcttccctgggattcagattcttcccactcttgtgctgtggtaggacccagaagctgcaggggctgaaataaagccccttctccccatcctgtcccacggcccctcaccgggtgtggcttctctggcccagcaccccccg

SEQ ID NO: 1589 - DNA, 1181 bp, Homo sapiens
atggtccagcaatcccacttctgggtacagacgcaaaacaatcaatgaaagagagatctgcacgcagcactgttcacgctagcgaggagatggcaacagggcaagcgtccagcaatgggtaagcggtggggtcggtgcacgcaggcgtccagcaatgggtaagcggtggggtcggtccacccagggagcgctggtccccctggaaggaaacccaggctctaacgcggtccctctgaggaccctgctaggcgaaacgcgccggccatagaaagactgtcccgcaggagagggcggtgttcggcccggggtttgaggggtcgggaccaggaggagggacagcccggccgaacctgaacgcacttcaggccgcttgaacagcacacgcaggaactgcgccgacggaaaactttacttcgtgttccgccaccaaaaaaatatcgtttaaacaaacctgcggcagcttcccagctcccttaaaccaggatcccaagttctccgcgtctccgcccctgcacccagcctccggcctcggcaggcgcttccggtgcggaaccttctggaaagtaccgcgccgccctcccggcgtccccacaaccccgcccgcacctgcgcgcaccggcgctcgcgagcacaagtgacgggactggagcgtggcgcggcaggtggctccacgaaaacgccccttcgcgcaaggctgccccgcgtcctgccgcgccccaggaggcgggacttccgcccccgccgcccggaagcggcagccgggggaagcgtgttcctcgcggagcgccgtcggggccgtgggcgcctgcgcgggccggcgcgggagcaagcggcatggcgttccggcaggcgctgcagctggcggcctgcgggctggccgggggctcggccgccgtgctcttctcggccgtggcggtagggaagccgcgcgcaggcggggacgcggagccacgcccggctgagccgccggcctgggcggggggcgcgcggccgggccccggtgtctgggaccccaactgggacaggtgcgcgcggggctgtttggggccggggtcgggatgggggtcagggcaggtgttaccgttgggatcgagatcgggaccaggtttaaggttgcgatcgggtcgggatctggggtcgccgtctgctttccccagcggaggagccgctttccggggccg

SEQ ID NO: 1590 - DNA, 1185 bp, Homo sapiens
ggactacaggtgcctgctatcacgcccagctaattttttgtatttttagtagagatggggtttcaccgtgttagctgggatggtctcgatctcctgaccttgtgatccacccgcctggcctcccaaagtgctgggattacaggtgtgagccaccatgcccggcctagctcagcccgttttaaggacagagccccctggctctaacgtgctctttctctctctctctctctccccagagcactgcagtttcctcctgaaggctggctccggctctccctcaataatggcagcatcacccacctggtgatccgacccaacggccgagttgcgctcaggaccctcggggacacggggttcatgcctcccgacaagatcactcgatcctgagggctccggcctctccttccctctgtcctccctgcacaggccgcacacacttaacgttttgttcccaaggagaccggcggaaagtagaaacctgcaatgctgcatctgggaactgacttgtgaccaggctgagaaggggagagttgggatcagacagcctgacttctctgcagggttttatacctgaccatgaacccccaggatggcgtggggtttaaggtgaaagcgtctcacgcacaagtcaggcctgttgtggggacttgaaagaggcctgacccagaccaccatgttcgcacccacagctgacccgtgctgagggtccaggctccattggcaaagccggtcaggcacgagggcgactgaggcacgtggatgaggagggcacccaggttctgttcacaactcacttcacttcatacatccttttaatttcttaaaaccctcttgtcccttaaatatttgtcaattaaagattttctggctgggcacagtggctcacacctgtattcccagctactcaggaggccagggtgggaggatcacttgagctcaggagttcaagaccagcctggacaaggcaacatagcgagaccctgtctctactaaaaatacagaacttagctgggtgtgtcgtgggcatctagagtcccagctacttgggaggctgaggtgggtggatcacttgggcccgggagctggaggctgcagtgagctgtgattgtgtcactgcactccagcctgggcaagcgagggagacttaaagcaattttttcttttgaaacggagtttcactcttgt

SEQ ID NO: 1591 - DNA, 1163 bp, Homo sapiens
gagcaccgatgtccctttgataacctgcactcaccaagatgaactatttgccgccctgtcttttcctgggttggggggtggcatctgatggtggcagagtgcctgttggttcgcccgtgggtctcatggttcagacagagggaggtggacggcagggatcagggagccaggagcgcgcctcagacttgcagcaaccattgtgatttgggttgttcggaatatttaaattactgatcagaagatgaaagtagcttttctcttgggaagtcttgcagcccgtgggagtgataccaggagcaacacagagctcagcagcggcgccaaggtgttccctgtttcctcagcacgtgagccttcaccgcctgcttcattcaggagccagtgcagcagtaatacagtctatacattgttctgttttcaaatttatcctgaggctttgttgagcataaatgattatacgataaaggtatccgttattttggaactcatttcagttgggatctcctgtatgcagagtgttgcatttagaggtttgagtcccatcttggtttcttgccgtgctgactgtagccttcaccttgacttgaatgaaggtctgtggttggaatgtgtgaggagccgctgaggtgttcaggaggtgctgcctggaggtcggtttcttcctgggtgttacgggcaactgctcacacagttgtttctctgtgaacatttccagtgtttaatccaaaatgaaaacccaccaatgcttttgctaacttcagtgccttttataaatcatttttaaatttcctgaacttgctttttgaggatatacagggatattaagtagacgcaggattgtttttgtttgtaaaaattctgaattgaaactttgttttaaaaaaaggcttctttctttcatatgacaagagataggtcaggaatattggaatcaagatttaaatgttaaaattcgattttgttacacagggtgtgttcatttgttttgtagcagacaagatctagatcccagacagaaacaacacatgctattctaaaaagccgcattttaaaaggcaccttggttctcaaaagaaatcagaatatggatattcgtagtgatgatctgttttctctaaaatcttaccatattgtctgtatatggttgtaaattcaaatggaaa

SEQ ID NO: 1592 - DNA, 1148 bp, Homo sapiens
cccagcactttgggaggtcgagacaggaggatcgcttgagcccaggaggtggagaccagcctgagcaatatggcgagacgctgtctgtgctaaaaatttaaaaaattagctgaacgtggtggcacacgccttgaggagggaggattacttgagcctgggaggtcaaggctgcagtgagcgaagattgcgccattgccctccagcctgggagagagagaccctgtctcaaaaataaataaataaacaagtacgtacatacatacataaaaaggtaattatgtaagtcctcgttacggagcctccatacatgaagggctttagagccgatttgttaaatggtcagctgtagtcagctgttgacacccagcgtccactctccattaagttattaagagctttttcttagttacagaagctctcagtgggctgtggagacgctgccgtctcctgaacacatccagcgaccacatgactaagcaaaggcagcggagagtggacggacggtgatggacgcggccacggagcccaagcgcccacaatgcgcattcctgtcttttctctccccgctcacctcagagcgggacggaaggtgggactgggagagctgttctcgggcaggtggacgctgtggattagcggagagggaaggcactttcgttctcggcaccgtgaggctgtcctggtcaatcctgttttcatgcttgagggtctctggtgcagcagctccaccagccttgacaccaggacttctgtggaatccaggtaagcagccagggtcctgatagggccatgccctcacccccatgtaatgcatccactcccagttaaatgagaaaggaacaatcacaggaaaacatggagaacaactccactgttcagaagccaaccctatattagctactgtttaggtagaaatgaaaaactttgagacgtaaactcctgcaggtagaagtagatttccggtgaatgaacaaaatgaagcttattagaatcaatggcctcttctgagagccgttctgaatttttttttttttgagacggagtcttgctatgtcgcccaggctggagtgcagtggcgcgatctcggctcactgcaagctccgccttccgggttcacgccattctcctgcctcagcctccccagtagc

SEQ ID NO: 1593 - DNA, 1329 bp, Homo sapiens
tatcatttgtacagggttaattttgaaataatacttgaaaatttcattataaatatatcctactttttatcttaagttgaagatgttatttactaaattgttcttgtaccattagaaaaaaaaatacggcaatttacgttcttatttattttggctgtactacccctttgttttaattttaaaatcaagaaatcgggccgggcgcggtggctcatgcctgtaatcccagcactttgggaggccgaggcgggtggatcacctgaggtcaagaggtccagaccatcctggccaacatggcaaaaccccgtctttactaaacatacaaaaattagccgggtgtcgtagtgcgcacctataatcccagctacttgggaggctgaggcaggagaatcacttgaacccaggaggcggagcttgcagtgagccgagatcgcgccactgccctccagcctgggcaacagagcgagactccgtctcaaaaataaataaatgattttaaaaaatctaaaatcgagaaatcacacattcagtggggagcgacttctccttgcttatgggaagtcctcaagtgagtgatgttcaccatgtatttttttttctcttaggacagactaattctgaaaataccgaaggaaaagtagctctatgttctcaccccggttttcctgcgtgtgtgcccttgggtgcgatgcctcccccagcgctctgtggtcgccggtgccagggccccctctggtttggcagggcctggctgcctttgctccctgcagtgagtcttttggtgttttcatgcacggcttgtgcttctggatctgaggcctctcgtgttcacgcggacacttccttccttaagaagacgcctaaaagaggaagttggaattttttttttttttttttgagacagagtctcgctctgtcgcccaggctggagtgcagtggcgtgatctctgctcactgcaagctccgccatctgggttcaagcgattctcctgcctcattctccccagtagctgggattacaggtgcccgccaccacaccagcctaatttttgtatttttagaggggtggagttccaccatgttggccaggctggtcttgaactcttgacctcaggtgatcctgagcctcagcctcccaaagtgctggaattataggcgtgaaccaccgcccccggctgcagttggatttttaaattgcttttttttattgttgaggtttttttatctccaagggactctcccggcacttctaccttccagagttacttcagtgcataaagtttgaattattttgttcttgtgggcagaagtgggaatgatggaatatcc

SEQ ID NO: 1594 - DNA, 1389 bp, Homo sapiens
ggggtggggtgattatatggaaccgaccgtgtgtgcctacgcgtgcagaccctcctggcccctcaggtaaaggaaccgacggtgtgtgcctgcgcgtgcagaccctcctggccccgcaggtaaagtgtctcgtctaccccctctgccatcactgtacctcacgtggcctccaccacagcacgtcatgtctgccattgcgtgtgtgcccattacatggcgagatccttgaagacagagactcattccccgtctgcctcccaccaccttgaacactcccaactcctaaagtgccaacacaggtttaatttgccgaattaaatcttcagttctgctgattctgctgagtacattcctctgctacaaagctaatggttccaaaacaaaatgattaagtatttgaatcctggagcatcaacactgccttttaaaatacagcaaagtctaaactagtccagctgaaacatctgtgagcttcagttccaatgagggagtccagggagttagaaactggaagagcaccttttttcagtggccgggaagatggcggacattcagactgagcgtgcctaccaaaagcagccgaccatctttcaaaacaagaagagggtcctgctgggagaaactggcaaggagaagctcctgcggtactacaagaacattggtctgggcttcaagacacccaaagaggctactgagggcacctacattgacaagaaatgccccttcactggtgatgtctccattcgagggcggatcctctctggcgtggtgaccaagatgaagacgcagaggaccactgtcatccgccgagactacctgcactacatccgcaagtacaaccacttcgagaagcaccacaagaacatgtctgtacacctgttcccctgcttcagggacgtccagatcggtgacatcgtcacagtgggcgagtgccggccttgccggcctctgagcaagacagtgcacctcaacgtgctccaggtcaccaaggctgccagcaccaagaagcagttccagaagttctgaggctggacatcagcccgctccccacaatgaaataaagttattttctcattctccaaaaaaaaaaaaaaaaaagaaactggaagagcagcatcacggccacggcccagacaggcaccaccacctgaacagaaggaaggatgggatgaccagcaggactggactcagccattacaggtggaacatgcagaggagaactgctgcagaggagaactgctgcagaggcccacagtgacgacgcctgggccttacactgaccaagaaggaacacagccaaagacgctcaggttccaccgagagggcacgccaacatggtgacagccaaccgcaccgagctgagtccagtgcaatcacagattctgctca

SEQ ID NO: 1595 - DNA, 1200 bp, Homo sapiens
attgtcatcaacaggttggttgttttctaatcttatctcaagtccagatctctctcttgagctcctcttggcccaaatatccgtttgggcattctgttatttccttttttcttttttcaattatggtaaataaaaaaaaagacataaaatttagcattttaaccactgcgcccggcctagctttaccatttttaagtatacagttcagcagtgctaagtatatgcacattgttgtataatagatccctagaacttttcatcttgaaaaaagaaactttattcctattaaatatcaactgccaaccgatgccgtggctcatgactgtaatcgcagcactttgggaggtcgaggcaggcggatcacttgaggccaggagttcaagaccagcctggctaacgtggtgaaaccctgtctctaccaaaaatataaaaattagctgggcatggtggcacgtcctgtaatcccagctactcggaggctgaggcaagagaatcgcttgaaccccggaggcagaggtctcagtgagccaagatcgcaccactgcactccagcctgggcgacagagcaagactgtctcaaaaaaaaaaaaaaaaaaaaaaaatctactgcccatctcttcctttctctcagccctggaaaccaccattctactttccatttcaatgggtttgactgcgttagatacttcatatgagtggggtcatgcagtatttgtattttgtggctgcattatttcactcagtgtagtgtcctagatgtccatccatgtgtaccaaatgtcagaatttcctatcttttcaaggctgtattatataacattgtatgtctgtttcacattctgtttatttgttcatttgtggacagacatttcatttgcttctacctcttggctattgtgaataatgctactatcaacgtgggtgtgtaaatatctctttgagatcctgctttgaattcttttgggtgttttgtttttggtttgttgttgttgttgttgttttgagacggagttgtcacccaggctggagtgcagaggcgtgatctcggcttactgcaacctccgcctcccgggttctagtgattctcctgcctcagcctcccaagtagctgggattaaaggcacgcaccaccacacctggctaatttttgtatttttagtagagatggggtttcgcaatgttggctaggctggtctcgaa

SEQ ID NO: 1596 - DNA, 1168 bp, Homo sapiens
tgttcataggttatatgcaaatagtacaccgttttgtatcagggacttgagcatctttgaagtttggtgtctgcaggacattctgaaactaattgcccgtggacatcaagggagattatacaagtgaaacaaaatttggcaatagctattgtctttgtctgttttctgttgcttataacagaatacctgaaaatgggtaatctataaacaaataaaatttatttcttacagttctagaggctggatccaaggttaagggaggggcatctagtgagggccttcttgctggtggggactctctccagagtctcaaggcagtgcaaggcatcacctggcaggaggcaacacgtgccagctgaggtttctcttccccccttacaaagccactagtcccactcccatggtaagccattaactcattaatccattaatccagaatggattaatccatttatgagggacacgccctcataattcaatcacctcttaaaggccctgcttcatgtgaaatgagtttgggaaagaaaaaacattcaaacagtaacatctatcgaaatttaaatcactactttctttcactcataaattctactaataagaatttcacttctagaaatttatcttacagaaatatagacacacacacatgcactatatatatcacagtttatacgtagcaccatatattatatatgtagcagttgtaaaacaatatgcaatagagcccattttaaagattatgttcacatggggtcaggcacagtggctcacgcctgtaatctcagcactttgagaggccgagacaggtgggtcacttgaggtcaggagtttcagaccagcctgggcaacatggcaaaacctcatctctacaaaaatacaaaaattagccaggcgtagtggcctgtgcctgtagtcccagctacccaggagactgaggtgggaggatcacttgagcccaggagttcaaggttgtactgagctatgaccataccactgcactccagcccgaatgaccaaaaaaaaaaaaaaaaagattatgtgtgtgttggtgcttctatgtgtataggctaaaaatttgtgatgtcatattacaaattggttatctttgatgaatgggaactttatttctaaaatatatatggtgtatatatgtatatagtattttagt

SEQ ID NO: 1597 - DNA, 1225 bp, Homo sapiens
tctgttgcccaggctggagtgcaatggcacaatctcagctcactgcaacctccgcctcctgggttcgagcgattcccctgcctcagcctcctgagtagctgggactacaggcgcctgccaccatgcccggctaattttttgtatttttagtagacataaggtttcaccgtgttggccaggctggtcttgaactcctgacctcaggtgatccacccaccttggcctcccaaattgctgggattacaggcatgagccaccgcacccggcccactttcaccagttctgttcatcattgaactggaagattctatctttggcagtttgcaaaacaaataaacttaaaactggagttaaagacatccagattagaaaggaacagtttaaaccatcttttttcagatgacatgatcttgtacatagaaaatcctaaggaatcaactttaaaactgttagaataaatgaggttgtagagtaaaaaaaaatcaatatacaaaaatcaatagtgtagtgcagaaatatattaatatcttctcagccgtgtggctgagatgaagtgtagtatttgtatatctgatgcttccgctatccaaggacaatctgttaaatggatttttggagcagggagattgaataggaccttgctccatctgctgtatgcattgacctggtagtgcagtaactccaggaactgtgcaccccctcaggaagaaaagaagaaatacactatacactacccatgaattatcccaaaaatgaaattaacatttataattgcataaaaattattaggaataaatttaatgaaagaaatgcaaaacctaaactctgaaaaccataaaacatgggaagaatataaagatactaaataaattatgtcgtatttttatggataggcacttaatgttattaaaatggcagtgctccccaaattaatgtacagattcagtgccacccttgtcaaaattccagcaacatttttacagaaagtgacaaattgatcctaaaactcatatggaaatggaagggaaccagaatggcccaaacagtgttgaaaaagaaaagcaaagttgggactcaaactagaaagcaacattgatgaagacactgtgaagacagaggcataaatgaatggaatggaattgagagacaaggaaaaaactcttacgtttatagccagtggaggtgccaggaaaatttaagagaagaaaggagagtcttttcaaca

SEQ ID NO: 1598 - DNA, 1204 bp, Homo sapiens
ctctgtaggttcaaagaaaacaaagcgcttttccgcgctacctacagaggggtccatagggcgttgttctggattccggtcgtaacttaaagggaaactttcacaatgtccggagcccttgatgtcctgcaaatgaaggaggaggatgtccttaagttccttgcagcaggaacccacttaggtggcaccaatcttgacttccagatggaacagtacatctataaaaggaaaagtgatggcatctatatcataaatctgaagaagacctgggagaagcttctgctggcagctcgtgctattgttgccattgaaaaccctgctgatgtcagtgttatatcctccaggaatactggccagagggctgtgctgaagtttgctgcggccactggagccactccaattgctggccgcttcactcctggaaccttcactaaccagatccaggcagccttccgggagccacggcttcttgtggttactgaccccagggctgacccaccagcctctcacggaggcgtcttatgttaacctacctaccattgctctgtgtaacagattctcctctgcgctatgtggacattgccatcccatgcaacaacaagggagctcgctcagtgggtttgatgtggtggatgctggctcgggaagttctgcgcatgcgtggcaccatttctcgtgaacacccatgggaggtcatgactgatctctacttctacagagatcctgaagagattgaaaaagaagagcaggctgctgctgaaaaggcggtgaccaaggaggaatttcagggtgaatggactgctccagctcctgagttcactgctactcagcctgaggttgcagactggtctgaaggtgtgcaggtgccctctgtgcctattcagcagttccctactgaagactggagcgctcagcctgccacggaagactggtctgcagctcccactgttcaggccactgaatgggtaggagcaaccactgactggtcttaagctgttcttgcataggctcttaagcagcatggaaaaatggttgatggaaaataaacatcagtttctaaaaaaaaaaaagaaaacaaagcaaatgaaagaaataagggaggccgtgcgcagtggctcacacctgtaatcccagcactttgggaggctgaggcaggtggattatctgaggtcaggagcttgagaccagcctgacaaacatggag

SEQ ID NO: 1599 - DNA, 1187 bp, Homo sapiens
cattttgccacgttctaaataatatttagctcaactgattcatacgtattaatgaccattctagcaaaggcctacaagtggtgtgggaatcagggaaaggctgcctctttggtatctcaactggtattgattattgctatcaactatttggggagaaaaaatcaaaatgaagccctgtcaaattttagaagtactatctttggtccttcaaacactttgtgatgacaccttaagaaaaataaagttgaagttcaggtcttgccattgccattacagacaaattaggagacttggtttacctgggaacaaatttacttgaatattcagtacctgaaactatgccaaaccaaagagcagctgcagtacattcgttattttaaatgaacaagtttacaaagtttattttcatctatacgtaaggatgatttttttaaaactttttacatattagtggttatgatccaatgtgtcatgagtgaatttaactgtaaggtggtttaaatcaaatatgcaatgtttacttgaattgtatttctattagcagattttgactatgtttacaggacggtttaaattaaggattatcaggcatgtgagatctttcagttatctttaaagtagatgtatattaagggcttagatttaggatctacatattctgggcattgaataggcagtaacttacaaataagttttgcttaccttttgttctagggactagcactgctatcaatggaaagtatttttaactaatctgttattaagaaagtcatatttttgcatttcagccaaaataaagaccgcctgtaataatctgttagaaacagataatacatgtctgaaatccatatgtttcatatgatctaaactgtattttccaatttaaattaaaaatgtaatatagattcagaaaggttcatatttttctaatgacttcattctatattattttgttaggttgcataaagaagcaaggaattgtacttgtattaaaagatgaagaaagctattaggtatatttgtacatgactgcaaatgagtctatgcccgtttaaaagaaaagatggacactattttaaagtgagctttaatatgcttttatataaacaaatttgaagtacagtttagtttggttgtgtttacctaacaagtaccataagccttgtgtttgttcttatttgtataat

SEQ ID NO: 1600 - DNA, 1176 bp, Homo sapiens
agtgatttaaaatgcaatttaaactaggcaaaaaaaactttagagtaagttttcctcctggctgtcagttggaaattctaacctgagtggtcattttacattcccagtctcttgagaagtggattctactcttagacgcacagtctgaagtctgacttcctaacggcaacccctttatgactagacacatttctcctttttccttttaaaatctaagcgacaggaggtgttgcattaactccaaggaaaagtacagaataaacaatgtagaaatgtcactcctcatttacaccttttagacagacagacacacacacacacacaccccccccaaaataattgattgcttccagtgagtgggtggagatgaatctcagcagcatctgtgagtactacaggttggagcttcctgtctgtaaaatgggactgcaggggagggggtgttgtgaataagttggactggatgacttctaacattctgtgatgcctaattttgcaaaatcacttttcattcacccaataaatttttttcttcttttttccacagagttttgctctgtctcccaggcaggagtgcagtggcgggatcttggctcgctgcaacctctgccttccaggttcaatagagtctcctgcctcagcctcccaagtagctgggattacaggctcatgccaccatgcccggctaattttcacatttttagaagagacgaggtttcaccatgttgaccaggctgatcactaactcctgacctcaaataatccacccacctcagcttcccaaagtgctgggattacaggcgtgagccaccacgccccgccccggtaaattttttggagtaccttctgtatgctaaataataaactaggaatagctctgtcatttcctagtacagcataaattttatggttgctactgtaggtttataatttgtttataatttggcctaatttccatcagccatactaatattggattttaaaaggaggcaactttttttctttttgaaccaaaggaatgagttagctttgaaaacataatttgggatattatagtatggattcttctacctttgtttcaactccttagtaatcttgattctagcaaactagaatgagatttaagagataccaattattgctgggtgtggtggctcatgcctgtaatcccagcac

SEQ ID NO: 1601 - DNA, 1151 bp, Homo sapiens
attcaaaatggccaaaactttttcttgttagcctgtattgaacaggggaatgaaatttaggtcactttttctgaacaatacagggaatgagttactcagatgtattcatcatttatggtgatggtaacttatttactttcagttgacagttccttggatgtaatgttcatagtaatagattctgttttaaataattttaagtcatttaaaatgagcttttggagaacttgaaatatagtgcgtgaagaaagtgttttagcttaaatcttcagcaatttaatacaatcaaatctcctcttaaatctcatcttataaaccagactgataatccttaaatataggaacagaatatttcttcatatctagtaatgtttcctcatgcaagtaaagtttatatatttgatgtttcagtacattttaatttaattgtttattggattcggcctcctgacccaattattgtgttttaatgtaatgctttttgctgttttcacctggattcaatgaactgttatttgtttttatttaccaggaaagaccgttgtttaccttgtggctttccatctgttctttgttatgtttgtatggtcctattggatgacaattttcacatctcccgcttccccctccaaagaggtaaatttaatgttggtaaattaccaaatgttttaactgattatggaattttttttcccttgtgttacctttgttaaaactttacataatgcatgtgttctgtttccattcataaaactgcttggttgctctgtactgtgaatgtgagtcatcagcctattctcagatacagtccactgacacagcatagtaaaagttcagcggtatagaaatgcttactatttttctgccatgctatgtgtctttaaagacatactttatattactggaataaaaagtctcaaggaacagaattgcgttaggaaagtagagtttatttttagaaactctcaacatttatattttctcaggcatgaacagatatgctgcaattaaagaaagttttgtgatggaaacaaattgtctaggctattgcttgctgcactttaatatgactagtgtttcttctaattggaggttccatttggaaaataatataggtaaacatttatgtggagtaggttttatgaccagtg

SEQ ID NO: 1602 - DNA, 1175 bp, Homo sapiens
ttcagtcagacaaatactcatttcagagattctatacttcatggaatcaagaagcaacgagccataaatctgaaagacagcaacagaacaaagaaaaatgccccccttcagccggacagacttactctcaaaggttctttgttcctcccactttcaagtcggttggcaatccagtggaagcacgcagatggctaagacaagccagagcaaacttctcagctgccaggaatgaccttcataaaaatgccaatgagtgggtgtgctttaaatgttacctttctaccaagttagctttgattgcagctgactatgctgtgaggggaaagtctgataaagatgtaaaaccaactgcacttgctcagaaaatagaggaatatagtcagcaacttgaaggactgacaaatgatgttcacacattggaagcttatggtgtagacagtttaaaaacaagataccctgatttgcttccctttcctcagatcccaaatgacaggttcacttctgaggttgctatgagggtgatggaatgtactgcctgtatcataataaaacttgaaaattttatgcaacaaaaagtgtgaagatatttaacgaaaaaaaaggtagatcttgaatgtgttgtagcacgaataaattgctgtacttcattaagcttcattgccaattagctaggaattgttaagcacattgcagattgttcttggagaattctggagttgttatgaacatgaataccaacggaaaaccttaactgaatctaaaagaaaactattttgaagatggtggtgagctgcaaaatagctggatggatttgaatgattgggatgatacatcattgaactgcactttatataaccaaagcttagcagtttgttagataagagtctatgtatgtctctggttaggatgaagttaattttatgtttttaacatggtatttttgaaggagctaatgaaacactggacatataattggtttaaacataaggggaattaagtctttgtagtctgtcatttttttaagtggatcctcttggatgcgttattttctcatcagctggctctgatcatgaatttgttgtaattttatgttgtactcagtgcatttaagaaatggtagagtattttaatcctattacttgactaagagtgtgaaggtagtactttttagagtg

SEQ ID NO: 1603 - DNA, 1128 bp, Homo sapiens
cggagttttgttcttgttgcccaggctggagtaaagtggcgtgatcttggctgtctgcagcctctgcctcctgggttcaagggattctcctgccttagcctcctgaatagctcggattataggcttctgccaccatgcccagctaatttttgtatttttagtagagacggggtttcaccatgttggccaggctggtctcgaattcctgacctcaggtaatcttcccacctcggcctcccaaagtgcttggattacaggcgtgagccaccatgtctggccaggatgtttgttcctttcttatcttacttttagaaccaagaacacatcgttttgatcagagtagatacaggccattttaaaattgatcttggtaatagaggcagagagtgaaccaatgagactgagttgattacagcaaaggcagaatactgcttctctcctaattccaggatgaatatgatcagaattataccttgattaaaaacattaaatgataactagattcttcctgcccccgacttctcgttttctttactgaggagggctgtctgtatgctctgcctggttctgccactgagcagccagggtgtaaggaaagctccagatcccagaccccgggacagttgcactcctaggggtaattttcaccatgtttcctcttcccaggagttgcactgacgttgtagggtgagagacagcagttctgacagtcaaaaaaccttggagggtgggggctcacgcctgtaatcccagcactttgggaggctgaggcaggtggatcacctgaggtcaggagttcaagaccagactgaccaatatggtgaaaccccacctgtactaaaaatacaaaaattagctgggtgtggtggtgtgcgattgtggtcccagctacttgggaggctgagacagaagaattgcttgaacccgggaggcggaggtgcaatgagctgagatagcatcactgcactccagcctgggcaacaagagtgaaacattgtctcaaaaaaaaaaaaaaaaaagtaccttggagagtggggatctgaggggaattttattttcatgcaaaacacttacttatttgcattttttaagagaagggctatgattttggaatttaacaaatgcttc

SEQ ID NO: 1604 - DNA, 1178 bp, Homo sapiens
aaaagtgtcgagagtccagatattaggactcattcccatttggttctagggcactacaggattgccggggttgtctacaccattcttttccaaatgctgttattagttcttgacttagttgctgctgccagagccatagtcataaggaagatttagggaaatgggccttgcagatttacaaactgtttactagcttcccagatacagccactaggaaacagattaatcccattaaactcagcgatgtgtagagtagcatgtcagtctgttaatttatggaaggagctgtgtctagcaaagtaactactgttagtcatctgcacagtcatctgcacaccttgacctggtaggtaggcttatttgggaaaccagataataggtaagaatttagtttggtgactatagaaacagaaaaataaaaaacaaaatgtgttgccaaaagctaattcagtaaaagtgaatatgactttaaactgttatctgtagatatttgtatatagcttatggatacaattattctgcagatatttgtgaaatgcccaatctcctcatgaagtccctgctttggtgaatggtgccaccattcaccctgctgctctggtcaggacctatacttaatccagaccagtggttctcaaagtgtggttcctggaccagaagcagtagcatcacatgggagcctgttagaaatgcaaattcttgagccccacctcagacccactgaatcaaaaactggggtgagctccacaatctgtgtttcaacaagcaccccaggcactgcacactcccctcccccataatcatttgttaggtcctgcagattctccctccctgtgaactcttgtgtcttctcctgtgcccattgccatagcctgggctatgatcccaatcattattctcacccagatggtaactgggattgcctaactggtttctagccttttgtttttgctccactcgaagccgtcttggattcagacagtttagccatgtatttagcccagtgttaggcatagaattggttgtcaacacttatttgaactatgaatgaataatgaatgaatgaattgccaccagagggatttgtctaaaaagcagatctgatcttgtcactctgttgtttaaaattattcagtagctcctggttattctccagtttcccttcctactaccctgct

SEQ ID NO: 1605 - DNA, 1179 bp, Homo sapiens
acaaaaaaatataaaattagctgggcatggtggcacacacctgtagttgcagctactcagtaggctaaggtgggatgatcccttgagcccaggagctctaggctgcagtgagccatattcataccactgcactccagcctgagtgacagaacctgtctctgtcctgcgccctgggagtctgtctctctctctcacacacacacaaatatatatacgtaaatgcttatttttcgctcactttctcttgccagggaaactccagaatagacacaattgtcgtgggttttaagggacatgaaggagaaagttacccaagtccaacatctactgaggagcaatctgtcagccccacaggtcagagcagagtgtggcagtcataagtccaagatctgcttgtgagtccctccatttcccattaagttaatgctgtgaaaaactgtttcattggccttaggctgtaccccacctccagctacccctcccccagactcaatcatgggtcacagccgcaaaggctccccatggctcctgcccccatgacttcatcctggagaggaagtccctgtagcaagtgagggcagagaagtgagtggaattccagcaggatcttgcaacagactgggagtggaggaagatgctttctcatcacttctagaatgcatcagaaaggaagatgcaagactctcgcctgtttgatacagggctcctggctcccctgctctattcgtacctccccaagaaccacagggcccaagccaggagcagagccaaaggcagctgctctcagctgcagggaaaagcataggcaatagggaacatttgaaatccacattccagagtgggcccccttttgccttccattcgtcttttccttactcttccagttaattgaccagaagtttaatgagcacctattgtcaacaacagcactaggcttcctgtgtccttctgcctcctggttcctttttgctccttcaaagcgcaactttccttgggctgccctcctccttattcctcacctccaaaatgaactcttgcctccttcctgctcctgagcaacaaaaacgtccatcccttgaatcttgacaatctcacctaagtcaaggaagaattccttggctagtaattctcactaggtgaactgagaactctgcttaattctccctcgctccttaaacc

SEQ ID NO: 1606 - DNA, 2328 bp, Homo sapiens
ttttcttttggtatttcctaattatttttttttccatttcaaataagaagaaaagatagtgttgaatgatacctagatattttcattccagcggtttttttcctagtctcacctacacaggttccagtgagctcaggagtttaccttcatgtccgtggcacagcccataattacccttctctgtccagggatgtatatttgcatctttccttcaacttatgaagtgaatggaggggaaatgtacagttttaattgagtttgaagtagctttcatctgaccagccctgtgctggagcgtgcctcttcttctgtgagcagaggggctactgcgtgggaaatggctaaaccgcctgctttgtctttcactgcagcccgtggccacccaggagcccgatgtgcaaggcaggtgtgagtgccaggacggcattcctggagatgaaggcctggagctgcggtctgcggactcggcagtgcccgtggccatgacccaggctgccgtgcggccctgggcaccctgcctggagaacatgaccactgccccaaacggcctcgggccaggccccgcagccccctgtgcaggctcggacctgaaagacgccaagatggtgacctcccttgcgtgtggaaatggagtctgtggctgcagccctggtggcgacacggacacccaggaagccaaactcagcccagccaagcttgtgcgcctcttttccaccagtcggaagaggacgggtgcccaccccgagcggccccactccatggtcctggtggggaactcctccacatggaacaccctcgcctccttccggaaaatgggatcctttaagaaactgaagtcctcagtcctgaaaggaattcagagccgagaggggtcaaatgcctgttcaaagggagaggcttcggagcatggcctgggaaagtccatcccaaatggcgctgtcccaggagcccaggcaagcaggggctcccccttagcaccgggaccagcatgtggtgccctcaggccagcagagtggggcacattggatggctccgacctcgaggacacggacgatgccttccagcggagcacacaccgctcccgcagcctccgcagagcctacggcctgggccgcatctgcctgctggatgcgccccagaaccatgcgacacccacgatagccactggccaggtgcccgccgtgtgtgagattctcgtgagggaccctgaaaacaacagcatgggctacaggaggagcaagagcacggacaatcttgcctttctgaagaagagctcctttaagcggaagtccacctccaatcttgcagacctcaggacggcccatgacgcacgggtaccacagaggaccctgagcagttcctccactgactcccaaaagcttgggtcaggaaggaccaaacgctggaggagcccgataagggccaaggactttgacagagtcttcaaacttgtgagcaatgtgactgaggctgcctggaggagggagagtcctaggagtggggccccatcccctggagaggccagcctgagacttcaggcacacagccggctgcatgacgactactcccgccgcgtctccaggagcactgagcaggacagcaggcggggcggggcggtcatgcatgggaccactgcaacctgcaccgtggcccccggtttcggctcagccacctctaaggggccccacctagacgctgacactgccgtatttcctcttgaaaccaaaagttcctgggcggtggaaagcgacagttcctgcacttgcagctctttgccaagcccgattgtccaggatgtgttgagcaaagactcctgtgacccaaacgctggcagccagttgacatttgaccctgagcagcctcccacccctctaaggcccaccacacccaagccccagagccctcagagcccccagagccccggggcaggaagtgccagctgtcacagcaatcacagtgccctgtccgcgaattcagaggaaagtgaaggaagggcagaagagcctgctcagagagagccagggcctgtgtccttgcaggatcccctggaagccacacatggtgatgagggcagcaaggaccttctggtgaacattggtgtggcagccggcccagaagaaaaggagaaggaggaggtaagggcagcggcgaggtccctcatgtgggcgaccctcctgcgggaagggagcttgcacaggtgttgcccttggtccctaacctgtcaaggtcagtggccctctgctgaccttgttgcccttacagtattagtgggaatgggagttgtcaagttgctgtttaccaagttcagaagtaatctctatctccttt

SEQ ID NO: 1607 - DNA, 1160 bp, Homo sapiens
ataggtgcccaccaccatggctggctaattaatttttagttctactagcaattcttagagtgttttttgttctctacctgataggtaagaggtttaaaattgattttaaacttaattgaatttcttttaaacaatctgagttatagttacaaatttagtatggctgtttttagtgaacaagacatatacttgaaccagtagttataacaaattctgctatcagaaaacttcactaaattaaaaaccatagcctaaaatacatgatgggtttgtcatttcatttttctttctggatctcctaggattagagataaccttgctgtgttatgaaaatcttaccagatccaaagggaaaaaataaataacctccttagaccacacaaggttgtgagattgattgctttttttccttctctttctcatagctctgatcctgactacttcttccaaggattcaaaccagagcaaacacacttctttttgttgttgtactttgttagatgaataacgtgggttttcttttcttgcaacttgatgcctttccctcacaagatgtgtcctctgattctcaggctctgcagtccaggctgctagctcttatccctgtgtggctatttccatttaaattaattagaggtaaattgaaaattcagtttctcattcccattagctacatttccaggacttagtagtagccacctgtggctggctggtggctgccacactgcaccatgcaggactgggcacatcctcactgctggcagctctgggctgtgcccattcaaggggcttgttgggtggcaaggggctgggctggtgagttgccgtccctcttcaggaactcattcttgaactctcgcctttgttcgtttatatgacttctggtgttgattgaagtttggaccctgttcgtacttggttatcatgtgtaaccctgggtattcattatttcttgctggttttggtgcagttccttttcttccttacaccatttggcttattcatagttccccgtatttacctttctttttacttctgtgcaaaaatatactttaaaaacagatatatacttaatagaaaacaaacctatgtttattgatactctattaaatcatcaaaaaattaaggagagggcatatttaaccttcctttacattaca

SEQ ID NO: 1608 - DNA, 1264 bp, Homo sapiens
agcggctcctccaactacgcgtatgtgaacttccagcatacgaaggacgcggagcatgctctggacaccatgaattttgatgttataaagggcaagccagtacgcatcatgtggtctcagcgtgatccatcacttcgaaaaagtggagtgggcaacatattcgttaaaaatctggataagtccattaataataaagcactgtatgatacagtttctgcttttggtaacatcctttcgtgtaacgtggtttgtgatgaaaatggttccaagggttatggatttgtacactttgagacacacgaagcagctgaaagagctattaaaaaaatgaacggaatgctcctaaatggtcgcaaagtatttgttggacaatttaagtctcgtaaagaacgagaagctgaacttggagctagggcaaaagagttccccaatgtttacatcaagaattttggagaagacatggatgatgagcgccttaaggatctctttggcaagttcgggcccgccttaagtgtgaaagtaatgaccgatgaaagtggaaaatccaaaggatttggatttgtaagctttgaaaggcatgaagatgcacagaaagctgtagatgagatgaatggaaaggagctcaatggaaaacaaatttacgttggtcgagctcagaaaaaagtggaacggcagacggaacttaagcgcacatttgaacagatgaagcaagataggatcaccagataccaggttgttaatctttatgtgaaaaatcttgatgatggtattgatgatgaacgtctccggaaagcgttttctccatttggtacaatcactagtgcaaaggttatgatggaaggtggtcgcagcaaagggtttggttttgtatgtttctcctccccagaagaagccactaaagcagttacagaaatgaacggtagaattgtggccacaaagccattgtatgtagctttagctcagcgcaaagaagagcgccaggcttacctcactaacgagtatatgcagagaatggcaagtgtacgagctgtgcccaaccagcgagcacctccttcaggttacttcatgacagctgtcccacagactcagaaccatgctgcatactatcctcctagccaaattgctcgactaagaccaagtcctcgctggactgctcagggtgccagacctcatccattccaaaataagcccagtgctatccgcccaggtgctcctagagtaccatttagtactatgagaccagcttcttcacaggttccacgag

SEQ ID NO: 1609 - DNA, 1148 bp, Homo sapiens
ttagcatcatgaacggtgggacagcccattgtttttgcctttcatggggtgcagtaagaaaaaaaaaaatcaccggtatagttgtcccaccaaaaatatttaatttaaacctaatcatgatggaataatcagacagatctagaatttgtgctgttttaaatgaccactggcctagtctcttcaagaaagtatcatgaaaagctttgtggtagtggcgtagggattcaattaaaaaaagactaaggagacttaccaaccaaattcagtggattaataaaaattaagttcagtaaatttggatttaataaaaactcatacaaaagacatttttggaacaatttgtaacatttgagtatgaattataaaacagatgagtttatgaaaatgttattttgggggtgttatataaatgatattttgattatataggaaaatgtccttattctcagaagaggtatttcagaatgaagtggcatgatgtctagaaattacttttgttttcttctgacatcaccacattgatcgtatgctaaaaattactttcaagtggttcagaagaaaattgtgtgtgtgtgtgtgtgtgtatgtgtgtgtaaagatacggtaaaatgttaacaatatagatgaaggatatatagatgtttattatacatccttcaatttcttattaggtttaaacattttaaaatattacatttttcaaaacatgatttttaatgactacattgtaattccacatggctgtgtatgacaatttgttaaataattacgtgtaaaattttcagcgagaatacttaggggctattttataaatggtggctaagaaacttaaataaactttcaaatattcatttaaacctatactgtaactgaaatagcacgaaaagtaaccttgtgtgactttataaccttattaaacattttgcccatttgcctctggagtcaagatcttaatctcattcagaagactgagtggacaaggatttggtatgcatagatggaggcactggcaaccggagaggtcccagggctgcataacactaagtagctcatagtgactcaacattggaacttggtataacttgtctatgattaaagccattccagtgataccacagtgatatagtggtaccacaaagtagttttag

SEQ ID NO: 1610 - DNA, 1205 bp, Homo sapiens
gggccctcacctaataagatggtgtccatctatgtacgttacttggaggtggatctttccactttagtctactgtttcaaatgccagtctcttctggaaacaccttcaccgaaatacccagaaataatgctttgccagctatctgggtattctttagtcaagttgacaccttaaatcaaccgtcacagtctatatcaaattttcatatggtcattaatgttttccttgttttaaaatatgtgatatccaaaatttcattttaatagttaccttaatgattttatcatagtagtagttaacttggaactagcaggcacacagtgtgtattgtagtcctgttttactaaatggcatataatgttgagtgagatatactataacttttcattgtagtttttttttttttttaattttcaagttcaattacaagattgtatagaaatttggagtatttctcacgcctgtaatcccagcactttgggaggctgaggtgagtggatcacgaggtcaagagatcgagaccatcctggctaacacggtgaaaccccatctctgctaaaaaaaaaaaaatggaaaaattagccaggtgcggtgacaggagcctgtagtcccagctacttgggaggctgaggcaggagaatggcgtgaacctgggaggtggagctggcagtgagccgagatcgcaccactgcactccagcctgggtgacagagcaagactccatctcaaaaaaaaaaaaaagaaatttggagtatttcaactattgcagccatcgtcggttggccactcctgctcttaactaattcaaaatagtgatttttaatgtcatagtaaaactttctagaaaatctctagatttggggagtgtttcagtagaggtatgctactcacttcaaagcttattttggaaaaaataagcttttttttgtttgtttgtttttggtagagatgaggtcttgctgtgttgcccaggctggtctcaaactcttgggctcttgggctcaagcagttcttctgccttggcctcccaaagtgctgggattacaggcacaaacaaccttgcccagcctgatttattattactttttaaatctgatagtgttgctgtcctgcagtttattttaattatactgggtaatttggaatcactaagtgggacttcatgtgtccttggtgaaggatatgttggtttcctagcaactgtt

SEQ ID NO: 1611 - DNA, 1189 bp, Homo sapiens
ttctccctgtctctactcctaagtgccaaggacaagtcaagcaagttatcttgctgtttcttgtggtatgggattattactggttcccttatgcattgaagagaaaccctttagagatctcggcttcatgctcatctctcctgttgtcctccctgtcttgagtggaccctaagttttagcatctgtttcctgcataccgttccattcagctgttagaagagaatttaaaggtcactagggtcaggaaataccagcagtgggaagtctttggtgtttgcttatctctcgtagttcccccatcacttttgttttttgatttctgcagattattttatcactagctcagttaattattattttttaaatttcacccatcttttggttgttttcatcagaagggcctgagtatctcattacttcttcatgatgaattctatagtaagggtactaagtctaatcttttgcctaagttacaaaaatggggacagaagtcagaaaaaaatgtcttcttccatttgtgtatgtcatgtgctcagacaaaaataaattaattctgatacctatgaaggctccagagcagaacttttttttttttttttagatggagttttgctcttgttgcctaggctggagtgcagtggcgcaatcttgactcactgcagcctcagcctcctgaatagctggaattacaggcgcccacgaccacccctgactaattttttgtatttttaatagagatggggtttcaccatgttggccaggctggtctcgaactcctgatcttaggagatccacctgcctcatcgtctcaaagtgttgggattacaggcgtgagctactgtgcctggcctggagcagaacttaactcaccatcacgccttctctttatcccagtaaagaatcactgatttcataaaagctattgttagttttgatagggtcgtacttctcaaatgtgggaatggagctattattattgaatgtttactttttctaggctcactttaaatttttgggtgattatgtgaccattatgtgatgtaatagaatttgtcagccttcaacaaaatccttcaggaatgtcttaaagatggtaacaatcatacagtaaaattttgactttccagttggtttttcaccagttatatctaactttggtgttgaaaacactgttaaatttaaaaacaac

SEQ ID NO: 1612 - DNA, 2396 bp, Homo sapiens
tgcagttctcacttcgctactgaaatgtgaacatttgaaattacaggggtttggggcaaatgccagttttcagtcgtatttgactgttctgctttctggtttcagtaattcgccaaaatgacgaacacaaagggaaagaggagaggcacccgatatatgttctctaggccttttagaaaacatggtaagtaggtttaccttccttgagagaagcatggcacacatttgtgttctgttgtgttcaacatgtgttgtagttcatagaatgtgtatcaatagaattaaataactagcgtctacccagcttatttcgtgataaggtaaataaattaccaaaattatatggtgattttgtgactaagtattgatgcaagattaaactttggagagaggttgtgatttagtaggctgattgtgctgtcaggagaaattgtccattgggaagataataagcatgtaaccatcaaaaatgatatatgtgttaaaagctagtaaaattgcatttcttttactctagatttttagccttaatactcactataccaaatttatttttgtaggagttgttcctttggccacatatatgcgaatctataagaaaggtgatattgtagacatcaaggtaaacataaaattgggaaaataacactacagaagatagaaaagttggatttaatctagtgtaggaattcaaatactagtgtatgttgcatctgtaagagtatagaatggatttttttttttttttttttggagacggagtttcactcttgttgctcaggctggagtgcaatggcatgatctcacctcaacctccgcctccctcccggattcaagcagttctcctgcctcagcctcccaaatagctgggattacaggcgtgcaccatgatacctggctaattttgtatttttagtagagaagtggtttctccatgttggtcaggctggtcttgaacacctcgggtgatctgctggactcagcctcccaatgtgctgggattacaggcatgcaccatgattcctggctaattttgtatttttagtagagaaggggtttctccatgttggtcaggctggtcttgaacacctcgggtgatccgccggactcagcctcccaatgtgctgggattattacaggtgtgaaccaccgtgcccggcctagaatggattttttaaagtgctattcttagcagaatttaaattttcctcattacccgcttggagttaacagctagtggaaattgggtggtagggtgggaaattatgagtttatcaagttggaaaggaacgccttagtgcaaagtttaattattgatgaagattactattactatgattaaaaaccctcctagtgaaagctgtgttcttctgtgacctggatttaaatgtatcttggcactcgagcttaatgatgactgttttttttgattgcttgaagcaatgtgaaaaacacatttcaccggctctgaaagctcttgagttgccatttgaaagaaatcttagaatactttgcagttacttaaagtcagaattttaaaggaaggggaaatgctggtatataacattggtttctttaatagggaatgggtactgttcaaaaaggaatgccccacaagtgttaccatggcaaaactggaagagtctacaatgttacccagcatgctgttggcattgttgtaaacaaacaagttaagtaagtagtgttgtagttctttgtggctaaccagtattccctcatatacccccttttcactttgccagttggacttatgtctttattggtcattcaagtggggcaaaggaaatatccttttaaaactcaggcaaactgggtgtttgtctgtatcctgtcagaggaaacaaattgaaatagatttactggaaagtcttacacagttagttactaagcggtttgtttgttttgtttcgagacggagtcttgctctgtcgccctggctggagtgcagtggtgggatctctgctctctgcaagctccacctcctgggttcacgccattctcctgcctcagcctctggggtagctaggactacaggcgcccaccaccatgcccagctaaattttttgtattcttagtagagacagggtttcactgtgtcagccaggatggtctcaatctcctgacctcgtgatctgcctgcctcggcctcccaaagtgctgggattacaggcatgagccaccgcgcctggcccagcagtttttatagaataaaaagagaagtttagtaaacttttaaattttattagcagtctggttttagattactagagtttaagagaccatcatctcatcaaagagagttaaaagtagggatgttctctgcaaggcctcttctgatatgattaattgattgtaaattaagtaatcaaggcata

SEQ ID NO: 1613 - DNA, 2396 bp, Homo sapiens; identical to SEQ ID NO: 1612

SEQ ID NO: 1614 - DNA, 2396 bp, Homo sapiens; identical to SEQ ID NO: 1612

SEQ ID NO: 1615 - DNA, 2396 bp, Homo sapiens; identical to SEQ ID NO: 1612

SEQ ID NO: 1616 - DNA, 1190 bp, Homo sapiens
tcctgcttatttgggtcttacactcttgtccaaagaggcactgtatatgtctgtttttccactaccgtatcattgctgttcacatgtaatgtgttgtttgttcacaacaagcgcctggttacacattacactgacgaatgtgctgatgctccagccatggctttgatgcttctgtcatttttaacctcttctattaatatttactgcctgtgccattcttttccttgttggccattcacaaggcttggataatcgtgtgacattttgagagccatcagatgttacgtttctcaaaaaaaaaaaaaaaagacttgattatattaactatttgaatctatgatctgtttccttgagggatttttgctaatctgtatttcaatttcccaggtcctagaatttatgatttttttttttttaagaggttagtagctaacagtgagaggcagcctcattgtttttagtttctagttgggtggaactcagccctagtgttgtatacttattaatcccattttagtgctttgcacatatccattgttattcagtgtttttctctgggtccttccagtttattttcttccttagctgtactcttttaaaaaaaaaaaacaaaaaaaaacttttttttttttttttgtgataaagttaaaatataatgtaccctactttttttgtgcagtatgacacttacaagatggccagactagaggaagccagaggtgggcatggtaacactactgaaaagttggtggtgtgccatggacaagggaccgactgcagagtatgtttgctgaggaaaatagaggcgaggatagagcaggcaggggaagggaaataagacatggagataggaggttaaagcagttgggagtccatacacagcctacccaacttcctgagaactcttagagaggaaaaggcatccttaggcatccttcctgtgaagtttgcctattccgtgatcacgctgagaagatgggaactctgaagtttgcttcacaggaaggtaaaatccttaaagggaggcaccttgctgtgccactgttcagttttactataacatcaatctttttttagtttttattcccacctcaagaggctgagttgaatactattaggcggggaatggaaaattatataggcacctaagtttcctttctagttatggtcagtgtttacactgagtattc

SEQ ID NO: 1617 - DNA, 1207 bp, Homo sapiens
ttttctttgactttacctggcacattattttgttttgtgtatacctggaagacattagtacgtgaaatctaatctatgtggttagctaactggccaaccaattcatcccatagtgcttctttcatgcctaccgtaggcacagctcttgtcagccaggatacagaggcaacaagacacactggtctccaggcttctggaatatgtcccggctgagaaccgacatacaagtaaatacatacaagaagcaacatagacacagatattttcaagaagaaaataactcctaatggggtttgagagactattgagaatggggcagaattattccttagacattttgtcctgcttaatgagcatttattaagtacttgttgtgttaagcatctggcatacacagactgagaaaaacatagtacctgtccttaacagcagcaataacaatagttaggaaatcaagttccaagtgggttgacccgtggacctggctaaattatcagggaaaatgtcctgcggtgatgatgacattaaagtgttaataacagccagacgcggctgtagtcccagctactcgggaggctaaggcaggtggatcactggagtccaggagttccgggctgtagtgcgctctgccgatcaggtgactgcaccaagttcggcatcaatctgatgtcctccaggaagaccggagccaccagattgcccagggagcggtgaactggcccaggttggaaagagaacaggtcaaaactccactgctgatcagtagtgggattgtgcctatgaatagccactgcactccagcttggacaacctaggcagaacctatctcaaataataacaatataataattacctgtaattccagcactttgcgaggccgaggcaggtggattacttgaggtcaggagttcgagaccagcctggccaacatggtgaaaccctgtttctactaaaacaaacaaacaaacaaacaaacaaaaccaaaaacataaacttagctggatgtggtggcaaatgcctgtaatcccagctactcaggaggctgagataggcaaatcgctggaacccagggggtggaggttgtagtgagctgagattgcaccactgtgctccagcctgggtgacagagctagacaccaaaaaaaaaaaaaaaaaaaaaaaagcctaacaacatgaaaaacaaatctggctctaatgcttagagtga

SEQ ID NO: 1618 - DNA, 1233 bp, Homo sapiens
cgcgtccggaaccccaccgagagccgccggtccaaccgccgatagctcgcggatgcccccgggggcccgacgccggccaggcttcccctagcgctcccgctacccataagccctcgcgtctcagcgcgcacgcgcagcggcgacggccgtctcaggaagaggaaaatggaataaacaactcggaggaaccagagcgcgagagagcgagtggaggcagaatttaaaaataaaccggcccctccgccttccccacccgcttgccgctgccgctccctcttcccctgcccgcgccctcgaagtccccgtctgggcccgcgcgctcaccccgtcgtcccgcgcggcccctttaagaaaagagaacgagagagtgagtgagagaatcccaactctccccctaccctccctccttctaccccctcctccctcccctctcccctcccccttctccccgggcggctccggctcccgcagcgggacagacccacccgcccaggcttttatccggcaccggcagcgtcttcctttcctcccccgtctatggtggtggcggcggcggctcctcgggcggcggcggaagacgaggctgcggcgttgccatgaacagtggcggcggcctcccgcccccctcggccgccgcctccccttcctcctcctcgctggcggcggcggtggcggtggtggccccgccgggggtcgggggtgtccccggcggggcggcggtaggagtgaagctgaagtactgccgctactacgctaaggataagacttgcttctacggggaggagtgtcagttcctgcatgaggaccctgccgccggggctgccccgggcctcggcctccatagcaacagcgtccccctggctctggctggtgcacccgtggccggctttccgccgggagccgtcgcgggcgggggagctgggccgccccccgggcccaagaagccggacctgggggacccggggaccggagccgcagccggcggaggaggcagtagcgggggactcgatggaccgcggctggcaagtgagtgtttttcgggcggggcgggccgcggcggcggagggcaggcctgggccggatgaggccctgctgccgacgggagctgagcacggcccgcgggctccccccctcacctcccaaggcggtctgagaggcctaggccgggcctgagccctccttccttcttcctgcttcccctccccactgccttcggcaagtcggagagcgcgg

SEQ ID NO: 1619 - DNA, 1589 bp, Homo sapiens
ggcctctctgtgacatgatgaaattgaaatcaatccacagtccatgaaattgtgacactccaccagattaagttagggcataacattaacttggaaatggccatgtcatcacccctgcggctgtcctatagctgagatgcgtgggtcgcaggggaggtgatttctaggcatattgctgtcccttttgtgtatctgtcatccggatgcttcggaccccacgcctctgcaagtgggagagacccgagcatcctccccacccccatagctccagtgcacgccacccccgtcttgcctgggtcggggcctgcggccagcaccatttcacacacactccttgtagatgggagccagaggaaacctgaacgtgggtggagcgttccactgagtctacttcaggagacagaaggcccatgctgatgggggaggaggagggatgtgggcattttggacaccaggggaaatggaaatgctgctttcaaaacttagtttcctttccatttcttcctagtctggcctttgacacaaatctggtagaaagaagcctgataaattgagggcacttgtaccctccctgtgcccccagaaggttcttggagagaagtgcaagaatttgtgaacacggcggtggagggcgggtggatggccatgggctgagcctccgtatcaggcctgctcaccttgctgggagctttattctgatctcattttgaatgttccagagggagcatcataagagcccagagctccgatttccaaagagtgatattgacatttatggagattggtgttgtaacatattttgataaatactaacttattttgttggggttttggttgtctcttgtcttaggacctggtagttatttgcttgatttttttttccgttattttctacataggcaaagagaattcgagggatagacagtctccaagaaaagtgaagtggtgggagagaattgcttttttcttttttttcttttctctagtttttctttctggctgagatttccgtgcaagacagcacccaatagactatttagagttgacatttgacattttaatgggcgccatggctcattttgtagattgagaaggtgcgtctcccctgctccaagtctcatcatgacagcgtgctgacagctgggagtctgtggccttcctcacgcagaggccttaaagctggacacagaagcacgcctaggctgggcagggatgggacccatgccccctccttagaggacgggcttcctggttaggaaaggacacgtgggggtgccttgcataatagttcactggtcaccgtgcttttatgagtagtgtttttgtgcacttgccaggggttttctctctgtgtgagaggggagtgatttaagcaatggtgtctggagtaagccttacaattttaatagactttttcttatcatatccctcatttctttccctgaaataaaaatacacacaagcaaaaaaaaaatgatagtttcacatctcttagttcccttgcccaaacaagaatattcttagttccactggccaggattttcctacatagtcagaacttacacattactagaggcacacccaccaag

SEQ ID NO: 1620 - DNA, 1143 bp, Homo sapiens
accatcatctctgcagccaaggggttcctagaaaagaggcttcctaagcagcattcctccagactgccagctgcaccccaggagtgcattatgaaatcaatttttcatgagttgtcatcaatgtttactttttttaatgaaacaaagtaggtagcattaaatattatcagagtgcctctcaggtggtaagggtaacactcgttttgcgaactttttattcggatatatatatttgatagaatacacctgtgtatattgggtaggatgtgaagtgcattcctctgtaggccctagaagccttctcgcacttagcactagtcgaccgtcacttctggctcagcatacactgtggtctggctgctgctgccagattccagtgcaccgtcggtgactcctgcaatgatgttatcaacatggagctccactacaaatacctggctaacagttgtcctcacatctcctctgttgtgtgtgctttgtggcaggtacttcaagcgtagcgagggcctggagcgccaccttcgacgagctgataggcagacccatcggggagttctcacggacacacatgactctgaacgcccccggcgtgctggctgaaaaccccgacatattcgcagtgatcataattctcatcttgacaggtaaagcccacacttaaaaagagatcgggtcagagtgatgggcaaaggtttggtgagaggctcctgttaagttcctttctttacttatctctttaaccataacccccatttctttttgttttgtttttgtactgcatgcaggcatctttatttgttcctgtcttcattgcttcttatagattcagatagggccggcctgcttcatagctgttgaattgtgtgccatttcattaaaagagaatcttaggtgtttagcctagctgtttgtggaataagattttgtctgcactgcaggctttttgtgtgagtgtcctgggaataaaagttcttttgactcagtggatgaccatttggaaagcaaaactgtcattcatcagccaggaaaatgtggaggaatgagctccgtctggaacactaatgtgtgcctggggcgtctgaagatgacttggatggtttttacacctaacaaccatcaaaacaccctttcagtaaataagtt

SEQ ID NO: 1621 - DNA, 1282 bp, Homo sapiens
cattgttattgccattcagggcctctgagttttaataatttaataatttaatttagtaatgaaattaagatatggtttggtttgctttctattacagcatacttgaactaacaccttgtttttcctggtgtattatctgatgactgagtgtaggaacaatgtcattaatgtgtgtttcctctactgcataatttccacccatggaagagtctccattaagaggacctgctacaaatgtggaagctcagagacctcgaaatgaagtcatctgtatctgttggcctgctgggttaattctgtatgtgctggtgaaactggagaagtctgcgtgcttctgacaattgatggtggaattctacgaattaaagcgttttagcaggaaatgattatgaaggacctgatcactgtctgtgtttccataatgtgataagattagagtaatgggtgaaatgaggagcaatcaggaaacatctttgttctttttcaacagctctgaacagcaacatggggtgcaaagtcctgctcaacattgggcagcagatgctgcggcggaaggtggtggactgtagccgggaggagacgcggctgtctcgctgcctgaacacttttgatctggtggccctcggggtgggcagcacactgggtgctggtgtctacgtcctggctggagctgtggcccgtgagaatgcaggccctgccattgtcatctccttcctgatcgctgcgctggcctcagtgctggctggcctgtgctatggcgagtttggtgctcgggtccccaagacgggctcagcttacctctacagctatgtcaccgttggagagctctgggccttcatcaccggctggaacttaatcctctcctacatcatcggtaggtcccaggggtccggagctcgtgccctctaccacttttctgtttgttcccacctccaaagtgtgggtggatgccccacagggaggtcattcttgttaacacgagaggcacagaattaataggatgtttctgattcatttagaggtatttagtttcttttagtaggtttttaaattactagagtaaatgcatcactgatagagaaaaattgggaaaataaagaaaagcatgaagaagaaagtagaaataccctgcctgacaacatggagaaactaattctctcattcattcattcattcttttaataaatgttcattgagtacctgctctgggctgggcattgtgctagatactagggatcccatgaaggcataagacactctgtgttcagaagtttactgtcta

SEQ ID NO: 1622 - DNA, 1145 bp, Homo sapiens
aagtgaatttcatttaaagctcgtcaaagctgtgtgaatcttggcagaaccccatagaaaccatagcataaaatttcttttaaaacaactatattattaaatgaagaatttggggtaaagcatattgctttaatggtcttaatactatttaaaaagatccttccacattaatattcaaaatgttttctagtagtggtggaaatcctctgcgtctaccagttcaaaggtaggctttcccagtcttttgggatctagcaaggatcagtttagtcttacctgcatgcaactgttcctgcaagaatgtagatttgaagtttttaataaagttgaccagttcatgtatttctgatgaattaaatagaggagaatggcatttgagtaatcagaaaatactaccttaaaataataaaaattatttagaaagtgatggcattataatgttttcaaagcgtaatgatgttaactaaattatccattactgactagtactttttttttatacctatccccagggaaggaagaatatgcaagatggtgcaagtgatggtgaaatgccaaaatttgatggtgctggttatgataaggatctggtggaagcccttgaaagagacattgtatccaggaatcctagcattcattggttagagtctttcaaattattgaattaaagtagaggagaacacaaattataggttgtcttggtgtgtgagttttctcttgttattcattaatctgattatgaccacatctataatatgaaagtatagaattgacgagacagttctgtcgaatgtaaccaaggacattttacatgttaatttgaagttgatgtgtaactgacaagttgttaattcaatgacatgtcctcattaataactaatgttttcactgatctttttatgcagtaagaattagaataatgttcttactatgagaataatttcataagtaaaaaaaaattaaaagaattagttttgaccataaatcaaagatccctgagtaaacattatgaaagtttgctgttctttcaaagggatgacatagcagatctggaagaagctaagaagttgctaagggaagctgttgttcttccaatgtggatgcctgactttttcaaagggattagaaggccatggaaggtgaga

SEQ ID NO: 1623 - DNA, 1180 bp, Homo sapiens
gactcctcacagaaactgaagactggctgtatgaagaaggagaggaccaagctaaacaagcatatgttgacaagttggaagaattaatggtaggtcgttttctcccccaaaaggtggtacttgtgttttaaactatagactttaaaataaaattatgataactattaatttattacattttattttagaaaattggcactccagttaaagttcggtttcaggaagctgaagaacggccaaaaatgtttgaagaactaggacagaggctgcagcattatgccaagatagcagctgacttcagaaataaggtgagtcagtctttttgtacatagggaggaagttaacctagattttaataagctaacacttaagctgggaatcatcatgaatagtcttaactttgaaattttggtatttgaggttagaggtagatttgaacttgagcttcctggaaagttgagtcaaatgagatactattgttcaataaattctacagaatgaccgtgttatttttgttcaggatgagaaatacaaccatattgatgagtctgaaatgaaaaaagtggagaagtctgttaatgaagtgatggaatggatgaataatgtcatgaatgctcaggctaaaaagagtcttgatcaggatccagttgtacgtgctcaggaaattaaaacaaaaatcaaggtgagtgttactgtctcgtgtttactgctgggttcacttacggactcaagttgcaatcatttgaaccttcaacatagccatttttcctgtaaatcttttacctcatcctaactgaaaccagcttttcttagtctattattctgtcacaaaatacagaagacctcataagtttgttgaatttccacttctccatttattcattcatttcaacaagtgtatttgttgagcacctgtcatgtaccagtccttgttctcaggattaaacaagtgtgcaaagtgtagtctctgcccttatggaactcatcttgtaatgggagggagaccaacagtaaacaagcctgtgtcatctatcagagatgttaagtgctatagggaaacaaagtaaggaaaaaggggttaggaaattctaggtcttgttgtatgtgaggctggaaggaaactgggaaaagtgttcttctggagtaatgttcaaacacagtgaaggtcaaggaaaagtga

SEQ ID NO: 1624 - DNA, 1499 bp, Homo sapiens
aaagatctcacacatataaagagagtatgtttaactttagtctttttgtgaatgggagaaataaggcatgcttagctgtttttattaatgatttttaaattactgattatttttgtttagggccttctctcagaactgttacataattgtgatggacaactgaaaggggaggtggcacaaatggcagcttactatgagcatcgtctacagctgggtagcaaagccatttatcacttggaagcgtttgtggccaaattcatggcactttataagaagttcatggaggatggattggaaggcatgatgttctgacttctgtcagttattcttgcaaagatttctcagtatcagtatttacatacagcttatattaaaagagctgtgggtaaattaactgaacttaatcatgtcgtatttgcgtttttttggtaataacttctctgtgaactattaatcatcctctgagttaaataattgctcctatactattgaagtatgtagttttgtacataacttagagactttagagtctaagaaaatgatcttaatttactttaagcattggttattcaagtattcattgttgatcctcctattctcttccgtctaatctctcacctgctaaaggagatttacacattagaaagcaaagattattttcatttatccagatgaccattttctgccacaggtaacatgattgtttgacacaccattatatttaattctagtttctctcaatgaataattgtatttttgtaggaaatgtaagatttcattctgaaacataattattggtatggacaaaattgcagataccatttctgttgaggctgcagatttccaacttttatttcagtggttcagattagtattaggtcggtactaagaaataagcatgttttcactaatttaagtacttgagactcttgaagaaaattcagaatgaagttctggagaaaggtatgttactgtagtaattactctttgaacaggttttgtgttttgtcattagctctgccctttttaattaaatattttggttcatggaccaaagggtttacttgacaaatttgtgtgacagactccgaacaattcctttactacgaagtataatttataaaataaaatatacccattttaagggtacagtttgatttttgaccagtgaaactatgatcccaatcaaggtatagatgccgtcaccccaaaaagttccctccatatccctttgcagtcagttcatccctaccctggcccagatgatcactgatcttgtcattatagatgagttttgccagttcaagaatttaatggaatcagatattgtaagcattcttgtgtaatacttcattctctctcattattgagattcatccatattgttgaatgtttcactagttaatgtttattgttcaatatttttgtatatacttttaaagcctattcacttgctgatggatctttggtttgtttccaggtttggttattatgaataa

SEQ ID NO: 1625 - DNA, 1408 bp, Homo sapiens
cctttacttaggtttattgacacagggagggggtcatccatctgcagctgggcccaaaaaatgccaggaatagccacaaaaggctggagaccatgactggcagtttgaatgtcatccttgctcctggctgtagtgtggctggtgcatagttgggggtgaggatattaacacgaaaactagtggattcagaacaagtgggatggcctggttcccaggggtcttcaggccacatggtcacttgcaggattgaatgaagaggtgatattgactagggctgatgccctgtgattctggggattttgaacatagggcttgaataacaactcaaattatagatggggttgtaaatgggaaagacaaccacaggaggaggtgaggcaggctgatgcaatgacgagaggccaggaaccagggtctgtggatagctggctctatcactcctagttggtattcacatccttttaaaatctgaaggtgctttaatctttcctggcccattctacaccaaggagagctttctaagccccaaggtgtcccaggctgccagagaaagtttagttccatgtgtctgtggtacacattaggaaaagtagagaaagtcacttgtgggactccttggttttccttcgggttagagctggagttatctctgaaggcttgatggaagctgatttcccaagatccaaaagctttctttgtcagggctggcaccagggctcagcgctttcttagacttctggttcagccctgacaaggttttgaaaatcaaattaaaaagagactaaatataacttgtagaaaacctaggaggaagtgtgcttacagacctaaactctaaaagatgcaatcaagtcctctgaaaaccagataattgactttaaaagacaagtgtagatgtattaggtggaagcatattagttcacttattctttttttcacttatttatttttatacaaacatcaccggttttctatgaatggaaggtggcaaattatctgtgtaagaagattcaggtataatcttccttctcaatgagtttctgttcttgatcagggttggcaaactatgcctggcaggtcaaatcctacctgctgactgtgtttgtaaattgagctttactggaaaacagccatgcccatttacttaccgctattatagctgttttcctgctataatgacaaagtagagtagttgtaataggtatggtatagcttgcaaggcctgaaacatttactgtttggccctatatataaaaagtttgcttcatcagcaagatgaacagataaagaaatgattatatatatatatgtaaatatatatacacaccatcatttattgatattatatatcaatgtgtgtgtatatatatatattatatatatatgtataccatcattgtgtgtatgt

SEQ ID NO: 1626 - DNA, 1175 bp, Homo sapiens
ggagatgatggcccttttctccagcctccaataaaaactcaagaacaacctgtgtggcattcttgcttgggccactccttgaaaatcatgagggacaggatttcactcctcccaaagtatcctcctaggcaaattcttagaaaggtttttttttcctatcacaatttaattcctatcagaatatctttgtaatttccagcccttggttgcagatctgttcgcagaagctacctagaagatatttcattcctttgtatggggagacattcaaatatttgaaatcacaaatctgctcttataaaaaattggctaagtaaattcttctttgactgtgtagaataaacatgcatacagttgtctttgaagtcgttagctcacattgaaaagaaaaagtttagaagaaattaaatatataattttgggggaaaatttatctataattttagctcatagtttacaattcctatatgactgtttggaaggtatttattttagaatggatggatgttccgtattaacctgtaggaagggtttgtgaatattctgttgctctgaattattagcggtctagatctaggctggactttgagaaatatgaaataaaaaaatacctctttggagtgtggtgttgctctttaaaaaaaaaaaaaaaaaaaagcccagtgaataaaaggaaaacccagtcatttctcctggaagcctttcaatagtgactcaatggcaatgttgtggttgaaattgttgctcctagataatgagaaaagttaaagccatcttctcaacagtgagtagaaaaatcttttaaattttagagatgtcataaatatagtcttaagaaaactattgggaaaacagtttcttgttttatttgcttatttcctaaggaacaaaaatgattgccattttacaactttatccctataaagttgtagccttcatgatgacataattcccaaagtcagctagaattccgagaatcaaagaagaaactgaaatctaattacagagaacaaatgcaacaggccagttatatttccagacgtttttggtttgcccagttccctaatttttcatacttctctttagtctgttcattttttgcttaaaaattgaatggaattttgatgcgacattttagaataaattttaaagaagcataaaactaaaaacctact

SEQ ID NO: 1627 - DNA, 1188 bp, Homo sapiens
tggaatcttgtcagattctaaggcatttttgttgaaatcattgaagatggaacattattaggctagtgagataaatttcttgacacttgctgcgatttttgttttagaagcttgctttttggtttagatatttttatttatatatcatcacattttctaaaacaaaatgttctactcaaaaaatgtttggaaaattatgtaaatatatgttaaaaaggtttagaaatttgaattctgaccgcctttttctctgtaaatatcctttttttataacaacatatatttttgtttttcataagtgaagagtaaattggtttacagtgatattgttctatattatatgcacactcaaattgtatgcattagattgtggagcattttctgatatttgtgctcacaagtaggttagtgtcatttgtcagtaataaggcttgcctgtgtagttggaaagtgccattgccctagagtgctgtattttgaagtcatctgtcatggatacattgtagagagagaagactatttatgtttatggcattttaagtaactgagttaaaaaccctttggaatatagagaagtggcttgtttactgtcatcactgttcacttaatcctacgaccttgacatgatagcattcccataaatctccctgtgggtagatcaataaaacagatgaacatcaaaatgtaatgattgtttcagctttaggaattaactatgtaatggaataaatataagccagtaagcagtattacagaaacattctattataccaacccctttttctaacagataacacttactagaacataaggagttattatatattatattttctgataatgtttgcagtatctaacagattattatatattaaaaaaagaaaatagatacaagtaatatgcatattatgactggatttttaaatagcagtttaaaatttttggtatacctatgattataaaaataatgaagttagggttttttttgcaatgatgttttaatatagctttattttacattgtgtttttattgtattatatctccattgttaattttctctagttcattcattttaattttataattataattcctcaaacataaatttttaactacagtacgttcctctttcccccaatgtaagcagctactcaggtattcaggaaaaaaaaaactgaggaaattgg

SEQ ID NO: 1628 - DNA, 1181 bp, Homo sapiens
aggaatagtatatgagaccttactgactggttcttgggagtgattgttaacatgggttgcaatccacttttatttttttatttttatttatttatttttttgagatgacatcttgctctgtcacccaggctggagttcagtggcgctaccttggctcactgcaacctctgcctcccaggttcaagcaattctcctgcctgagcctcccgagtagctgggattacaggtgcccaccaccatgcctggttaatttttgtatttttagtagagaaggggtttcactgtgttggccaggctagtcttgaactcccgacctcaaatgatctgcccacgtcgggcttccaaagtgctgggattacaggcgtgagccaccgcacccagctgcgatccacttttaaatggatttgtggaaaaagcacagattatcattaaactaagcggcatttaggtcacacatctcattcatctgatcagtgatctgacaacctgatgggagagtcacatctcctagggtttcaggaatcagtgggagaggcacgctatgaaagggcatgtgaaggaaggctgtgtttttgtgtctgcaggtgtgcacttgtactacgtcgggggagaggtgtatgccgagtgcgtgagtgacagcagcatctttgtgcagagccggaactgcaactatcaacacggcttccacccagctaccgtctgcaagatccccagcggctgcagcctcaaggtcttcaacaaccagctcttcgctcagctcctggcccagtcagttcaccacggctttgaagtcgtgtatgaactgaccaagatgtgtactatccggatgagttttgttaaggtaaggagtgcttgctatcacgttataaaatgttcagtgaaaaacaaaacaaaaaagcaccctgactgatgtggcaggcagttgtgcggtcaattctgatagacaaaaccaatttattattattattattttttgagacggagtttcactctgtcacacaggctggagtgcagtggcatgatcttggctcactgcaacctctgcctcccgggttcaagcgattttcctacctcagcctcccgggtagctgggactacaggcacgcaccaccacgcttggctgatttctgtatttttagtagagacagggtttcaccatattggccagagtggtcttgaac

SEQ ID NO: 1629 - DNA, 1179 bp, Homo sapiens
tctttcacatgtttctgaaagaagaggtgacctgccagcttcctttgagctgtgcttgctttagggccgacagtttttttatgttcatctgttcatgtcatgttttccctggccccttcatgaccaatacacatttataaatgctctagccatggaagatgaacaaggaccatgggctctacatctcaggtgtgctagtgaaatgagccggccccaaacagctcccatgagagctacaggttctaaaagattgcagagcggcatgcttggtcttgcagccgactttctggtgaaaagcattaactaagtttcctggtggaatcatgaactacacagcccaggtatgacagtagccatgtgttctctggtttgttttcttccagactttcgaccagtttgttacgaggagccccagcactggtgctcggtcgcctactatgaactgaacaaccgagttggggagacattccaggcttcctcccgaagtgtgctcatagatgggttcaccgacccttcaaataacaggaacagattctgtcttggacttctttctaatgtaaacagaaactcaacgatagaaaataccaggagacatataggaaagggtaagagcaaagatgttattcctttagtcatctagccgaaatgtagatggtcatgtgtgtagaagtgcacgtgaccaccctcacatgttggtcatgtgcccctgtggaaggaccccagggctggtgagctctgagatagctctgacattaccactggggaaagcacataggttgtcaggatcttagtccctcttcctctaatgtcatcatgccactttctaggggtggcatggagtggggattgtgaagacaagcaagatgataaatatgaagaaagccggatgaaattattaaatagaagtgttatgcattatttttcatttccctaaaacttacaaactaggatcatttctgaagaacaggaattctgactagatgattatttgtatcaggtgaagttccctttggagacttagcagctaggtagttagaaagaatgactgatttatgtctggaagcctttggcatgtgattggggctctcctgtgtgcaggctgattgggtacaagtcatactggtctcttttctgaccagtgatgcttttgaagcccatctcattggtctgagtgatggt

SEQ ID NO: 1630 - DNA, 1172 bp, Homo sapiens
gaccttttgaaaaatagaacttaaaagcgaggaacacagtaacttgccatggttagcacatctttgatgtcaactgactgtcccttgcagagagggatcttttatcattcattctctgtcctttttgcagcttacagttttccttctgagcttacacagaaggaagcttcctttaactgctttaaagatttctttttgacagttcgatggctgcatctttttagtagctcttcaataaatgaatacatttgatataaatcaaatgctgaagggttttttgtaaagtagaattttccccattgaatgattttagagctgtttgagaaagctctagctttttgcccctaagtatgtctgtcactcttaacatgttaagttgaattgattttaatttggctatattttcattgtgtgtgtatgtgtgtgtgcgtatgtatgtgttttttcctaggttacacttaaaagtacttcagattgtctgacagcaggaactgagagaagcagtccaaagatgtctttcaccaactcccttttagttttcttggttaaaaaaaaaaacaaaaaaaaaaaccctccttttttcctttcgtcagacttggcagcaaagacatttttcctgtacaggatgtttgcccaatgtgtgcaggttatgtgctgctgtagataaggactgtgccattggaaatttcattacaatgaagtgccaaactcactacaccatataattgcagaaaagattttcagatcctggtgtgctttcaagttttgtatataagcagtagatacagattgtatttgtgtgtgtttttggtttttctaaatatccaattggtccaaggaaagtttatactctttttgtaatactgtgatgggcctcatgtcttgataagttaaacttttgtttgtactacctgttttctgcggaactgacggatcacaaagaactgaatctccattctgcatctccattgaacagccttggacctgttcacgttgccacagaattcacatgagaaccaagtagcctgttatcaatctgctaaattaatggacttgttaaacttttggaaaaaaaaagattaaatgccagctttgtacaggtcttttctatttttttttgtttattttgttatttgcaaatttgtacaaacatttaaatggttctaatttcc

SEQ ID NO: 1631 - DNA, 1115 bp, Homo sapiens
ctctctgttttagctataaatataattcttcccctccttgtcccagaggtagccactaattccagagtttgtgtgttgaagggcacctttcctgccagaagcccgtaccctggctgtgctgatagatggggtccacaaattctttgtaggatcccctttttaaaaaaagctttacataaatgttatcatttaaggtaaacaccattctgtaacttgattttctttaataaaagtcagcatgatatttttgagatgtattgttcttacatgaccagatatggccccatacttaatagttaaatcaggaaattgaagccagacagcttgaaaaccttcttaatggaaaaaaatgcaagaagtgggtgggatagagtttctgttgaatttttgtatagaacattgtcatttgtgggaaactagttgatttgaattctgtgttattttgaatagcctaataacagcttaatgaggattaattgcatgttgtatggaaagttaattgttttaatttactatgggtgtagttactgcagtttggttcaaacaggtgaaagttaagatttgtagcataaaacaggaagcagatgggggctaattaaagttctgttgatgataaaaggatgactgatcaaggagcgagcagctggtttctcaatttaaacacaatttgtactattgtatgaagacagccctctgcaagttctcatgagtatctttcaaaggtgaaggcatgtgttccagcaacaagtgtgaaggctgttgtggccctgtttgtgctcgctccccttttttgccttcaagcagtgtcacttcaggtttttccaaaaaagggggttaagggatcacaaaacctggccagattttcagtgatgctctctggacacctgttgtgtcccagaaaagtctaaagctctttctgtctccaagaaaagtgcccaagcatttcatttccttttgtagtttttcttacttatctcaactccgtctcttggcaggctttccaatgttgttgccctgaccataacccaagaaggcccacatctagctagcggaagcgccgggtatttaagtgtgtaggcgaaggctaagcagtgctgtagatactttcctggagc

SEQ ID NO: 1632 - DNA, 1155 bp, Homo sapiens
ggctacgatgggcggggactgggagcgcaggtcccgggccgggttgcgggctgggaggactcggtcctccactgtcccagccggccacgcgcccgcgtgtcgcctcccgtcccgctagcagcacgctgcgtggctgctcgttggctgcttaagacggaagctcggttgatgtttctgcagaagttttcccccttggtcggtggcggagctgctgagcgcgatagtagcagctccggcggcagcaacattgactacgaggaatggcggcggctgccgcaggacctgcagcatcccagaggtgcgtgtttttccttccctttgctatttattttatacccctttccttggttagtgggccctgctgaagtcgttgttttcctgacaggtttttccagagcttctcagatgctctaatcgaccaggacccccaggcggcgttagaggtgggagagccttttctgcttcctccactcccggctgacccgcctccttccagcaccgcctgattaggactcaggctctagtgatgctgcgtctcagccccagtattgagattctcggtctcctttctctctctcacggtagccgcgttacctcagactcctgtcttgccctttccacttccagactcttgcattcctgaagcttctgagaaaaacttcctctatttattgggagcatggttggcatctgcagttgggctgaaaggatttttttttttaatgactagaagagaaaagtggactctgggctcgatgaaaattaattttttcttttgacaatcattgttgccattcttatgtaaaagtgtcggtatgaagtcagtctactggaacaaaaacctcttccctcacgtcccggaaactttccagatgtcttgtcatagttcattattcactcatttgtttatttatcaaaaaattttttaggagttgctgtgtgcaaaggcgctcattgctatgggttagtcttagttatatacttagctaacctagagatcactgcttgtaggtgtgcagtgaagacaaactataaagctgtaaaggaatgtaaaagagcaagagttgataagagttgaagaagagactaagctaaagataaatgatgctgtgggtcacagaattttaacaggagatcttttttgttttttgtttt

SEQ ID NO: 1633 - DNA, 1155 bp, Homo sapiens; identical to SEQ ID NO: 1632

SEQ ID NO: 1634 - DNA, 1138 bp, Homo sapiens
tttttatatctatatattatatataatttatatgtatattatacaatatagatataaagcaccataaacgaaattgaaaaaagaaagcagccaggtgcggtggctcacgcctgtaatcccagcactttgggaggccgaggcaggcagatcacgaggtcaggagatcaagaccatcctggctaacacggtgaaaccctgtctctaccaaaaatgcaaaaaattagccgggcgtggtggcaggcacctgtagtcccagctactcgggaggctgaggcaagagaatggcgttaacccaggaggcggagcttgcagtgagccgagatcgcgccactgcactccagcctgggcgatagagtaagactccgcctcaaaaaaaaaaaaaaaaaaaaaaaaaaagtgacgtactggaaaaatatctgcagcatgtgttggatgcaaaaggttaatttgcctttttacaaatagggaacgtcaataactttagtacttatttagctgctatttgatacagaaaaccaagagaaagtaataggaatattaattgtgctggagtgtagatctcttcccagccctaaagaacccgcatgacctacttacaggtgtcttatttttcaagatacaaaagagcaatgtaatttcctctgtggctattgtgaacaaccttaatcttgttctgttattatattgtgtcataattcaaattaaaaagtgtggaaggtaaataatatatttttaattctgaagctatccatagctttaaaggtaatggttaagaacaagtcaatgtaaaatgttccctagaagtgtacagttattttaggaagcctttgtatatttacattagcaagtatcaatttaaatattaaattataagccaactctacatagtataataggtaaaaaaatatttgagttgaattattaaaaactctgaaatgttggtcagttgcttagttttgctcaggtggactatttcaagttttcagtatcagtgacctaaatggttatataatttacttataaccacagatttaattttgggttatatcaaatcgattgataattgtttattataatagatatttatattctataaagatatctttatagttaactttcttatttaaccttgattgta

SEQ ID NO: 1635 - DNA, 1204 bp, Homo sapiens
atttgtaataatgatcatcagatctattaaatgaaaaaatagttgctgctctattgaaatatcaaaaacagtaaagaattaaattgagcaagctattagttggaggcttttaagtggcagttatatactttaagttactgatattttgagaaaaacatgcatgttttacacacacacacacacatatacacacacacacgcgcacacacacacacatatatatatatatatatttttttttttgggacagagtctcgctctgttgcccaggctgcagtgcagtggcgcaatcttggctcactgcaacctccgcctcctgggttcaagcgattctcctacctcagccccctgagtagttgggatcacagttgcgcaccaccatgcccagctaatttttttgtatttttgtagagatggggtttcaccatattggccaggctggtctcgaactactaacctcaagtgatctgcctgccttggcctcccaaagtgttgggattataggcgtgagccaccacatctggccatgttatattgacctctctttaattataggtgccagccgggaccaggctattaagtcaaccttgtgcgtcagaccgtttcatacagactttgagccataagcagctacaggctgaaatgatgcagtctcacatggttaaagatatatgtttaattggaggaaaggtaagaatgacagtctcactgcagacttttagtttcctggcttttggttattttgacttacctcttgaataattttttccatttgtagggttgtggaaaaacagtgatcgctaagaactttgccgataccttaggatacaacatagaacctattatgctctatcaggtacagtgttcatttttagctgcacttggactataagcatatatgcttaggccatcagcagaatttatggatatcttcttgttatgacctgtgtttttttatataggtaaagaaccaaaatagtaataaaattattcaaattaaagtgcaattataattctttggagcttttgaaagtacattctaggatatctgatgtgcacaacataccaggggctgtttttcaaagatatttattttccagaggcctggaagggtagggggaaaggaggagtgaagagaggttgattaatagttataaaaatacaggtaggtgggagaaataagacctactgtttgataaataag

SEQ ID NO: 1636 - DNA, 1127 bp, Homo sapiens
agtgatagtttcccccatcctttcattgacattatttgccaatgctgccagtcattctggcatgaaaggtgtgtgtgtgtgtgtgtgtgtgtgtgtgtgtgtgtgtgtgtgtaagggagtactttaaccttgccagtttgttccctcttttattttactgttttctttttagaaacccactgttaaaatttaaaaaggtgctttaaaataaaacgcctataaagattgtgcagtaagaatttttattgacaataattaaaattttttttgacaattttgggttcccaacttatcttacaagtgaaaacttaaattgtaaaacatgttgaaattttaaaaattaatgttaatatggaaatgcatttagagaagcccagtagtttttattgttggatttttgaaaaaacctctaccaagaatgtggtgttttttttgtttgtttgtttgtttgttttagaaaaattgggatttccccccaccccgccccacccagataaactatatctacactgtctcgtcaagttctctgacacgatctttctgggctctacatttcctactagtttgtgtccagaaactgcaagttgacatgaatagaggacaaaggttgtgtcttgcttttgtctctctcttccctccctgcaactctctctcccctcctcccactctcttccccctcccccctcctcccactgtctctcacctcccccaccccccactctctctcatctctcgctgtgtcctgtgtatgtgtgggtgtgtgtgtatttgggtgtgtaaatgttggttcttccactactggattttgtaatctaggataaatcactttttttggggactttgattttgctccattacgttttcattttttctgagcactgactgttctgaaagctgcacaaaacgtagaaagaagacatagcgcctgccagggaataggaaatgagggcacttacacattaatgtgaattagtaattgtggtatagaaatgttttatagtgaaagattcaaatttgcttttcaagaaaaatgccaaaagctatttaaataattcgaggttacatcgtaggttttgatttttctcaatttaagatacagaaatacagcaagccttaatataaagttt

SEQ ID NO: 1637 - DNA, 1186 bp, Homo sapiens
ttcttaccattgaccctatgaccctatgaaagaatgttaattgagggccatgatacatgttaaaagagcagttaactcttcttgagaaagaaaaattttaatgttcaattaatctgtatggagaacaacgaacataaagtctaatacataagagacctgcacgttgtgcacatgtaccctagaacttaaagtataataaaaaaaagaaataaaatgttcattggtatgtttttctgctgactggaggatgaaagaaaaaggacaagagtatgttttttataaggagattagagttagataatcaaggaggaagaagaaaacaggagacaccaaagaaaaagaaaatgtaaataattcgttctacctgctattactctacaaacttctattcattcaatatctatacctcatttgggtcccggtttcccttctcacttaacagcctcttaaaatctggtacattaagctccttctgatctaggtatgccgctttccctccctaaggcaccatctctccctagctgtgggttcaccccaagggagccctggtgtctctgaggcatctgagatccacagcactgtccttccagatctccacccgcctctctgataaactgcctgagcctttcacttctgacaaccttcttagcgcatgcttagacatgggctgagagaagccctggaaaatcttggtcttggagtgaaagctgtggtgatgcaaaggtatggcaactggaggctgttcatcacccatgctccttgcagcagagtctcttgaaggaaaatgggagccaggaatctccctgctgcctcatgcaccatctcccaataagtattggttcaacttcggtcgtgaggtttggagttaggcctgggtttgaatgttggctttgctaatagttagctatgagcccatgagacattaagtaagttctctccctctttgtttctttcacttacaaaatggagataataatacctctttcccagggttgttgtgaaaattcagtgagataataaagggagggctacacagcgcctgatatatcctaaccacctatatataaaccaaagatagttactttgggttccatgtcagcctcagcccctcttcctcagcttaaacaaaataactaattagccttttgaactgaagtgctaagtaaacaaaagaataattcaggaa

SEQ ID NO: 1638 - DNA, 1198 bp, Homo sapiens
aaccattagcagtcctctttgcccttacatcagagtatgttgcaaatcaaaccttttttttttctttcttttttttagatggagtcttgctctgtcgcacaggctggagtgcaatggcgtgatcttggctcactgcaacctccactgccagaattcaagcaattcacctgcctcagcctcctgagtagctgggattacagacgcacaccaccatgcccagctaattttgtatttttagtagagacagggtttcaccatgttgcccaggctggtcccgaactcctgacctcgggtgatccgcccacctcggcctcccaaagtgctgggattacaggcgtgagccaccacacctggcccacaccattttttatcagctttctaatgcatatcccctgttgctgatctctcttgtctattgtccacaagctgacagttttttgtttgtttgtttggtaattcatatcatgtctgtcctgacccacaacctcccaatgactgcctgttgtaattaaaatccaaactcctgctggatgtggtggtgcatgcctgtagtcccaggtactcaggaagctgaggcaagaggatcgcttgagtccaggagttctgggctgtagtgcgctatgcattctggtatccacactaagttcaacatcagtatggtgacctccgggagtgaaggaccaccagattgccctaaggaggggtgaaccagcccaggtcggaaacaaagcatgtgaaaactctggtgctgatcagcagtgggatcgcacctgtgaaaagccactgcacttcaacctggacaacacagtgagatctcgcctcttagggaaagggaacagaaaagggaaagggaaagagaagtccaaactccttattgtagcctgtactagcatttattgagcacttgctatatgccaaagactttgttaggtgttttgcatatattaactgatataatcttcacaacagtcctgtgaggttgaaactattattaacctcattttacaaagcaagagtgtaataggaaggttaagtaacttatccaaatcacacagctagtaagtggccaacctggaattcaaagcacagagtctgcctccaaagcaagagtctggcccctttataccatccaacttgatgtcgtcattttgcttttctttagccacactggcctttttattcctcaagcacatcaggc

SEQ ID NO: 1639 - DNA, 1226 bp, Homo sapiens
atttaaaggataagcatggatttatatgtaactggaataatttaaatatttacatttccatacagaaatgagtatactgaatttggggatcttggtaaaaacaaaacctatggcatttttagatttcaaattgaaaaggcaattggtaaatatcttatatcttctcagcaatttgatagtatatacctgaaaataagcagaagtaaatagagaattatcttcatccaaggaattaaataataggaatgttatacagacaccttttatacttaattctgcttttgaaggaatttaaaatggaaattgtttttaatttctattttattgaaccaaagaatttaaagtcccattcaaataaaataatacataatgttaaacttgtattattttttaatagccagcatttttgtggttttcaaatgaaccatccaaggaattatagtatttcttctctttttaagaaagtgtacttcttcaggttataaaagtagtaaatacttattgcagaacatttagaaaacaaacttaaaatgcatccagtctgatctcttccttcccatctttcatgttagtttcaccatttaaaaaaactgccttttttttttaattaaaggcaattttctaacatcgttttcaatttttttgctgtaaccattgcatctcactgcttcctattggattcattttccttcttactgaaataaattcttgagtagtttctcagtgaggatctataaataataaacataagcttttgtccaaaaatgcttatgttttacacttactcttcaattgtaatctaactagatatgttaggcaattttcttaaaaaactgcaatcttatattttgatatcttgctgatgagtttaaaaggtacagtgataacttttgcatcattaaaaatagttggcttagaaagctgtacttttccttccttaaaacagttttttaaatttactgtgctgatataccaagtgaattaattttctaaataagtaaatgattataagccttgctatacttaatataaaacaaaatatcctaagatagctacttaaatatacatgtactagtcagctattgttttataatatactatacatggtggcatatattttcaaaagcagtgttttgagttatattttattttctgagacatggtctctctctgttgcccaggctggagtgcagtggcacagtcacagctcactgtggcctcgacct

SEQ ID NO: 1640 - DNA, 1765 bp, Homo sapiens
actgcactctatcctgggtgacagagtgaggtgctgtctcaaaaaaatacagtagagtttaaatgctgaaggagatcagagaacaccattgatcttcctctagatatggcctcactttcacttcataatcatattttgctgtatacgtatggatcagtatcagtggttttcactttggtttactgataatgggcagctgatcattgaaaagcctagtgcagtactagcttagtaaatagagctgactgctgaactggtatgcaaattgttttactaataataaataacttggtgtcttctatggaaggaactgctggaagctgtacagaaacaaaggcattcattatcctagttttcataggcttctgtataaggaagaagaaaaacataaagctatactgaacaagattagagtcaacagtagacagaaattacttagaacagtataagatgacttaccaaaggggttattcagacagtatctgaggtttttgttggtagagcagggtgtgggtggtacatgccacagccttctgaaaaatgagctaccgctgatttggtaagggtgttctgcatccactgatagaccttgaacaatttactgttgttcttttggtttgcactaggatgcaaaagaaagaaatccctgcgctttctgtctgtctttgtggcggcccagattgaattggggaatacatctttagcctggaaatgtaggctgcatgttaatggtaatgtaacttttgcagtgtaatgtttgaaaaatattaatgtagtttttgcttttacagtaacaaatgtggcaattattttggatctatcacctgtcatcataactggcttctgcttgtcatccacacaacaccaggacttaagacaaatgggactgatgtcatcttgagctcttcatttattttgactgtgatttatttggagtggaggcattgtttttaagaaaaacatgtcatgtaggttgtctaaaaataaaatgcatttaaactcatttgagagaatgccttttagtttaatgcatatttaaactaaattgatcctgtagtgttcctggagaagctagagcctgattgtaggctactactcatcaattaacttctacagtggagactacttctgggactggaatataaaaaagaatcaaaggttctgattttgagttgcaataaagggaaagaccatgctcatagcagtgccaacatctgaagtgtggagccttacccatttcatcacctacaacggaagtagttaactggaagagattaccaagagaataaaaagagactcattcagtggaagcaactttgtctcagcttatttcacataaagagagcgaagtcttttgggatgaatgttaattaaactccctggtaactagaacagggactggcaaactagcctatctgaccacctgttttgtacactttaaggtggttggttgcctttttaaatggttgaggggaaaagaataccttgtgggatatggaatttaagttcgagtccagttttattggaacgtggctatgcttattcatttatggattgactgtggctgttgtcagtgcatgagcagagttgtgtctaacagactagagcctgcaagtttgccagcccctgatttaaaagatgaaggtacacagaatgtgggctggctggtgggcaaaggggtaaaaatgttctctatattgtatctgaaaagatggggtgtctgaataagaaaatgcatctatttgacagacctggagcagttgct

SEQ ID NO: 1641 - DNA, 1765 bp, Homo sapiens; identical to SEQ ID NO: 1640

SEQ ID NO: 1642 - DNA, 1229 bp, Homo sapiens
aggcccctcctctcatgaagcttacagttaggtgggagtagggggagaatggcggtaatgaactaaaaaatagcaggaagtgagcacctctgtgacgaaaactaaatgtttatggtgatgtgagaggtaatgatgggggaactaccttaagcagaaaggtggttaggaaagatatctttgaggaagtaatttataaatcaaggcatttatgacaggaaggagccagatgtgtcatcatctgggggaggagcatttcagaaagaggaaacataaaacagcattcctagggttagaaggagcctatagggttcaataacttgcagtgtggttggggcttatggatgctggatgaagataagtgagagaggtttacagggacagcatcatgtcaggccttgagggcaaggtaaggagtctggattttattccagatttgatgggaagcctttgggggatttcgattagggcaatgacatgatctgatttaggtttataaaagatctcttgaatacctcttgattataaatgggcaagagtaatcgcttctcggccttttggctaagatcaagtgtagtatctgttcttatcagttaatatctgatatgtcctctatccgaggacaatatattaaatggatttttggagcagggacatggactaggagcttgctccgtccactccatgcatcaacttggtattgctgtacccctaggaacggcgcacccctctgggtgttaaaacacggtgttactggccgggcacggtggatcccacctgtaatcccagcactttgggagtctgaggcaggtggatcacaaggtcaggagttcaagatcagcctggccaacatggtgaaaccccgtctctgttaaaaatacaaaaattagctgggtgtggtggcatgcacctgtaatcccagctacttgggaggctgaggcagagaactgcttgaacctgggaggcagaggttggagtgagccgagattgtgccactgcactccagcctgggcaagagtaacagcagagaaatctattgggaagctatggctgcacgtccaggtgtgagaagacggtaactcagactaagacagcagctatagctataaacttgctgatggaatgaagttggagagctaaggaaagataggatcagaaatgactcctaagtttcaggcttgggcaattggaagagggaaaagcagggaaggagcaggtttcaggagaagtga

SEQ ID NO: 1643 - DNA, 1196 bp, Homo sapiens
cttgtttccatagtttcctgactggaagtatctttttgatcaagatttcctttgaagtctattttaacaggattttcatgttagtattaaggtataatttcttagtgggagaatgggggctgtatctcctaaatgtctaattaaatttaaatttagtatatctgactaagaagggtgaggatggtggcttgaatgccctcttcccttttaaacctttcttcacttaagggacatgaaagagtgaggcttatccatccgaccaacactactctttccttctttccagtggatgtgggattggagaagaataagataaataagttacagtaaatttgttgctaacaatctgtgtaaattattgatttctttgtaagtgtatgaacactttcattaggttaaattgttgatattttaaagtttttgacctcagtggcagtttcatatggtttgacctattgcattatgaaactatggctataatcactgccctgtatataaaaatgttatggcacttaaacaaaaatacattataacttatttaaatagcataaatttgtgcgtgctttggcagcacatatactaaaattggaacgatgcagagaagattagcatggcccctgtgcaaggatgacacacaaattcatgaagcgttctgtatttttcagactctaaaccaacaaagataaaaaaagacaaagaagggcattacataatagtaaagggctgaatgcaacaagaagagctaactctcataaatatgtatgtgcccaatacaggagcacccagatttataaagcaagtttttagagacctacaaagaagcttagactcccacacagtaatagtgggagacttttaacaccccactgtcagtattagatcaacgagacaggaaattaacaaggatattaaggacttgaactcagctctggatcaagtggacttaacagacatctacagaactctccaccccaaagcataaattcataaacagtacatcactgatgaaatgtcaacatccaagccaaattggaatgttcatgaatacacctactttagcaacaggtaaagccaaaaatattgttactgcagatatgtatcattatacattaaagggttaaacaaccttctccagaatctaaattgcatatgagaatgataaaagccataatatagtaatttataatttaaaagct

SEQ ID NO: 1644 - DNA, 1216 bp, Homo sapiens
ctcaaccaaattagaggaggactgaggtaaagaactcttattttcagaaagtctattccacttaatgggctttcaaggaatatcttactctatgacacaaataaggcagactagagagcagttataaggttacttctttgttatatgaattctaagcaaggtgtttattccatgagagggtatctttatctcttgtgagcagacagaacagcattagtgttcagctgattactttgtaatagctgacagactgttttatctgttgtcaaattagtcttaactacactaaacattctttctgtaagcaagtggattggtttggttgtacacttgccatctttcgaacaaaacaacacatagctgccagaaaaaaggtagtcttcccatttcctgctcttgccatgtgttctatatatacatatatatgtatatatatgtatgtgtacatatgtgtgtgtgtgtgtgtatatatatatatatattttttttttttttttttttttttttttttttggtagagactgggtcttgctatgtttacgaagctggtttcgaactggaactcctagcctcaaataatcctcccacatcactgtcctagaatgctgagattatagacatgagccaccctgcccagccagctgatccttttttttaacctatctatgcttttgcttgcatagccacttaacatttctagttgatcatctttggtgaaaactacaaaaacaaaggagaaaagggcagattgaaagctccactctcctaaaaatgtaaacttatcacaagaaaatgccaggttttgtatgtaccattcacattttggtgataattaactctctgtagaaaattttggaaatctaattaattagtaccttcaatacctttagttgtctcccacacacgcgtgtgtgtgtgaaatcttctacaatatcttcccttttttagaccatgttcactgtcaaaaaggtgctttaagagcagtctttggctgggcacggtggctcacacctgtaatcccagcactttgggaggccgaggcaggcggatcacgaggtcaggagatcaagaccatcttggctaacaggatggtcttaagggacagtgaaaccctgtctcaactaaaaatacaaaaaattagctgggcgtggtggcacgcgcctgtaatcccagctactcaggaggctaaggcaggataatcacttgaacctgggag

SEQ ID NO: 1645 - DNA, 1170 bp, Homo sapiens
aacgtcttacagccagtgtctaaactccaaacaacggaatgtatcaatgagaccttgtatatggatacacgtgcatttaaaaccgccctgccggcttgtagagcttttgccgttctccagcgctttacaggggttatcgcacttaagcctcggaacaactttaccaggtaggaactattactgttctcgttttgaagaccaggaaacctaggctcagagacgttaagtaatttgcccaagacagcacaggtggcacagaagtggatgaatccacatctgtcagattcagcagccctggagttctctaccacgctgtacgattcaacctgagcccacacaggaggcgtggtctccttcttcaacggtgtgtgtgtgtgtgcgcgcgcgcctgcctagagttaatgattaagtttgctgaagcccttcttcccggtcctaagctgcctgttgcgaaggcgctttcattgaattcagtttctcttaccgtcttaacttgttcataaactttttgagataggaatgggcagtttttctgtgtcacttaggatgatttttttttttaatggcgtgataagtgaactgaatccagcaaagacgagtttctgttgtgcaacacgttggtatactgacagctaccacgtattgactgtgtactgtgtgctgggcactgtgctaaataaatgatttacgaattaatcgtgtttattgctcacaacagccttatgaagtaggtattatcttcactttacagatgaggacacctgaggttcagattaagaaatctgccccaaagtcttagaactggtaagtagaagcaccatatctaggcaaacctgtctaccttcaaaaaaaatgggcactctgataggacaattaacgataataaagttgtaatttttttttttttttgagacggagcctcgctctgtcgccaggctggagtgcagtggcgcgatctcggctcactgcagcctccgcctcccgggttcaagcaattctcctgcctcagcctcccgagtagctgggactacaggcaagtgccaccacgcccagctaatttttgtacttttaatagagacggggtttcaccatgttggccagaagggtctcgatctcttgacctcgcgatccgcccgcctcggcctcccaaagtgttgggattacaggcgt

SEQ ID NO: 1646 - DNA, 1220 bp, Homo sapiens
tatatctatatagatgtagatatatatctcacagtttctttatccactctttgattgatgggcatttgggttctttccacaattttgcaactgcaaattgtgttgctataaacatgcatgtgcaagtatcttttttgtataatgacttcttttcctctgtgtagatacccagtagggggattgctggatcaaatggaagttctacttttacttctttaaggcatctccacactgttttccatagtggctgtactagtttgcattcctaccagcatgtagacatgttccctgatcactgcatccatgccaacatctactgttttttgatttttttttattatggccattcttgcaggagtaaggtggtatcacattgtggttttgatttgcattttcctgatcattagtaatgttgagcattttttcatacatttgtttggccatttgtatatcttcttttgagaattggctattcatgtctttagctcacttttggatgggattgtttgttttatttcttactgatttgagttcgttgtagattctggatattagtcctctgtcagatgtatagattgtgaagattttctccaactctgtgggttgtctgtttactctgactgttccttttgccatgcaaaagctctttagtttaattaagtcccaactatttatctttgtttttattgcatttgcttttgggttcttggtcatgaaatgcttgcctaagccaatgtctaaaagggttttttcagtgttatcttctagaatttttatagtttcaggtcttagatttaagtccttaatccatcttgagttgatttttgtataatgtgagagatgaggaaccagtttcattctcctatatgtggctagccaattatcccagccccatttgttgaaaagagtatcttttccccattttatgtttttgtttgctttgttgaagatcaattggctataagtacttggatttatttctaggttctctattctattccattggtctatgtgcctatttttatgccagtaccatgctgttttggtgactatagccttatagtatagtttgaaatcaggtagtgtgatgcctccagatatgttccttttgcttagtcttgctttggctatgcgggctcttttttggttccatatgaattttagaatttttttttctaattcggtgaagaatgatggtgatattttggtggagattgtgt

SEQ ID NO: 1647 - DNA, 1195 bp, Homo sapiens
taaaaaaatttcagtgaatatatacatgcaggatagttgtcctgactaagagatcagaaagtaaatatagcaagggcagagaaaggaattgaggattaagtgctcagcttcctggaagccaaatcagaaagaaaaatgaactttttgttatttaattaaaacaaaaatccagatctgaaaacaaacttttctgggtgctaaatctcattaggtccttttaggagaatcattcaaaataacagtaaatggccttccattatgactttttgaaggtgcataaatgtttttcatgtggccaaggacaaagtcaagggtgactgatgcctttagtagctatacccattggtactctaggccagtggtgctgtcttgcttgctctcgaatggttttaatgcccatgattgctatttgtccaactttggaagaggaaataaataagaattggctttaaataaaatcttatagtcactggatgaaagcagccacttgggttgacccccaaggcaccccctctccctgccagttgtccatgtttccattatcctgtaggattcctcaaaacctgacccttcaccttgtacatcctcggaaactcaaaccctgcctgtctgtcagcccctctgcatcagtccctcctcagtggcctgtgctttgagatctctcttaactgaaacttaagacagcttcaaagttgcatacacctgccagatgtagtggcatacacctgtagtcccagtaacttgggaggctgaggcaggaagatcacttgcgcccaggagttccaggccgcagtgctctatgatcgcgtccgtgaatagccactgcactccagcctggacaacacagcaagaccatatctctttaaaaaaaaaaaaattgcatacactgtttatcttccacagcagtggcttccatttatttatttgaaattctagtttatggattttatggattcataatagctgtacatattttcacagtacttgtggccatctgatacactcatataaccaaatcagagtaactgagatgtccatcacatttactaagcacatatttgcacctgtcatggttcagacattgtgtgtatatcatctttaagctttgatgctaagaatcatttttcctgttttgtatattagtaaaacaatgatccaaagactggtctctgagccagggtttgcatttgtatcc

SEQ ID NO: 1648 - DNA, 1561 bp, Homo sapiens
acatgttattgctacagcctccagtatgttcgcattatctcaaactcagggaccccacaggacaggagacaccctttctgaaactgagttggaagtgaaagggtggtgatggttttggccaagcctgcgggagggaaagtattgtattgggagcacccttgggaccaggaagagggatgcccaggttcacactctgggacccctaagacattgtcagtgggtaaggtggagggccactgccagaggctgctgcagtgccctctgggaagtgccagggaccctcagctgcagacccaggggatcccaatcccttatctctgcctgaaaagtggctattgctgcttcgtatcctccagtgtcacaggaatgctgtgcctgagacatcccactttagtttttgttttccaaacctgtcactgactcttcattgtggtgacagatcctctggttcccccattgctcagcctcaggtttattttgagggtaactcagtgtctgactgcccaagtcttttaggggttagttggaccattgtgtaagcttgtttgtatgtctcacctctttctggttggtacttactgtctcacactgctctggcaaacttgtacacacacacacactctctctctctctcacctggctaaggcttttaaaattatgaagataaataatctgtttcaccagctggagtgagttgcaaggaagattgctggagctactcaatctagcgctaatggtttggattcattactgcaaacctacataatttaacatatttgtttactttagtgtgacaactgatgaaaaaaaatggagcaatctgaattgtataaaataacttaagaaggaagaaaagtgatatataaatatattttgcaaatgtcacattaatttaaaaatgagtatgattgattttatttttaaagtgggcattcttcactgtttcgagacctttgtatgtatttgtgtatttttatctttttttttcaggccattattataaggtgttattttggccctctaatgtagaagttatgtttaaatacaaccaatcaggccctaagtgcaaaaaagttctgtcttggtgcttatcactggtataattattatttttttgttttcctaactttgctcttaggagcatgagcctctttgtagctttatggtaatgcaatatttctggtcatttactgtcaaaaaatttttttacattgtgttagtgaagactgtgttttcagggttaaatgattggtatcaatgtatatagagtaaaattattgcaaaatttaaaaatgatttttcttggcattctttttaaatactctgaaacatatatgcaaatgagaaacctttaatcatactaaagccagttatgttaagaatttttcctttggattttataattaagagttgcttataaatacttatgacattgagctcttactgttttagttgtcttaaaacaatgggacatgtcatgaactggtttctttttttaaaaaattcttgatgtgaattccactgttacctgaccatgtatattcagatgaatgtactcttt

SEQ ID NO: 1649 - DNA, 1198 bp, Homo sapiens
ctccagcctggagagagagagagactaaaaaaaaaaaataataataataataaaaagaagtccaaatatgctgagatgccatgctgtgaggaagtgcaacccagccaggtacaaaagtcatggggcaagctggcgcagtgtctcacgcctgtaatcccacactttgggaggctgaggcaggtggatcacctgaggtcaggagtttgagaccagcctggacaacatggtgaaactcccgtctctactaaaaaaatacaaaaagtagccaggtgtggtgtcgtatgctaatctggaggctgctaatctccagctaatctggaggctgaggcaggaggatagcttgaacctgggaggcagaggttgtagtgagtcaagatcacgacactgtgcttcagcctgggcaacagagtgagacttcatctcaaaaaaaaaaaaaaaaaaaaaaaaaaaaaagcacggggcaaaggtgtggagagagattcagctagcccctgtttcttccagttactccagctgaggcatcagatgtgtgggtgaagaaaccaccagacgcggtggctcacgcctctaataccagcactttgggaggccgaggcgggcggatcacgaggtcaggagtttgagaccagcctggccaacatgctgaaaccccgtctctactaaaagtacaaaaaagaaaaaaaaaatagccgggcgtggtggcgcacgcctgtaatcctagctactcaggagactgaggcaggagaactggttgaacacgggaggcggaggttgcagtgagctaagatcgcgccactgcgctccagcctgggcgacagagggagagtcagtctcagaaaaacaacaacataaaaacagactgatcatctgtagtttttgcacaactgatcacgccctccactatcttgttcggcggtctcggcggtctggaatcctcctaggccagcgaaccttactgaacactggcgaggactccgcctctaggaatagaatcgcggggtaggtggggtcgtctggaggtagctggctccgcccggcccgcgggcgagtccggaatacagttacccacctcagttgcccaccggaaagcaaagggagaggaacccgccagaccagaaacggaagagagcgcgggggatgtgtttggcgtggggcgcactgttcagttgctctcctggatggctttatgtctccgcgg

SEQ ID NO: 1650 - DNA, 1346 bp, Homo sapiens
catattttaggtatgttagattcatgacataattccttttattagttttcttctaaaaattatctccatttctactcctgaattttaactttgaatgacccattctattctttcctgtataactgaacttaaccatattccctcagggatgttctgggatcatgtgcaaacatgcagtaaccattatacttctccaaagttcattctgacctccaccttgcccacttcaagtctttttttgttcttgccttgcctgtactagttccgcccttcttataccacaaaccagctcctgttctctctttagtcacatttaactattcagtttgaatttgctgttttgacttcagcattgccaccctttttgcctattgagttagtagttgagggcactgagtgagatataatatgctttggttctccctttttgtgttgcacttggaggaaaagacatgtactgaggtaatgtgtcatttaggcaaaataaatccttaaaagagtattacttttgtgaattcttcattattcacattgatggggatcttggaggctcacaaacttgattggtcaacatacaaagactcagttttcatttcatgagcaggtatacaatctgttttaatggagactgatgtttaaaaatccaaatgtcactttagtaatttacaatcagaaatattattcttaagaagactcttgtagtctcttctctccttataggctagtctacacaggaagccaaatgatagagagttgcttacttggtttgttggatgatccactgtggagataatggggcgtatatttagactaagatcctgccactgtgcgtgcacccagcatcatgtgctttctttaatgtgataaactagaagctccacgaaggcagagaaatcttgctgcagcaaaaactagataattgtgtttatgtgtctgaatactccctttcctggggagttgcagtggtattttgcagcactttaggtctctggacatgtttgcaggtaccatgcagactgcctcctcctgtaacacatattcacttctcttagagtactctgaaattgataaagtcatactttcttatggcaactaaaataaatttgttttattttgaggtcataaattaattttattctgatattggtgcaactgtgtgtgcgtgtaatctcctgggtcattttactgggaggctcatattatctcatattttgattttccttaatttaatctgaagttaattataatttaagatttgggaatatcttatagttggcaaaatgtatctctcctaaagtatacttcttgtctggttatgttttagagaagttagatgagaactagtg

SEQ ID NO: 1651 - DNA, 1207 bp, Homo sapiens
ttctatggggtagacactgagcttgttcctttatctgacaatgaacactgcagtaacatgtatatagtgtttctctccagggaagccctctgaagactaatacccaaggcctttattgggctgcccgcaaaggtaccagaatttcagatccctcccagaaaacagatgtccaccataaatcatattgtttatatgaataatccatgcagtgaattacatttttagttagggagtggtccaagtgcaaagtccctagctgccagcctagggctaaccttgtaagctggcctttctaaagatagctgcctcagatctgctatgtaacttttaggcttagctttttatgttgaaaaggaatgtttttaatttttgctttttaaattggggagtaagaatattaagaaatgacattgaaatccagcatgtaagttttacgttcaaatactggaattattcagaaaaatatttaatgatagaccagtcttaaattactgatcactatccattagtaaaaatttaaaaacaaattatatttttatttcttttaagattttgtataatataaaatgattcaccaagtagatattatcttgcatttacttaagtaaatagggattttatgtgtgtgtgtgtgtgtgtgtatttatgtgtgcatatgtatgtgtgcgtgggtaggtagatgctttgaaaattatttttaaagttttacaggctaaaagttttcctgtattattattttttgttgttcaatataacagcattcttggacccagtcatcgtcctagcaatcctgatacaatggcatctgaataataaagttgtctttatagtgtgaatttagggcatttaaagatttggtagatcattttcatcttgctaaaaatacatcaaaataacatttgtatatttaaggacacatactatatatatgtatggcactttagaaattatgtaaactttgagcgtgtagtctttttttagcctgacaacaactttgtgagataggattggtggtgtttttccattttatagaggagtaaattaactgggtttagagaattagtgacagtgtcctagatcatatgattctttaattaccgttgggatggatcaaagtttaggatttttgtctagtgctcatttactttacagtgatggctcattttcacttgaattaaatttcataattattgatgaaaaccagaaa

SEQ ID NO: 1652 - DNA, 1170 bp, Homo sapiens
tctaagctcttttacttacattaattcatttaagtataggagctgcttatggatactgcagccatttcaggatagctctttctgtctgttgagagtagaaagtattatggataattcgtgtttgacagtaagaactatagcatataaattatatctactttgttttactaatttcattatgtatttaaaatgcgagtgagatggaaagcctttccttttggtctacttatataaacctttaagagtttaatgtggtcagtctaattctcttctttagcctctgtatccactgggatatgtggaaagagcatgaattttagagtccacataccttgggaaagatatagaatattttttaactttagttttgttttcttctatggaaaatacctataaaaacatgtaacctcacaggattattgtgaggaacataataattattcagtaaacattttgttaggtcattgaatgtttgaaatgcttggcacacaggttgttaattaatgctggttccatttctcttgttttcctttaaggctttggaaagaacagtctcttttattgttcacctcctgaaagtaatgcttgttgccccttaattgcagcagcagccactgattgaaatttccagatcaggagttgagtatccattccaaattacctctctaggaagtaaacccaaactgcttctttgcactacccttttctttagactaattccttttccttttattttttctgttaaaattttcttttctgtttcaatgtgtattagtccgttttcacactgctgtcaacataaagatactacctgagactgcgtaatttattttaagaagaggtttaattgactcacagttctgcatagctggagaggcctcaggaaacttacaatatggtaaaaggtgaaggagaaacaagcaccttcttcatgaggcagcaggaaagacagtgaatgaggaactgcaaacacttttaaaaccatcagttcccctgagaactcacttgctatcatgagaacagcatgggggaaactgtccccatgattcagtcatgtcccgccaggtctctccctcgacatgtggggattacgatttgagatgagatttgagtggggacacagagccaaaccatatctttccaccctggcttctcccaaatctcatatcc

SEQ ID NO: 1653 - DNA, 1187 bp, Homo sapiens
tctgttactcccaaatgtttctacctttagtttatcttaacttctctcagattatcttaatttctctctcctgcccagttgtgattctgggagatatgacaaatggtaatagcctgtcctagaaagactgttggccagtagcggactcggtcaacctcctccagtttgctcttggttggagaaataattatgtcacatatttagaccaaccaataaatagcctgtgattattttgaggtcactattttatttctgtacaagctataaaactgtccaactgagctcttgaagctatggtcagggattatagatgccttgttattccaccaataagcaccagtctctgaaatcctttatcttggctaaatcctgaagactgaacgctgagcccagtaattattacaaacaaatgattttgttttttgaattaaaactttgtactgatgttcacagtccaaagccaccaccaggtgagacctacctcttttgacacatttagtattcagctataatagatagtcctttgtttggctggtctgagtgcaatagtgtttatagctaattggtcccaaccagttacagattttcttgttcctgctccactcccactgcttcacttgaccagccttaagaaatttgttgtaaaaagtaaattaaataaaatagccctttgtttaaacataataaatctcttcctttttatatgacaggtggttgggattattttagattttgatattcttctaataggaatctcaagcctgcatggtctggaaaggaggaagtagatgcaattcctagatttggatctattcccttgacattcagacctaaagaagatttaccagctgcagtgatgagcaggagctggggtagaagctgggagctgagtgaaagtggtgggttttagtgaatttccaagctttgaatttaatggagctctagagtatattagaattgtttgtgtcagtcaccagcatgccaaaaccattcttaggaattgcccaacagaccctggctgctagtgacttgctctttgcaaaacaaaaaaatcaaacacccaaactgcagagaatccagggttgcaatggagcaggtgctgggtggtggtaatgctttgtgtctctgggcctcgactctgagtctgttttcttgaattctagggcacttaatccctttgctgtcta

SEQ ID NO: 1654 - DNA, 1176 bp, Homo sapiens
ggtccatacagtgttgttctggattcctatcgtaacttaaagggaaactatcacaatgtctggagcccttgatgtcctgcaaatgaaggaggatgatgtccttacgttccttgcagcaggaacccacttaggtggcaccaatcttgacttccagatggaacagtacatctataaaaggaaaagtgatggcatctacatcataaatctgaagaggacctgggagaagcttccgctggcagctcatgccattgttgccattgaaaaccctgtagatgtcagtgtcatatcctccaggaatactggccagagggccatgctgaagtttgctgctgccactggagcaaactccaattgctggccacttcattcctggaagcttcactaaccagatccaggcagccttccaggagccatggcttcttgtggttactgaccccagggctgaccgccagcctctcacagaggcatcttatgttaacctacctaccattgctctgtgtaacacagattctcccctgcgctatgtggacattgacatcccatgcaacaacaagggagctcactcagtgggtttaatgtggtggatgctggctcgggaaattctgcacatgtgtggcaccatttcccatgaacacccatggaggtcatgcctgatctctacttctacagagatcctgaagagattgaaaaagaagagcaggctgttgctgaaaaggctgtgactgaggaggaatttcagggtgaatgtactgctccagctcctgagttcactgctacttagcctgagattgcagactggtctgaaagcgtgcaggtgacctctgtgcctactgaagattggagtgctcagcctgccacggaagaccgctctgcagctcccactgctcaggccactgaatgggtaggagcaaccactgaaaggtcttaagctgttgttcttgcacaggctcttaagcaacatggaaataaataaggttgatggaaaataaacaacagtttcaaaaaaaaaagaaatgttgagcacctttacaaatacctattggtcatttgcgtgtcttccttggagaaatatttgtttagttccttcacccattttttaattgggttatttgttattgagtcatagggattccttatacacgcaaatattaacctcttatcagacacggtttgcaa

SEQ ID NO: 1655 - DNA, 1147 bp, Homo sapiens
aaaattactttctactttcttttttatatgcttcataaaaaatgtgactgttccagaatttccctttaataactttttcttctttggcagattaatttagaccatgttgacattttgtaaataaagttttcttgggaatatgaacaaaattaaaacaccaacaaattaaagcaaatgaaaaagaaagatgggaaaaagtgaaatagtattctgatttaggactgcagtatttagaacactgaaggatttaagtgtcatttctaagatttttaattttaatttttattttgtgtgctttcattaagaaagaggcagccaggctcagtggctcacgtctgtaatcccagcacttagggaggcagaggtgggcagatcacctgaggtcgggagttcgagaccagcctgaccaacatggagaaaccctgtctctcctgaaaaatacaaaattagccgggcatggtggcgggcacctgtaatcccagctactcgggaggctgaggcaggagaatcgcttgaacctgggaggcagaggttgcggtgagccgagatccctacattgcactcaagcctagacaaaaagagtaaaactctgtttcaaaaaaaaaaaaaaattaaaaaaaaaaagagacatcaccaatgtcagcctgctatgctttcatgaaggttttgctaagtgatgtcttgatttctgtattcaagtgattgggagaaaatcttacacacagagtaattaacagtaaaaataatgtaataacatggcatagcattatgatatgtgtatcaaatgagtggggcagtcattgagggctgaaaagttctgaagttctaatcatcacagctgtagccatcagggaaggtttcttgcagaaagttgaagaaacaagttgctttcaatgatttcaaatgagcaatctggaaattttctagttttacatcttcagcttttctctgaagttgactaaactatgttagaggttacacatcacaaaaaagttaatgctgccatgtagattagaatcataagtctgtacaacatgcaaagtaagagatgttctttaatgaaagataaacctccaacttttcctttaagcctgcctttcttcattccccacctatctctgtaccaaataaacattttatcattttt

SEQ ID NO: 1656 - DNA, 1141 bp, Homo sapiens
cacttgccggcttggtgaacagagacaccgaagatactttaaatttggtctttcatttttaaagtacgatcattttctgtatttcaatcactgtgccttctcagacattctacttttgttctttcctatatgttttgaacccagaaaccaggacttctgtcaagctaagcattatatcgaaaaaagaccttaaacagccatgttctaaagaagaatgaggaaatggaggctcattaggagcataaactggattagaaaggggatgttaggctgggcccggggttcaggcctacaatcccagcacttggagagcctgaggcaggaggattgcttgaagctaggagttccagaccagcctgggcaacatagcaaggtttagtctctaccaaaaatcaaaacaatttggctgtgtgtggtggcctgtgcctgtagtcccagctactggggtggttgaggcaggaggatcacttgaacctgggagatccaggtttgtggtgagctatgattgtaccactgcattcaagcctgggcaacagaaagagaccctgtctgaaagaaaaaaaagaaagaaggaaagagagagaaaggaagaaaaaaagaaggaaggaaggaagaagggagggagggagggaggcagggagcgagttagtttagtgccctgtagacctcagcaaactgctttagaacagggtgtgtgagccagctcactactattttgcttactttcaactttcaaacattagtccaaagattttaggttgccagaagtttgactattgcacatgaatggcgttaccttcatatattcagtatgatttctctttttatgtaaaatttttctagatgcagaagtttagattttagggaatacagagtaatgccttcatatactggggaacatatctttactgtcttaaaacattaactggaaatctaatgatcctaaatacattttataattctcaagaagtatataacatctttctcccacaacagtctaccgaatgctttagtgtatttggggaatatgactaaatatgatcatatagacttttaaatttgcaggactttatttatgtacttttgtattctgagaagtaacatttgaaaacgataaaaagatgtaaatatatcttcaagg

SEQ ID NO: 1657 - DNA, 1110 bp, Homo sapiens
ccgcccgcctcggcctcccaaagtgctgggattacaggcgtgagccaccgcgcccggcctctgagcttattttaagacctgacaaaaatgttaaccttcttttatgttgacatagtctgtagttcaaggttatgcatgttgagcattcagtattatacctgtcacgtgaaattttgcttatatcatttattgagttttaattacttgggaaattgttaaactgttttcctaaaaaaggacttgaaaaatcactcaaatcagtgttccaaaaacagttcatatattccttatcactctactcttcaatacctttttcaattattttaaattctgaaatgcccagttgtctttctttttataaatggctttaaatgctattaccaccttgtttgaaaatgtgttatttcacagtctgcatctatatgtaagaaaaagtgcttcaccaagttaagaaacagtgttattttaggcaatggtaataatgaataacactgtgcttgacgcctggctctcgctcagctactccccccgcccacccccttttttaagaacaacatgaatactttcaaacccacacctagaaaacagtctgtggtggtttttacttgggcagctttgtttgctccaaggaatatttggacattagcataaaggttgcacatgttatacaaagtgtaattaaagaagctttgatccccaaatgtcaactagcttgctaagtgtcataacaaagtgtcaagcatctggtatacagttaatttgtagtcattaactccatattgttgatgtgacagtttgttagcaaagcaagcttgacggttgcattttgttcttgattgacacctacagacctccccacccgtttagtttacattcctgttgaggtttcctcaggttgcatttttactgcttaatttcccccaacttgttagttgaagtgctggcaaacttttaaaatcatatgctatgttagtacagaatttcaaactccttctctaaaatgttctaagtttgcaataatgctggaaatgaaaaaaagcttcatgatctttcttcagaatttaaagatttcttcaagtaatgtgacaacacatgcattatcctgatgca

SEQ ID NO: 1658 - DNA, 1180 bp, Homo sapiens
ccgtgcgccggagtgaaccttccccagataactctggatttgtttggtttgccgccaggagtcagtgtgctgttctcgctttgtgtacataagcgcatctcttgcccaaatacaattcagtttcttcttgggcataaacaccgtcaattttgagaagaatgagctccctttggttctggagacccactccgcttataactagcaaaaaaaaatggccttcgaccacagccttccagacgtattttcttttagaagtcctgttcccagcaggccccataggctccaagacggcgggaaaagactgaaaaatgttaacgagttcgttatcatcatagggactcttatcacacaacaagcagtaccgataaggtcataatttgcttataagataaaatttaaaattgtagtgttaatttattaatctaatttatatcttcagatagtggtcctcagtggggagaaagtaatacataaggatactggattatggtctattataattccagtcctttcttgacaaattctagttcactctccatacttatttcacaattccatctcgttaatactgtcagagtaagctattttgattatggcttgtaaagcctactgtaggcagtttgtaataaagtttctttccagtttttaaactgatatgtaactatggcaagtttgggagtaggaacttttcctttacatgctgtaatctagaatcagcttcatcatcccatgtcaatgacccacttgtataagttcttccatccagttagtttgccattttttgatgtctttagattattattatttatttttcacagcaaaaaagtattatagtttggtatttggcatcctcatattccatatgaataacttgtttttcatattggcacactttcatgatgtgcaaattccttagtggggtagttcttaactttgcccatctgtgttcattcactttatttataataacatttttagaaaattgacatataacaattgcacatatttatgggatacataatgatgttgtgatacatgtgatcagatcagggtaattaccatatccatcatctcaaacatttatcatttcttggtgttgggaacactaaataatcttccttctagctatttgaacctatatcacatattattaactataggtaccctacagtgctataga

SEQ ID NO: 1659 - DNA, 1174 bp, Homo sapiens
ataaatcttgaatggttatttaataaattattagatgggtgatgtgtttcaaaagatacttgctattttttgaagaaataaggatttccagtcattaaacaaaactaaacaatcttattagatgggtgatgtgtttcaaaggatacttgctattttttgaagaaataaggatttccagtcattaaacaaaactaaacaatcaaatgttctatattaggaatctcaagtatggctttttttaaaaaacctttttaacatcttgatgtcaaggattataagtatggcttttcagaattgttttgtttgtcattattcttgcctttaaaattttaactcatcaaagtgaagattagaaataaattttagaaaatgtagaatagtattgattctgttcctgtaatagaatctcagtggagtttttttgcaaaactaatatggatttcatctgattttattatttcttaaattttagattttattgagtaccatttatatgattgtacaagcattcactctttactagcattttttgtttttcagacaagctgaagtggttttattaagatttggtaatatttaaatagcaaccttctctgcctttttttttttttaatatagaattttgaccattttgactttttaaatgcctggcatctttaccaaccaagtaaactggaagatctgttactggtagaacaggttgaggagacagtaggaatttgtaaaaagtcatttgatttataatcaacactacaaatactatgtgttatttataaaatcataaagaacacttttgtcagactccaaaatttgtatatacttccaggccataagagttgatagtattatttatgactttgtagattaagttatttatgtatgaaacaaagcaggaaaatatattgagaagggatcgtgtttacagaggacttctttaaagtgtcacatttttaaaatgtaaacatatttttaatgcatacttaagtaatatttaagaaactaaacaaaataatgatacaattgcagtgttgtgcttgttgtcaatgacaaaaataaaaccattttggtggtattggcctgtacttttgttttaatatatgcttttgttaattcaacttgtgtttctataggacaaaagatacagaacataaaatttaccattttaacctttttt

SEQ ID NO: 1660 - DNA, 1153 bp, Homo sapiens
cctgactgctcccattcaccaggggcgagcgggcaggcaagtcaggagctgggaaaagaaacctctccattcagacaggaggaaaggccagggaccacaaagagcgtacctaccggtgcgtacaaaacgaagcccccagtaccgactccagggagctccgggggccaggccagcttccacgacaggcatagactctttaactccccgcttccgcgctgtcttgggccaaccagggcacggggcttgtgagcgactagccaatcgtgtcgtcccgccatccgcgaaccagccaatcgcacggaggccgcgtaggaaattcgaatggcaactcctcgctccacgttccgcgcagaggaacgtggctccaaattcaaatcaacgcagcctcacgccggcggcgagcgcgaggggcggagcctgcccggcgtgggccgagacgcgctgtgtgattgcctcggagagaggaaggcgctccagttccgggtcaggcccttctcccgcctccctcggccttagccatggcgagtagcagcggtgctggggcggcggcggcggccgcggcggcgaatctgaatgcggtgcgggagaccatggacggtgagtttccgttgcgctccctttaccttgcgtgccttcccagagccaaggcccccaggcgggaatgagcctggggaggacttcaggtccccttagtgccccaaacggcatcttccaagatctttggtagggacctgccagggccgcagggctgatggccctatcccttgagagttgtctccgccgctgcgtagtttgtcgcgcgcgctaggcgttgcggcccctagtcagccggttgcgcaccgcgtccctctcgcgcgaatgccgcgccccctctatcccgcatcccaggtccgccctacccgcccgatctcctgcggtgacagcgtcacgcccaccccacccagtacacccgttccctcctgcgtgccgcgtcccacccgattcccgcccggggcgcttcgggggtccccaaggttgggatcccggcggggacaggggccaggtgtttggtcaccgctatgcctcctgttcttcgcacttaagtaggcacctttaatatccggcgaatgaacaagttcccctttggtcataattatcctagtttcctcttgaa

SEQ ID NO: 1661 - DNA, 1226 bp, Homo sapiens
aaaaccaaacccctcatgttctcacttataagtgggagctaaatgatgagagcatgtggacatatagaggggaacagcacacactggggcctggtggagggtgagaggagggagatcaggaaaaataactgatggattctagacttaatacctggatgattaaataatctgtacaacaaaccccagtgacacaagttacctgtgtaacctgcatttgtacccctgaacttaaaataaaagttaaagaaaaaattctgagacaaaataattttaaattgtaaaaaaaaatatgtcttaccaatttactgatggaaggcaaggattctttcctgtaatggaataaagaagtggtcctagaaagctaactgctgagtccttggcaagtatatgctttgtgcttggacccaaaattttatattaaatcttgtagctgagaagtttatataacagtaattgcagattgtatcaaagtgaaaaaaaaattcatttggaaaaaatgttatattgtcagtgttttatttcagagttaatatttttgactgtttagaactgtgaactatcctcatctattttacagtaaaagttgattctaaaattattgccatgataaacttgttataattgaagagaaaaactttggacaatttttagatgtatgttgaattaaatacttcttaatttgtattaagggacaaagtttatcaaatttatattgttaaaagcaatttaatatcaatgtaagtcttttgaaataaagtatcattgcattcaaactttgaatggaaaagagggaggtaagcctaacagctaactgctgaatttcagaatactgcctaaatgttactaaatgttacaagataccactagtattaattataaagtgagcttaacatttgccagttttcaatgaagggagattatttatttgaaaggttattttttaaaatgttcaataagcttaagtaatagcatggttatttttcttctttatctttgtatagaatagataaagatgtggaagacaaaagacaaaaagccattgaagaggtaacttaaactgttactgatcattaaatcagttaaggatcaattctgcatgtacatcacttcttttaggaagactttcttcaattccttcactgtcctatctcccctccaagcccttcacagtcccatctatataaagcacccttctgtactgtcctaagaccaataatttccagcta

SEQ ID NO: 1662 - DNA, 1148 bp, Homo sapiens
tgttcagtgtcattggtcagtcctttctgttgtcttaagaaaatgcgaagaaagtgtcataaggaaatatgaacttcttttcatctatcttaaatgaactataatgttcaaggtgactcatagtctctatgactgattttaactctcaaactccagtttcattgccatattcttgtcataactaattatatctttttcagtaaattcatgaagataataattgagattattcactctttaaagcctttatctgctaaataaggcagtcttgtttctttaaaattcagataaagaaggaatttcttttctttttttttttaactgtggttacacactttatttttaacttgaaataaattaatgcaactgtgcatttaaaaccttgagcctcccttagctaagtcagctctaacaaggtagtcgaatgagccttctgggttgcttgaagttttgttataaatttcatataaaagatgagtattcagactacttaaaaatagtcaatgtattgtaaatggtaaaaaaaaaaaaagcaaaatatttgaggtgaagcattttctataaacagtgcaggggctgttggttctgatcatagatatattttcaagattatatttttccccaatcagcattatactcatgaaaacttacatactgttgaaaatttaacattctttcaccatcagcaattttgcaaaataacattattttcatagacatcatcatcaaaacccttaatggatgtcgttttatgaagttagaagatagatgtagagacagttatgtctttccattgacattgcatgtctatgctaaatttgctcttctcctctcaaattttatttgccatagtagcttctgacttctatactgacataaatatatataaatagagattttgccttaatcttctttggattattgcccttgggtatattcacatttctatgcagtgtttttgagctgtagaaatgtgtctgagagctatgtaaaacatttttctgtttaaattcaggtataataaaatgtatgaattcagcaagaataagtgaaattgtatacataatacttagcatagtacacaatatgtcaagtaatcaaaaagtaactgccattgcatttgttgttaatctgcatttctcctgagt

SEQ ID NO: 1663 - DNA, 1167 bp, Homo sapiens
ccccagagtcacgtaatttacccatgtagcaaacctgcacatggaccccttcaacctaaaataaaaattgaaaaagaaaaagaaaaaggtgttgcaggaggaatgagcagagggagtactgtgctcagccaggagaggcccagcattgctcagtggctatgctcctgacggattctgatgatcgatgtagaccttcggagatcactgatacctagccacttaatctcgttcctcacagccagagaatatacgtaagtaaattgcagaagtgttggactcaggagaggccagttagttttggggcacctctcttacagagctctttgggtggaaagaagaagtggtgaaatgacctatgcttctgtttcatcatgacagggaaatctggaaggggaattcagtctagtgaatttacttaaatattagctgcagaaactaagttacagggaaagcggctttgtgacatttttaagtgtagaagatcagatgagaatgtgaattctacagaaacttgggtagtctgggttactgctaaggaatgcctctcactgtgttcttctctgcagatggattggacaggaacgagctgctgccactgtcccccctctctccaaccatggaggaggaaccgctggttgtattcctgtctggggaggatgacccagaaaagattgaagaaagaaagaaatcaaaagaactgaggagcttgtggagaaaagctatacaccaacaaatcttgttacttcgaatggaaaaagaaaaccagaaacttgaaggttagccattttaacagactaaatgctatgatgctatgattgaagggtgtatgttaaacctacctttctctccccatacatactatccgcactcagttttggactgtatgcacactttaagaagaatacctactgattataattgttgatttccattttgtgaggtggttataacatgggaaaggtcagcttaagatatttgtggttttgttttaaatgggtttgcattttaaatagatttaagacttaagaaactcttagagtatatttaggtaaaatagaatgtagataatatggaatcaatgtatttgatgtgtctgaaagttcattatcttagtgtcacttctaaaaaatccttaaatatgagaaagcaaattttcttttctttgaa

SEQ ID NO: 1664 - DNA, 1177 bp, Homo sapiens
ggtaaatgtaaattgtctcaaaactttcaactagaatcagggttttaattttttcccccaggttcctgatgttattagcagcataaggcaattatctaaagcggccatgaaagaggatgccaaacccagcaaagataatgaggacgccttttacaactctcagaagttcgaagtcctgtactgtggaaaggtgaccgtgacccacaagaaggccccctcaagcctcatcgatgactgcatggagaagttcagcctgcacgaacagcagcgcctgaagatccaaggggagcagcgcggtccggacccaggagaggacctggctgacttggaggtggtggtgcccgggtcccccggagactgcctgccggaggaggctgacggcaccgacacccaccttggcttacctgccggggccagccagcctgccctgaccagctctcgggtctgcttccctgagcggattttggaagattctggctttgatgagcagcaggagtttcggtctcggtgcagcagtgtcaccggcgtgcaacggagagttcacgagggcagccagaaatcccagccgcgacggagacacgcgagcgcacccagtcacgtccagccctcggactcggagaagaacaggaccatgctcttccaggtacacctgatcggacgctgtctgcccttgccccaaaaggtgccagatggaagtagctgggcatccagttcctcccagctccacctctatataacgaataatctaacttttatttgttttccccttcaaagcagataaggcaggtggaggaagagtgcagaggaaagtagggaaggggggagaggcagacgtggagtgtggagtataagaattaagggagtagggaaggaagaggaggaggaagcaattcgtagaacgtcctggacacctggtagagagaataagaatctataaccagcatttgccttggggtgattctcaaataaatgcttaaaaaaaaattgtaggcccggcgcgggggctcacgcctgtaattccggcaccttgggaggccaaggtacgcggattacttgaggtcaggagttccagatcagcctggccaacatggcaaaaccccgtctctattaaaaaacaaaaattagccggatgtggtgggggcgtgcctgtaatcccagctaatcaggtgctgaggcg

SEQ ID NO: 1665 - DNA, 1148 bp, Homo sapiens
tcatttttggtaaataggataaactatgttgattttctgataaaatatttatttactataacttaaatgcctctccttaaaaaccaagtgctggaaatgagtttaacatatcaaccaagccaacttatatgtatttgatgaagtccaggcttattaaattcaattccaaagaaatggagtttgaaaaaagaggttttatttcacatgttatgaatgttaaatgtttgttatgtgctataaataaattgctatctcttctcaccctattcatagaaaatctgctttactaccattctgcccccctagttttactgaagtataattgacaaaaattgaacatatttagagtgtgcattgtgatgttttgatatgtgctgctttactgcattcctactgaatgtcagttacatttgtattttatccctttataggtattagatacagagtacatatttgttgatcatttcccttttaacactatgtatagtatactagttttcttttaccaactaatgttccattgttttttttttctttctttcttttaccagtttcttaaacaattaggtctacatcctaactggcaattcgttgatgtatatggaatggatcctgaactccttagcatggtaccaagaccagtctgtgcagtcttacttctctttcctattacagaaaaggtaattgttatgtaaaatagaaagtttctggtaaatacaatttttgttttattctgtcttattttttgaggcagtatctcgctctgttgcctaggctggagtgcagaggtgtaatcatggcttactgcagtctcaacctcccaggctcaagcgatcctcccaccttagcctttcgagtagctgggaccacaggcatgttccaccacacctagctgatgcttgtgttttatttttgtagagacagggcctcaccgtgttgcctggtctggtctccaactcgggctcaagtgatcctcccgcatcggtctcccaaagtgctgggcttataggcatgagccactgttcccagcccaatttctttttcttctttttttaatttacaaagtttttgataaatacaatctttaagaacaaatgatccccttcttgcataaaattaggcaatctagtcagtaaagaaatcttaaa

SEQ ID NO: 1666 - DNA, 1223 bp, Homo sapiens
gtagctatttcatcagtgtaataaaggccacataaactaggctatatatataatataggttatatttaattcagatgatagtgattttaccacttcatataactgttctgaaatggtttttaaaatttattgcttttggaatcaatttttcttttgaaatcttttgaccttttaataacattattaaatagattgtaagttctttgaaattaggcgtataatctacaaattatttggttagaacaatgccttatgtagaatttgtgcctgataaattaattggtttgattatgttgttatgcattccaatatactttgagaattttaaattgtttttttctttaaaaaaaaactggagacttcataaaacatctttattatacataaaaataaacatgaaaatcagtactcttactaatgagaggtagataaacattaatattttttagggagtgtatatatatatacacaattttttaaacaagaatttgatcatactgtaatactgttttataacttgcttttttcacttatcagaaacgtattacataccagtaagtatatatttgatattatttaatggctgcatagctttccattatgtagtattgtatttcaccaataaattattgttagaaatttaatagtttttcttctttttcactattttaataaatactgcaaggtacatcattgtagctaaatctttgtaaatatccttaattatatataattatgtacaattatatgtaaatatataaactcctagaagagaagttgctggataaaatagtttgcatgtttttaaggcttggatatttatttattgccaaattgctatttataaagattgtactttcacctgtaatttactattgtgcccatttctctggatgtttgcaaatagtgggtactataagagtggtttttttttagttcaggaaactaaattctgtagcttctgataaatgcatgagttgtgctccacatttctcaattgctgactgaaactgcatgattaaacataaatacagccagagctgcagaggagcatggaacctggagaaacagatgagataagcttctttagtctctatctgtgaaatgcttactttattctagtctcaattgaataaagtgttaagtgttagttctaacaactgaataagttaaatggcccctacttagagcctggaaattacaaataatcagatattcaattt

SEQ ID NO: 1667 - DNA, 1158 bp, Homo sapiens
ttttaagaacacttacggccaggcgtagtggctcacggctataatcccagcactttgggaggccgaggcgggtggatcacctgaggtcaggagttcgagaccagcctgaccaatatggtgaaaccccatctctactaaaaatatagaaattagctgggtgtggtggtatgtgactgtagtcccagctactagggaggctgagataggagatttgcttgaacccggaaggcagaggttgcagtgggccgagattgcaccactgcactccagcctgggtgacagagggcaagactctgtctcaaaaaacaaacaaacaaacaaaaacttactgtatcttatacttttgtacaaagcaaattagggcacccatgttcacttttctggtgttctttatttctcatttggaaaaggaagtttgcagtgtaaaattagtatgaattagaaaaatatgaaatgtttatcatttgtaagtaaaacacttttacactgaaaaatcatacttttttttttcctccataggatgccatagaagtttgcaagaagtttatggagcgcgaccctgatgaactaagatttaatgcgattgctctttctgcagcatagcttgtcaataatggaaacaccaaaaactgtattatttgcaactaaattttctctgccatacactaactcaaaaattttgatattttcattaacttgatgattaaactttatgtgagttaaactttgccttaacctgtgttttatgttatttttgctccaggttaaaggtgcaatgctttcctcctcttttcttgtgaaggatttatcttgtttgaaaactagcaatagctttcttattctttttagattttacaggaaattttgtattgggatactaggcacaatttccatctgcataacatgaatatatattatctatgttaacatgtttatttagaaaacatttgtgaagcgtctacttgtaacgagatggatgccattctgggttcagaagttaaagcatagaacgctgttgaaaaatgtgatagtcatggagcttatgttattgtgagaagagataagtaacaaacacatcaagataaataccaatgatagatgctgtgtggagaattaaaataggatttgtgttagggaatgaccgagcagctactttag

SEQ ID NO: 1668 - DNA, 1153 bp, Homo sapiens
aggatgaaggtaaataattccagtgatttgctttgcactatgactagcacatagtgaccactcaaaacatgatggctattgttattagccagggatcctgccctcaaagatagaagatcaagtaggaaaagatagtaaaattcacatccaatgcaaagtaaaataaggtaaaagcataaacaatgaggaaattcagaaaaggaagcaatctcatttacaatggcagatagaagaggacgtaatgaagaatggtgcaaagagaatggagaagaccacaaaaaacagagtggaaagaacatgttcatccttgtctgcccattgtagttggacaggggtggtgatttgactcagccattgagaccaaaccactcctagaagttggaactctagtgttctcagcattcaaaatcctgcagcaggactagaatggaggagagaaagtaattcacttacggtttaatctgagaaagcttttggaaagtttgctagttggtattatactagtattcaataaaatcatagtatttgtttctcaagaaagggagtaggatttccttcccggttctgtaaaattattcccttttggagcactgtttccaatgatcacttttgaaaatgacttcaggtatttatgaactatcctagttaatgctatatctttaatctttgagagaagattgatttttttcttaactgaaatccttctgaaccaaatattgatcatatcaaccactatgatatttttggttaataactaagtgtttctctaataaaatataatcttcttattcatttttttttttttacaacttgtacattatctctcaagtcattatgttcgtttggaccgtgcatattttagtatgctaattaactcacctaatgccattactttatcatcttattttttatatatgcctatggtgagaaattgatagacatgacataattatcagagaatgaatatatgtagaatgatacatctcacgattgttacatgggacttctttgtgattcagaaaatttttgcccaaaccatgaaagatcccctacttgctacaaagagataatgaccagattttatcaccaccaatttgacccagcatctgcatcttctatgtaccttctcattgttcctgttctgtccatcttc

SEQ ID NO: 1669 - DNA, 1244 bp, Homo sapiens
gcgcggtgactgtccctccaaggagctgtcttccgaagccgccaagtctcgggcgggtcctcttcggaagagggagaaagttgggcgggaccacggggcggggctggtgggtggggagcgggtgggagtccgggcgcccccagcgctcgcgagccggggtggagccagcagccccgcgtggcgtccgcgtttaagatgcaaatcgagtccccgctccccacctcccctcgcccggtaagcgaggctccgccgccgcccacgcctcctgcgcgccacggcaccagagcaggcggctctacttaagcagcgcgcgggccgcgacccggcactcgcctggagcgcgcgggcaaggcgggcggagcgcactggaactcaagggggcgcacagcggcgcgctcgcaccgctcggctccgcgcggctctaggaggtggcggcggtggcggtggcggcggtggcggcggcggcggcggcggggcgcagggctgagcgagcgtccgggttccggggctccggggaaggcggttgcagctcctgagtgcagcgcggcttcctgccactgtcccggcccggccacctctctgtcatggctctggcggacagcacacgtggattacccaacgggggcggcggcgggggcggcagtggctcctcgtcgtcctccgcggagccaccgctcttccccgacatcgtggagctgaacgtggggggccaggtgtacgtgacccggcgctgcacggtggtgtcggtgcccgactcgctgctctggcgcatgttcacgcagcagcagccgcaggagctggcccgggacagcaaaggccgcttctttctggaccgggacggcttcctcttccgctacatcctggattacctgcgggacttgcagctcgtgctgcccgactacttccccgagcgcagccggctgcagcgcgaggccgagtacttcgagctgccagagctcgtgcgccgcctcggggcgccccagcagcccggcccggggccgccgccctcgcggcgcggggtgcacaaggagggctcgctgggtgacgagctgctgccgcttggctactcggagcccgaacagcaggagggcgcctctgccggggcgccgtcgcccacgctggagctggctagccgcagtccgtccgggggcgcggcgggcccgctgctcacgccgtcccagtcgctggacggcagccggcgctcgggctacatcaccatcggctaccgcggctcctacaccatc

SEQ ID NO: 1670 - DNA, 1196 bp, Homo sapiens
attgagtagttatttttgacatacttagtgatatcttggtattttttcttataagtttaataagctgcttatatgctattagcaattagacttgatcatttgatagaatctttagtttgtaaatgttttctttcattacctaattcatagttttatatggttctatcttactctgtttttattaggattaggttttgaacttcaaaaaatgtcctttggcctccgtcacagtggtcctgtaattacctaacctataagtttagtgttagtaataactttttaaaaatatggcactgtctgtgcattactggaatgccctaaccttagtgatggtgtattttttaaatgacagagttaactgagttttatttctttttaatagatgggatttagaattggtttcattttcttgtagacaaaattagtaatagattttaaatgtttgttacttcccttctaattcaactatgcacattttaaattatatagttttgtggtaagggaactgtgacaaacttttgtgggacatgtacttgattgaatttttcaacagataaacttttacaaaaacttgcaaataattttttttttctttcaaggtatcctttgtgtggctgatcagtgtcacggcttaagagaactagccctgaactaccacttattgagtgatgagttgttacttgcattgtcttctgaaaaacatgttcgattagaacatttgcgcattgatgtagtcagtgagaatcctggacagacacacttccatactattcagaagagtagctgggatgctttcatcagacattcacccaaagtgaacttagtgatgtatttttttttatatgaagaagaatttgaccccttctttcgctatgaaatacctgccacccatctgtactttgggagatcagtaagcaaagatgtgcttggccgtgtgggaatgacatgccctagactggttgaactagtagtgtgtgcaaatggattacggccacttgatgaagagttaattcgcattgcagaacgttgcaaaaatttgtcagctattggactaggggaatgtgaagtctcatgtagtgcctttgttgagtttgtgaagatgtgtggtggccgcctatctcaattatccattatggaagaagtactaattcctgaccaaaagtatagtttggagcagattcactgggaagtgtcca

SEQ ID NO: 1671 - DNA, 1176 bp, Homo sapiens
catctttccattaataacattaatgatgaatcccaggttgtgatacacgtgaacattttgagtaaatacttagtttttattgcataccatagacactgtatttacatctattatgtgatccactaccaaatacataattattttttaaagactataaattgatttactccattagtttatacagtcactttggaataaatcagtgtaaaagccaacattaaatatgtctcttatcataatgaaagctaggtcttgtcttgacaattgcccttatactttttcagagagacttagaaaaggccaagttggaggtgagggtggagggtggatgattgaaagaatattctttaagttataatgcaataaactagtaatgatacttctataaaatgaatatgtgtacagagaaatataaatatatacatgagtaatcttgaagtctgggtatttggggaaaaaagtaaaaaaataataaaatattcatgagtaaacggtgtttcttttctaaggtggacagcagcaaggaatcagctgaagcagcttgtgatatactatcgcaacttgtgaattgctctttaaaaacacttggacttatttcaactgctcgaccaagctttatggatttaccaaaggtatctgctgtttttgttttattatctattactgagaaattcagtgaaagtctaatcttttttttttgtattgacagtgtgagtataaggaaagttatatatatacataatggaaaaccagttactatttaggatgaaaataaatagtatttttttaagcttttttttttttttttttaaatcaccatacttctaaattggtatggttaaagaaatttacagaggcgtctataggaagtattaaaagaaattcagtaagtaaaatagagtcaagcatattagaaaaaaagggacacatagatactcattttggggcttccagagcaggttggtgaagttagaatcaaagaaaagtagagtgccaatattgagagcaggtatagcttctaaaatcttttggcaaatgttctggaaagatttaatcatgaccaaagttagtctcagcacagtttagattaatttacagacttaaagacatcctttctttgggtgaaaagttaacatatattcttatatatattctaacatgatcctgcatataatc

SEQ ID NO: 1672 - DNA, 1128 bp, Homo sapiens
ggctggaatagttatgatagtatatgataagaccaggtgcaatggctcatgcctgtaatcccagcactttaggaggctgaggtaagtggattgctagagcataggagttgaagacaagtctggccaacatggtgaaatcctgtgtctacaaaaaatacaaaaattagccaggcatggtggcacactcctgtagtcccagctacttggaggctgaggtggaaggattgctcaaaccctggaggcagaggttgctttgattgtgccagtgcaatccatggtgaaaccctgtctctgcaaaaaatacaaaaattagccaagcatggtggcacacacctgtagtcccagcttcttggaggctgaggtgggaggattgctcaaaccctagaggcggaggttgctgtgattgtgccactgcaaccagcttgggcaacagagcaagaccctatctcaaaaaaaaattaactaattaaattaaatttattatagttgttaattgattatttttgttgctttttgtttttaggatgaaaagggaaaaaaatatgctggcctgcatgattttactagtaaaaaaaaaatcccaacttttttctggttttaattttaaaattgcagagattactctttagtttttaaaaatcacaaaatagtgattggagaggaatgtcaaatcacttaagtcagcctcactactatactatgcagacgtttttatgtaatgcatggtagaattacttattactcagctcacaggacaacttgaatgtgtagatcacagaatgaattcaggaatgaacatcacaaattacacaacattgatgcattttaggtggaaagcaaggtaatgaggaagatagttgagaaactgtgaaaaaaagatgggcagtacaccttgaacctggctgctgtcaggcaagtagagggccatttctacccctgcttttacagagacactgctttttccaggcttgcaggatggcagagtaaggtggagctccttcagagagaatgagcctgctcaggacttcaaattatgcacaacctacattcgtgttcttggtgattttaaattagccatagttaaaatttcaagtttcctggttttaaaaagtatttttatactgtatt

SEQ ID NO: 1673 - DNA, 1504 bp, Homo sapiens
gaagcgggaccgcgaggccggcgcgcggcgctctgcgcggtcagagggagcgcctggcagcagcaggagcagcagcagcagcccgcggcggggccgccgccagccgccgcgaccgccgcggctgcagcctccgaagggaggccgggtgagccggcgtacgcactttcccgcggactttcggagtgtttgtggatatacatgccaagccgccacgatgatgtccatgaacagcaagcagcctcactttgccatgcatcccaccctccctgagcacaagtacccgtcgctgcactccagctccgaggccatccggcgggcctgcctgcccacgccgccggtaagcgccccacgcccgcggccccggcccgcgcgcccgcccctccccgtctccgaaacgctgcatgtcgggggctggtgtgtgcaggtcccggtgcggggaactgcgggcagggggtgtagagcagtcccgcagcgaggcacgttttgtccggcggcccttaatgtcgtgttcctgtctgcctctgcctccgcgtcaggcgcctgcgatcggagtagggagcgctggggccaggactctcgacttccctctactttctctgttaatttcacgcctcagaaaggcagtctctgtgcgtgctcgggtgtgtgacacgggtccccagctgcgagttacatttccatttcttcttttccctctttttcgtctcccacgcccgtttccggaatgtgttcttgtgtccccctttctccctacttctgtccccctctccacgctcccatcccttctcgtctgccccctccctggtcgtcaatgtgccccctctccgtctttcccgctctccactgcccccaaacccgttgttattttggttgctttgtgtttgcccttcgcatgctgtgctttccggcctgtgtgtgtgtttcttctgttgttttgttttgctcttttggttttgtggtttttttggtttggtttgtgtcgcctgcagctgcagagcaacctcttcgccagcctggacgagacgctgctggcgcgggccgaggcgctggcggccgtggacatcgccgtgtcccagggcaagagccatcctttcaagccggacgccacgtaccacacgatgaacagcgtgccgtgcacgtccacttccacggtgcctctggcgcaccaccaccaccaccaccaccaccaccaggcgctcgaacccggcgatctgctggaccacatctcctcgccgtcgctcgcgctcatggccggcgcgggcggcgcgggcgcggcggccggcggcggcggcgcccacgacggcccggggggcggtggcggcccgggcggcggcggcggcccgggcggcggccccgggggaggcggcggtggcggcccggggggcggcggcggcggcccgggcggcgggctcctgggcggctccgcgcaccctcacccgcatatgcacagcctgggccacctgtcgcaccccgcggcggcggccgccatgaacatgccgtccgg

SEQ ID NO: 1674 - DNA, 1183 bp, Homo sapiens
ataagacacttgagtttaagcttttcccagggtggaaattattttacctgtccctttttatttatgtttagtgatggcctagtttttctgcagggccatgatggagaaatagcactctagccttagtccaatattgatttactttctttttttaggttttatgtatatgtttgcattttttagcattgtgttttgtccagttttgtgaaaatgttctgctagtatgaaagaaaacattttctatatgaagacatttgttttatgttaggtagcttacattttctcctctgcgtgtgtgtgtatgtgtgtaaaatcagaaatttagcatactatggaaagaaggcatggagcacttgggtttagaggaacctaaaacatcatagcttcattgttccagatgtaacaggtttgaaagagctcatcgccaagttcttgatccacttgcattccaggggagttttcttttgagtagtatgtttcttgtttgcatgttcctgttctttgtggaaactatgcatggtagcatttttgcttgctgtgttttccatacttaagaaaaagaggtttcagttggctgatagaatatcttttatgtaggacaaaacttttctgtgaagagtgttgagggggtgaagataggtaagaggtaagcacaatttttaatttaggctctgaaaaagtgtattgttctaaacgtatttggtatgcctatataggtctttaaaaatgggtatgtatgctgtttaatgtgcactgaacattttacattaatattgtactgttttacattaatactgcatgcttttctatgtgaattgaataaagaatgtcataagcactgtgttccttgatgtcgatgatgattctttgtctcgtatattgaattagcctataaagaccaggaaaaactacttttttttttttttgagacggagtctcaatcttgtcgcctaggctggagtgcagtggcgcgatctctgctcactgcaacctctgcctctcaggttcaagcaattctcctgcctcagcctcctgagtagctgggattacaggcacctgccaccacacccagctaatctttgtactttactaatagagacagggtttcgccatgttggccaggttggtctcgaactcctgacctcaggtgattctccttccttggcttcccaaagtgctggga

SEQ ID NO: 1675 - DNA, 1290 bp, Homo sapiens
gggagtatgatgcagagaggttttggtaaaatcattttagcccaaagctttgtgtaattttcctgcaactttgattttgatttctttctcaaatagacttttttaatgtttagaaaagttggaggtcaatttatgatgtgattcaagttttagatttatttgctattttcaaagttttttttaatagtcttctctttttccagcagagagagatcatcattgcctgaatttagctttgtgactgcaagagcaagaccagttcctgtctggagacgactgttacaataatatcatcctattattttatgttcactctttatcaatttgaacagatgtttacatgtactataattagcattttatctctacagttctctaagagtacatctgagtccaaagtgtatctgaatgtgtgctctgaccttattcttaaatgttttctccccatactttatagccatttattttttaaacaccttaagaaggaacgaaaaagttctcttggatgacgtatattcaagtctgagccaaattgaggattgtgtctaggaaatctgtaaagccatactactgtgttcattagcatgagcaatttaaaatgaaaatgaattaaaaagttaaacatgagtttggttttaattttggggggatcttaagatatatttctgggagtaggatagccactgaaaataattttgaatagatgataaagtacttttttatgtactgtaatagcttgtgcatttcttctgaatatactttctgatgttgccaaggtcatttacccaaatatttttttaaaaattcttagcccttcaaaaccaacaaagaaaataattttcttccaagtgacaaatgatgatctgtggattataaatattttaaaaattatatgtcttaacataattttttcacatttttttgactttcaatcaagacatcgaagacgacctttaaagcaagaggaaatagtgttgtgtgcctaacattggtaaagactagtttttaaccattttaagaagtgtatgtccaaattatttataagcagtatgacttaatatggcttagaattacttataaagaatctgattaaatctcatcctaaatatgtagccacaatatcttttttataatgggactataagaaatgtttgcacttagtttctgagtattccttcatagattctcaggaggcatttaaaaagttggaagctatacttggtagtaactatattagaaaagtccaattgacactgatttttattcacccttgttttatttttatccagc

SEQ ID NO: 1676 - DNA, 1223 bp, Homo sapiens
tcctggtatgctgcctttcccagcacagcctcctgttgttgaaggaccacctcctcctggactccccccacctccaccaattcttacacccccacctgtgaatctcaggcccccagtaccaccgccaggtccattgccacccagtctcccacctgttacaggtaagtaaatctgtttgtttccctgtatttatctagccattcttagtctatttttaaaacttaatagattcttaaattaaaagtatctaaaggaatcccaaaaatgcctgatagaaattaatagcagtatacttccatttggaatacacctccactttgtagcctgtgccaagccagttactatggtttggagtgaccctgtgaattaagtatatcactggtaaaacccagctgcctgcaggccttcatagcttaaggcaaacctgctttggaatgtattaaaaggatattttaccctggatatctaattcagttgtaagggcttggtgtttgtagatattatagtttgataaatgagaagattatgttcggatgtgcaataacttgttttatttgtttgctttcagatgatatttcttattctttggttttgacaggaccaccacctccacttcctcctttgcagccatctggcatggatgctcctccaaactctgcaaccagttctgttcctactgtagtaacaactggcattcatcaccagcctcctcctgctccaccctctctttttactgcaggtgcagttttggccctttttatattcgtaatgtaacacagttttagatgaagaattttaaaatgtctagagagaattgctctgtgaggactacttttctcactaaaattatgtagccgtggtgaatgaacattaaataagccctcagttttgaatgttttcaaaaaaacattttctttttaataacttttttaaataaagttattttctttttgatacatatagagcatgttatatgttaatatgttatattgtttactttttctcttatcaatattaaaaaattaccaagtggagttttataattgttttttaattacagtttttgtattaccagatacatatgacacagatggctacaatcctgaagccccaagcataacaaacacttccagacctatgtatagacacagagtgcatgcacaaaggcccaacttgataggactaacatcaggggatatggatttgccacccagaggtactat

SEQ ID NO: 1677 - DNA, 1270 bp, Homo sapiens
ctagtaatttttgattttattctggatcttctgaatattttgctgtggtcctttggagaatgttggttgttttgttttagcaggcaatcaactcccatagattcagattgtaagctgggtctcttatgctgtgtgcagtgattcaaatcttggctcaggtccttaggcctttactggtatcggttttggatcagtcctacatgtgcatggcttaagggttaatggtttccccttactttctagtttgcatgggctccattccatgcttcctctggctagaatagggtttctagtggagttttagcatcctatgcctctgttcctctccattactgtggctttaccttagaataaagctgcaaaaagaaaaggaaacttacctggtgcaggttacttttacaagtttcagcttcctgctacatccctgcctgtcttttttaatattcagaatgcccaggtagttgtgtttttttatttttttaaattctttttgtatttttgtcctaagttcatagttgctctccgttgggaaggttggactgtagggggttactgccatgctgaaactagagccaactgtagatttctgagtttttttttttttttttctattccttgcattaactctctccctagtatttttgttttgtttttctttcatgttggaagttttctttaaatttgggtgttccttccatgcccatttaaatcctttatctgtggggggtgtgtgtgtgtgtgtgtgtgtgtgtgtgtgtgtatgtgtgtacttgttgatcttggtttcaaagttttatcatgtcttggtgaaccagccttttctgtgggggccttccaaatgtcaatgtctgcaatttagttaggaagctatggcagtagtttaggtaaaggataatagtggcttggattagggtagtggcactgaagagaagtgggtggatggattcaaagatgtgtgtgtatgcgtgtgtttgagtgtgtgcattcaaatcagcattacaaatactcataaaggtgaatttgtgctgagagggaggggcagggtagattactacctgtgaatttttattggaggcatcttaaaatagaaagagcttgaatttagagacagtaaaacctaggtgtgaatctttttgtcttgttcattttagttcccattgcagacaaatgaagtaatgaaattcaagtttttacatttttactaggaaatgctagtcatgttgttttctttaaaaacctcagtatggcagtgtttttaaattttctagtg

SEQ ID NO: 1678 - DNA, 1230 bp, Homo sapiens
tcgcccaggctggagtgcagtgatgtgatctcagctcactgttatgttaggttttatcaataattcttatagcaaacccattaaaataatgcatataatgcatcagattgcacttgggcataattatagacttctaaagttttgtgtctgttatctatttcagtattacagaatcgatttaatgtctgattttaatctaatcataggaagatgtatatacctttggcaaaccctcctctttccctctataattaatttcagtcaactaattgggaaatatatactcaatacataaaagaaggggtgacatttatctttatcttaacctataataattacagcattttgttaatatatttattgaatttagctgtgtctggaactatgttcaagacattctattgggtcttataagaaaagtctgttcttaatgatgttttcattgtgagggcatcttcaagatttattttaaagttctttgaatgaaaaatgaaagtccagtagatagtttgacagttattttttaaaaacaaccaatcaacaattattcatagaaatatgtacctaactctgtgtttggtacaatagggcaccaaaaatatatgacactctgatccactgattgcatgaagaaaatattacctaatgaaatttatcccatcttggacttaggtttttctcacaaagcatagaagtggatgcttaaaatatctgatattgttagacataagattagagataaaataagggagaagggcagaagctaagaggtcgtgaatgagatagggcagggatccccaacccctgggccgtggacccctaccagtccgtggcctgttaggaaccgggccacatagtaagagatgagcggcaggtgagcaagtgaagcttcatctgtgtttacagctgctccccatcacctgagctccacctcctgtcagattagtggtggtatttgattctcataggagtgcgaatcctattgtaaactctgcatacgagggatctcggttgccctctgttacgagaatctaaagcccaatgatctgtcactgtctcccatcacccccagatgggactgtctagttgcaggaaaacaagctcagggctcccactgattctacattatggtgagttgtataattatttcattatatattacagtgcaataataatagaaataaagtatacaataaatgtaatgcacttaaatcatcctgaaaccatccc

SEQ ID NO: 1679 - DNA, 1178 bp, Homo sapiens
gtaatcccagcactttgggaggccgaggcgggcggatcacgaggtcaggagatcgagaccacggtgaaaccccgtctctactaaaaatacaaaaaattagctgggcgcagtggcaggcgcctgtagtcccagctactcgggaggctgaggcaggagaatggcgtgaacccggaaggcggagcttgcagtgagcggagatcgcgccacagcactcccgcctgggcgacagaacgagactccgtctcaaaaaaaaaaaaaaaaaaaaaaaaaaagaatattgttttaaatgagaacacatggacacagggaggggaacattacacatacggggcttgtcggtgggtggggggcaaggggagggagagcattaggacaaatacataatgcatgcagggcttaaaacctagatgacaggttgacaggtgcagcaaaccaccatggcacatgtatacctatgtaacaaacctgcacgttctgcgcatgtatcctagaacttaaagtaaaaaatatatatatattgttttagtaagttagcatgagttttcatttcaagaagcttgtcttgtcatttttactatctaaattttgtggaagtctggagctgtgttcacatgaaaatctggtaaaagggaatgggccttccttaagtactgaagactccaaactgtgtaaaaccccaccaaaaaaatatgattgtatgaaaaggactctaggatacaatatcttaaaataggaaggagaaagatttgggttatgttcatgtatcaatgactgttgtattgttttcttctctttttgaagtgatttgtgtgactttattgaaatgggcacattttataaactttaatttgtaggcatcagagaccccaactctacaaggcctttcctttactgtcagacctggcgaattgttagctgtggtcggccccgtgggagcagggaaggtgagttagaatggcttttggcagcttgttgcaaccccacttatcatattaacttcgtgggtttgagcccaaggctacgtgtaacacaattttgaactgggtacacttggcacggcatttctcagtgcatggaacattcgttttgcaagaagggtcacatgaccaaataaatgtggacaatgcatatcatgtttcccttggttcttcaagttgagcaattgggaactcctagaa

SEQ ID NO: 1680 - DNA, 1172 bp, Homo sapiens
ggcaagatggatcaggaagtacccgaatccgaaaagtgtggccatttggggactctgtgagaggagcatccctgtccaccccgggtcattgacactgggtaagagccatattgttgtgaggaatttgcatcgtgaaggtgatgaactgcggtttgcatcttttgttttatttatttatttttttaatttttgagaaggagtctcactgtcaccctggctggagtggcgcaatcttggctcactgcaacccctgcctctcgggttcaagcgattctcctgcctcagcctccccagtagctgggattgcaggggtgtgcgccaccatgcccagctaatttttgtatttttagtagagacggggtttcaccatgttggccaggctggtctcgaactcctgatctaaggtgatccgccctccctggcctcccaaagtgctaggattacaggcatgagccaccgtgcccagccgcatcttctgttttaaaaggactattagagaggggggaaagacatctgttaaaatgaagattggattaatgcatttaatccaaaaagggatattcatctcaccagtctggaaaactcagttccatgaaaaggtcattctctccttccacctccctttgatggtgatatttatgtggccacactgattaaaataatcaagaaagaagaaacagtttatatttttcaaatgaagctagatattacatgatttatttttaagaaattgaatacaattaatgttttgttctagatagtacagttttcttgtaatctcaaatgtatttccttgcctgccttcagtagtaagcagctatcaaatggtgccctgctctgatggtgtttacttccaccattcacagtattgttcttaatggcatgcggattctagagtaaccaataattagatactcagatgttttccagtttttagtaattagatagttagatgtcttctagtttttgtatattacaaatagcattttaatggacatgattaaagctaaacatttggacagatccttcatttcctagggcgtacaaatttcaaggcttttgctatgctagattgatttcctccccaagagttgttaattacttacattttccccggtgaaatgagagagctccctacaagtccagatttgatgttatattttaataatcac

SEQ ID NO: 1681 - DNA, 1155 bp, Homo sapiens
ccccaaacgccagggagggtggcgccctggggagccggtacccaggaggtaccctcttcgggtgaacggctgtgtccactcgggctcgtccaagaggtcttctctggtcccgcagggttctgggtgcacgctgaccctgcgcgggcagacgcgccctttgctccaggtccggacctgggcgctgctatagcaacgtcctggacgcccagaccttaggccgccgccgccgcggaagcgaggaacccggccttctcccgctcctgagggctgtggcggcggcggcccgggaggcggcccaggctgggtaaagaccgcccggctcctcctatgcaagctgaggcagcggattggttttcaagcatggtaagaggcgggaggccggggcgcccccgacggggatgccgggctggggagaaccggggcttccccggacccccagctccccagcctgcccgccccccatccccgcctcccgccgcgctctctttgtgccccccgcagcccttccagaagcatgtctactacccgctcgccagcggcccagaggggcccgacgtcgctgtggccgccgccgccgcgggtgcggcctccatggcctgtgcgccccccagcgcggcttcggggcccctgcccttcttccagttcaggccgcggctggagagtgtggactggcggcggctgagcgccatcgacgtggacaaggtggcgggggctgtggacgtgctgacgctgcaggagaacatcatgaacatcaccttctgcaagctggaagacgagaagtgcccacactgccagtcgggggtggacccggtgctgctgaagctcatccgtctggcgcagttcaccatcgagtacttgctgcactcacaagagttcctcacctcgcagctgcacaccctggaggagcggctgcgcctgagccactgcgacggcgagcagagcaagaagctgctcaccaagcaggcgggggagatcaagacgctcaaggaagagtgcaaacgccggaagaagatgatctccacccagcagctgatgatcgaggccaaagccaactattaccaggtgggcagctgtgtgtgagcacgattcataatccagtaaacaactcagttcccatttgataggcctgtcccgtatcaccactctttcttctta

SEQ ID NO: 1682 - DNA, 1135 bp, Homo sapiens
acagttctggaagctggaaagttcaggaagaagataccaggtagatgcaatgtctggtgaggatcctctttctggtttaccagccgcggccttctctctgtgtccttacatggcaagagggggcaaagaagccctctggggtctcttttatcaggtcactaatcccattcatgaaggcttcacttctatgctctaatcgtacctcaaaggcctcacctccaaatccatgacattggagattagctttcaacatatggattctggggggacataaacattcagtctatagcaaacaccatactgttagactatcctaaactagtgttaatctgttttaaaattaatttgcttccactgtcttctttcaacatttccagtttagagcctcacacccccttcttacttggactcctttctgtgagctgactgttcacgtgggaaggatgctagaagccaaataccatatgccaaatgccttggatgaaacttagagggaaacactggcagtggattcaatcttaaacactttcctagtgaaagggggttcaaagtgggttcaaatttaaagtatcaggaaaatacagaaaagtaaggaaataccattccgaattccatgcctttttggtattataaaagaaatgaaatgtcagagttcctgtacatccctctaccctcacaaagattactatctatttggtattcatattcatatctttatcttaaaatatcacatatgattataaagccaaaaaaggaagcaagctagctattcatcaaaaggaaacaagttgaatatgttttcatacattcatactataaactgttatgtgactattaaaagattactattaaaatattacatatttaagcttatatgtattaagcttaaaatcaaatgtcagattaatatgtgtcataaaatttaattttgattaaaatatgtatatattggcaaatcatagaaaagcaggggttgcaatcctagttgctgacaaaacagactttaaaccaacaaaaatcaaaacagacaaagaagagcataacataatggtaaaaggttgaattaaataagaagagctaactatcccacacagatatgcacccaatataggagcacccagattcataaagcaaa

SEQ ID NO: 1683 - DNA, 1201 bp, Homo sapiens
ctctaaattttacagatgagactaaagtctcagctactgaatgagtgctcaagactatagaattgataagccaatatataattcagattcttgcttctcaaaagctagcccttttctccttgcaccttcctgttctcatggaatcagcttttcccatgggacttataagctagttagagtcttaaagcctttcccttgatatatgttgcaagaagatagcaataatttgaaccatctaaacttgtggttcatagttcaaacatgtttactatttactcatgaagttcttttgaatactagttgtccctactttgcagatgtaagctgaaaccatgcaaaatggttttaatagtcaatgtgaaaattctttctgtaacttttaaaaattttttgtgaaatcattactcttgtcaagtttgtaaatgtactaaaaataatgaaaatagtaaaattaatgtttagtatactataattgaaaacacaaacactgaggatgaaagcattttattatttgtaaaaaattaattaagagtgctttaggatatgagggtgatctggctgagacgtctgttaccctattgatcgccagggttgattcggctgacctggctggctaggcgtgtgtgctcttcttcgctcaccgctctatgtgcatccctcctgtccctccctaagtgcacgctccgtggaagaggtcgtcccccagagaagaggaccagtctttgagcaaaggtataggagtagctgcacccccatgatacactctccaaacaagctcttttgttttttaagacggagtctcactctgtcgctaggctgaagtgcaatggtacgatctcagctcactgtaacctccacctcccaggttcaagtgattctcctgcctcagcttcctgagtaattgtgactacaggcgcacactaccacatccagctaatttttgtatttttagtaggtatgggttttcaccatgttggccaggatggtctcgatctcctgacctcctgatctatccgccttggcctccctaagcgctgggattacaggtgtgagccaccacgcctggccaacaagctcttaaaagtagtttagagccatgggtggctaggagtggggacatggctgccacttaaacagcagcaggcatgaatgccagttgctgccggcttggttccagtggggacagtgtctttcacgatga

SEQ ID NO: 1684 - DNA, 1210 bp, Homo sapiens
gtgggggtggtcttgaaaaataagattcaggctgggcacagtggctcacgcctgtaatcttagcattttgggaggcccaggcgggcgcatcacaaagtcaggagatcaagacaatcctggctaacatggtgaaaccccgtctctactaaaactacaaaaaaattagccaggcgtggtggcgggcacctgtagtcccagctactcgggaggctgaggtaggagaatagcatgaagctgggaggcggagcttgcagtgagccgagatcgtgccactgcgctccagcctgggtgacagagcgagactctgtctcaaaaaaaaaaaagaaaaataagaatcaggcatgactttctaaactatggtggatcatgataaaaacatttactcttttttcttttctaagctgcagagtttttaacccctaatttcaattccacatttaaagacagcttgaattctttctcagtcttagtttaataataatatggttagaagtatgtctgtagagtatactatttcttttgtgtttcagatatattgagtacataattctgtttatgtgtttagcaatgcagttgcaggcgagagtgctctagatcgaatggcttgcggacttggtggaaagctcgttctgccgatgatcaaggaacacattatgcaaatgcttcaaaatcgtaagctgtgtccttcaaatgctagaagagtgaagttgtgccctttctaaagcttaaattctaagatatgtttagactgttaaaaattaatctttgtctttttatcatccatatttaacccaattcatttattttaccgataaaattgtcaatcccaaagaaaatgtacagatttacttcctagccaaaagtatttagatttgaatttgaaaatgatgttattatttgaatttttatggaatattagaatgtttgaatcatatactcttctttcacccaatatcttttatttttaaaagaagaaactctatctaatgttatcaaaagagaaaccacttctttctttctgtttttgcccctgacggaggtgatggtggaagcccacctgccctggagggcagctgttgttgttgacacaggatttcgccatgttgcccaggctggtctcaaactcctggcctcaagcagtcctcctgcttcagcctcccagagtgcttagattataggcatgagctaccacacctggccatccttcctt

SEQ ID NO: 1685 - DNA, 1196 bp, Homo sapiens
acttcatcccactgaaattcctttggcatttggggttttgtttttccttttttccttcttcatcctcctccttttttaaaagtcaacgagagccttcgctgactccaccgaagaggtgcgccactgggagccaccccagcgccaggcgcccgtccagggacacacacagtcttcactgtgctgcagccagatgaagtctctcagatgggtggggagggtcagctccttccagcgatcattttattttattttattacttttgtttttaattttaaccatagtgcacatattccaggaaagtgtctttaaaaacaaaaacaaaccctgaaatgtatatttgggattatgataaggcaactaaagacatgaaacctcaggtatcctgctttaagttgataactccctctgggagctggagaatcgctctggtggatgggtgtacagatttgtatataatgtcatttttacggaaaccctttcggcgtgcataaggaatcactgtgtacaaactggccaagtgcttctgtagataacgtcagtggagtaaatattcgacaggccataacttgagtctattgccttgcctttattacatgtacattttgaattctgtgaccagtgatttgggttttattttgtatttgcagggtttgtcattaataattaatgcccctctcttacagaacactcctatttgtacctcaacaaatgcaaattttccccgtttgccctacgccccttttggtacacctagaggttgatttcctttttcatcgatggtactatttcttagtgttttaaattggaacatatcttgcctcatgaagctttaaattataattttcagtttctccccatgaagcgctctcgtctgacatttgtttggaatcgtgccactgctggtctgcgccagatgtaccgtcctttccaatacgattttctgttgcaccttgtagtggattctgcatatcatctttcccacctaaaaatgtctgaatgcttacacaaataaattttataacacgcttattttgcatactccttgaaatgtgactcttcagaggacagggcacctgctgtgtatgtgtggccgtgcgtgtgtactcgtggctgtgtgtgtgtgatgagacactttggaagactccagggagaagtccccaggcctggagctgccgagtgcccaggtcagcgccctg

SEQ ID NO: 1686 - DNA, 1191 bp, Homo sapiens
gtttttagtttgttttttatttttgtagaggtggagtcttaccttgctcaggctggtcttcaccttttggcctcaagcaatcttcccaccttggctcccagagtgctcagataacaaggatgagccactggcagctggcctaaaatgccaggtttaatggggaaagggattttggagttttatctaggtgatttgcttttagttgatttaatctgtgagaggtgcagtgttttagataacctggaggtctggaatgaccatgagtacaacttggcaggttacattggagcgcctgtgttgttgctgttttagtcagaggtaattttagtaattaaagtgaaatgtcctgttttaaaggaagttctgttctgtaaagagcagtaggtattaaatgtctttgggaagtatggactctttggggggtttcctggaataatgaggacgtttgttgttattttttcacagccttgtatttcagtttttttctttaaagggagtaagttgcatatggggggcttaaatgctttattgacaagaaaaaaaactgcaccaggaccaattcatcatcatcatcagcttcctcccccttctttccttcctttttttttttttttgagactgagtcttgctccatcgcccatcacccaggctggagtgcagtggcgtgatctcggctcactgcagcctccacctcctgggttcaagcagttctcctgcctcagcctctggagtagctgagataacaggcacctgccaccacacctggctaatttttgtatttttagtagaggtgaggttttaccatgttggccaggttggtctcgaattcctgacctcagacgatccccccactttggcctcctaaagtgctgggattacaggtgtgagccactgcgccaagcctcctgttcctcctttttcttgctttttttcagcctgagcaactctctttgtacttcatcgggcattccttcagcccagcctgcagcaggatccttctcatgctgcgcctccttttcctaggctactgggcatctgcagcagtgttgtctctcccatccctcccagtctctgtgcagcatcacccacggataggccgggatgttttctttgaattttgggtgatgctcagaacagaactggaaaaaggccaaaggaggcctcttgggtgcctggaatccttgagctact

SEQ ID NO: 1687 - DNA, 1151 bp, Homo sapiens
cttgaacctgggaggtggagcttgcagtgagccgagatcatgccactgtactccagcctggaagatagagttagactgtctcaaaaaaaaaaaaaaaaaaaagtgagaaaaagaagtaggagagaaaggataagaaaattagagagctggtcaaggaggactaacctctaaataacaggagtccagagagaacagaggaagtggaagggagaaaattaaaaatgaaaaattcataaaaatgtcccacaatcaaaggacatgagtttccagtttgaaagggccactggagcatcagcacaatggttaaaaatgggcccatgccagatatatcatcatgaaatttcaaatttctagaacccaacagatgattctacaagcttctggagagaaaaacattcttacacacaagatccataacaatcagaatgccttgggcttttcaatagctgaagcattgaaagctggaacagtggagtgatactttcaaaattgccggggaacactgggcatggtggtgtatgcctgtagtcccagctattcaggaggctgatgggggaggatcgcttgagctcaggagttctgggctgtagtgtgctatgccaatcgggtgtccacgctaagttcagcatcaatatagtgacctcctgggggtgggggaccaccagattgtctaggaaagggtgaattggcccagattggaactggagcaggtcaaaactcctatgctgatcaatagtgggatcgtacttgggcatagccactgcatgccagcctgggcaacatggtgagggtccatctctttaaaaaaaattaccaggaaaaatggtctccagctggaattctatacacagtcaaatgtcaagcaaaagagaagggagaattcaaacattttcagacctgcaagaccctagaaaaagtttacctcccctattacctttctcaggaagtcactacagaaaagtaccccaccaaaaaaagggtcttctttctaagtcaagaaagaagatgatatggggtacaggaggtgacaaagtggtgagatgaaggggaccccaacatagttttttgttttgttttgttttttgttttttaacccaaaccaaaaatggtcaatacccaacatagttttagaaggatttctctgaattctg

SEQ ID NO: 1688 - DNA, 1367 bp, Homo sapiens
gagtgctgggattataggcgtgagccactgtgcccggttgggggagtttctttaagtggagaggaggcttagcttgtttaaaaggtgttgggaaaaacccagtgggaagggtgtggttgaagatacagacaggaatgagtgataggactgagttgtgaggaggtgaggatccggggcccagggcaggtatgcttctcattgctgtaggagggaagaggaggggttactcttggtcacggagcggtggttgtcaaacgctgctcctgtcccagctgcaaaaaaatcaatcacggtgttttctgaatgtacaccttcctgggtctcctccccagagggtcagattcagaagagctagcatgagtgtcagaaacctgttattttttgttttaagaaatgtgtatttttaaagtctccacatccccccaccccaggacattttaatggacaaacagattgagatggaggcaggagggcagccacaggcagggcagagagaacggagtctggtgcgctgatgagagaagatagaagatagaaggattcttggatgtgagggcgatctggctgtgacatctgtcaccccattgatcgccagagttgattcggctgatctggctggctaggcgggtgtccccttcctccctcaccgttccatgtgcgtccctcccgaagctgcgtgctcggtcgaagaggacgaccatccccgatagaggaggaccggtctttggtcaagggtatacgagtagctgcgctcccctgctagaacctccaaacaagctctcaagatagaaggattctaaagatgtgtattctggtaggttgtgtcaataaagctgattggatctgcggcgagggaggagttgaagctgactctgctttactgcctgggcagctgggtggataggtaacgttcccagtcactagagagggaatgcagagaagcaggagctcatttcaggagaagatgagttcagctttggacctgtgcagtgttgaggggtttgcagagtccggtcagaggtactcgggacacttggggaaagaaatccagagctggactggattggacatgagtaggtgagagttaggttgtgggtgtgagtgaggactccagaggtggggggacagttggaagctgaggacagaccttcagcccattccagcatgtaagggatggatagagaaagaggaggcagaaagtaggcagagctgggggcttctgtaggaggagttgcgtctcttcccctagtccagcggatggatgtgccttcttccacggaatcacgcgtcccgcagccgcttccctggctttgctcaccaccatggctatgctcaccagcctctgatccctccttgtctccagtgta

SEQ ID NO: 1689 - DNA, 1454 bp, Homo sapiens
aattgccattttacctttaatggcaaaaaccgcaattacttttgcaccaacctataacaaaacaaagttattaaagactaatattacttcctgctctttttgttacaataggaaaatagcctttattagagaggtctttcagactagcaccacatcaagattttctctttgatccgatcaggaatagtaagaactgaaaagggcagtttgaatcacggtgcgatgaaggagtagatggtgggatctcaccacgggtctgattagccctttctctgccttgcttgagcttcagcagaactcgaaatggctgacggtaaggctgggaaggactccggaaaggccaagacaaaggcggtttcccgctcgcagagagccggcttgcagttcccagagggctgtattcatcaacacctgaaatctaggacgacgggtcacagacatgtgggtgcaactgccgctgtgtacagcgcagccatcctggagtacctcaccgcagagggacttgaactggcaggaaatgcatcaaaagacttaaaggtaaagtgtatattacccctcgtcacttgcaacttgctattcgtgcagatgaagaattggattctcatcaaggctacaattgctggtggtggtgtcattccacacatccacaaatctctgattgggaagaaaggacaacagaagactgtctaatgtatgcctggattccttgttatctcaggactctaaataaaagaacagctgtccagtgttggtgatgccagtggactatatttctgtgaaaaacacaattttgtctttttgtaattctatttgggcaagttggaagtttaattagctttccaaccaaatttctgcatttgagtcttaaccatatttaagtgatactgtggcttcaaggaagctattgattctgaagtactgggctttgattgagctgactgtttttaaaaaactgtttggattttaattgtaatgcagaagttatagtaacaaacatttggctttgtacagacattatttccactgtggtggataagctcaataaaggtcatatcccccaagaaaaaaaaaaaacaaaaagaaaagaactgaaaagggagtcatgacctgacttctatttcaatgatgtttactgctgggctgacaccctgtctaaaatcatctccagtggtgcaaatgccaccgaacaagcatgacagcagtggggcctcaaacccttccccacccacagtctacaaacagccttttcaccaccatcccagttggaaagaaatttatttattcccccaaaataaaatcctagaaactctccaaaaagggtggggtgggggacaatctgcttaaggagaacaatgagggggttggaggtctgcaaaaaagtagaagagagcttggggtaacttcaaacttccaaaccagatcacagcacaggtgacggggaacggacaaggagg

SEQ ID NO: 1690 - DNA, 1198 bp, Homo sapiens
ctctacagtatgtgcttattaaacacccatttttttcttttccaaaatactttctaaaatctctataagccaaaaatttaaccctagtattctaagaggttcacctatttattaaccctataaatgatttcaaactatgcttctcagaatctccaagtgaaaaaccaaatgctaagactagggagaggcagactggggcataatttatttagaaagcaatcaatgagaaaacctcaaccttattatctaattagtcacagtactcattttataatttaacattaaagaagaatgtgcatttttaaatcttcatcaaaggtgatatagattaataagtgataagaaacactgaaagaaattgattaaattatgagttgaatttctagatgagagtcaaaagaaaatggaaaaaatctagcaatgtgtagagactgggttaaagaccagagggccatggtgtggtagtctgggtcgcccacagcatcagctgtttctgcttttcatagtctctttgttctattctcctcttaacacacagatctccaaaagcagcaaactattttgcaaagtagctcttcttggtggaagcatctgcctcctggagataggggtgaaaggctgggaggacagaagaatccatgagtgggtggctgcttcggaaatgggacaattactttattctcatttcaggagctttgacctgaattccacatttctcagcttccactagaattccatgccatgcacttaactattcttcatgcattatcctcagtgactttttaaaatgtcagagctaaaggagctgagaggtaaactaacccaagactcttaattttatagataaagagagactcagaaatgtgaggtaatggatcccatcatatatacgataagtgaagtgccaggcccttatcttctgactcttgaagctatgtttctgttagtggttcacactatttcttctctatttctgccactaaggatccactcaaagggggtttctccataggtcactcaaattccttgagtttcttcaaagctattcttaactctgagatttaacaatagggacttttctaaatacatgatataaaacctatatactgaagctcagtatatccattaaaaaactcatgtttgccgggcgcggtggctcacgcctgtaatcccagcactttgggaggccgaggcgggc

SEQ ID NO: 1691 - DNA, 1102 bp, Homo sapiens
agccagcagtgtatgatatgtacttccatccacacttgctttgtcagcctttaatattttggcaattctaaaaggtacgtagaagcatctttttgtggcttaatttgcgtttcctagatgacgaatgaaattaaacatcttttcgtgtgtttatttgccctttgggtatcttcttttataaaatgctttttcaaatgtttgaaggggggattctccctttttttattgtgaatttgaaagatttttatatattctggatataaagctctttgtcagctatacatgttgcaaatactttcctttgtgacttgagtttttgctctccatgaacagggtagcagagtaatgtgtattctttttatcatgattaataatatgcaaattgaattgaataaactttcagtccatgagaatgttttgtcatttccccacctttgtgtctctaggagctcatgggacacatgtagctagtatagctgctggacactttccagaagaacctgaacggaatggggtagctcctggtgctcaaattctttccatcaagattggtgatacaagactaagcacaatggaaacaggcacaggcctcataagagctgtgagtgtttgtgagttgttgattcagaagattaatgattaatgatcttggatatttttaggtttataagtgctcctagtttaccaagaatacattgaactatatatagtgtacaggacttttaacaaagcaaaaatatttactaatttatttttaaattatttttattaaatattattaggatttggcctaacctttgtgaaaaaattacttacttcatactcgtcatttctagcaaatctcctaacaagcaattttgagatacttaaaaagaaagacctcttagccagctttctccatcagcctaagaggaatttaaaacctcagctaacattctgtacgtcattttaacgtaggaaagtatatttaattttagtgattttttaacctaggaaggaccattccattccctctacctctgtccccctctaaccccactcttttctagaaatgctagttttttgtttttttttttaatgactacttttttatgtgtctcct

SEQ ID NO: 1692 - DNA, 1175 bp, Homo sapiens
taccccgacctgtcttcagcaagaatcctgttaggtcggtttagccagaatcctccttacccagatgttacctcatagtaattttctatccactgaccccctccctgctccttgactataagttcttacttgcccctgctgtggtagaacttgaccctgtcaacttgaaataatcgaaagaattagaacctagcttgaaagaagttatttaagctttgaaaagctgagaatatccatctgggaaacacagactccagagaaatgaggtgagcgctctgacgttaaaaattaagcttttgcttatataggcagaaaacagagaagtttagttggattgtaacattttctatacaaagctggtttatgagttacggcaatttaaatggtgacagtttgtttgctgcttgttttcattttctttccaatttaaaacagtatatttagtattgcatcttaagacaatgtgatagccataaagtctttgtgtgagaaaggtagggagaaagttaatctataatgaagatccacagtgaatagggaagaggtcttccctgaggcccttaagtcatttacatttaatagaacaatgtagggaaggaagaagtttaatctctaatcagagaaacacaggtttcagttgcctgggttatgtctgcctgcttgcctgactcaggccccataatcacattcctttaagggtcaaaataatttaaagttccaacagcttagattttgaattatatattttcacaagccccatctcccccaccacaaaacctcactgccgtggttcctccaccaaccctgatgatcctgaataacatctgcttcactgtgctgtaacgagcgtcgctgaataatgtttcctttaacagaagcgccaagaactatctttgcgattttgcaagattttcccagtttacattcatctcctgcttcagggttttctttccatttattttgacaaaactaaatgaaactggcagttaactttaactgagtaatgaaagacaacaaaaagcaaacagagctggagacagagagagaaaaagaacaccaatgaattaactgtggcagcaccttgagatttgatgttttctggcctgcaggcctggctacggggcacctagaaccctcagggctagaagttccagctgcccattgactaagctcta

SEQ ID NO: 1693 - DNA, 1129 bp, Homo sapiens
ttgctcgaagaactcgagcgacagagacaagctgagcttgccgcacaaaaagctagagaggtaacgctcggtcgtttggaaagtagagacagtccatggcaaaactttcagtgttgggttctgcctcctgctcagttcagaaagagatggaatacagactatctaattcctttctcgtctaaacttaacattgctgcgaaagttaattttttagcctattcagaagtgctgactgataacttaaaagttggaagcttttataaaacatattcaaggatactttttgatttaatggaactggctatttgagaagtgtttgaaacttttgccatggctgcaggacttacattcttttttgggaggacggtggggagacagggagtggtaaagggaaaaggttaaaaatccacctgtggttgtatattcttctattctgtcactctgttacctagactgtgagaggcttttgccttcagtcagattaaaaagagcagggcctaacattgagtgatagcacctgctttgataaataggttttctcactcttctttttttccttcttttatccctcactccctcccctaaaccctgcttcagcacaatggactaattctagcattctgatcataaggccctccattttcctaatgtgtttcaaggaatctttttaggaaaaatatccagattattcatccactttttttagtatctactaacaactcctttttttctctagagagttatgaaggaacaggttgtccttgtctggagtcaagctaaacacatgatttgttttatcagcagctggagcagaagttgaaaatgtctttctgtgagacagtaatttgctactgaagctttatggcttgtttgcactgattactccaggatccaaaaacttggtgaaagtcactgaaacactcaaggcaaattactttacagccctgagtgtctgtcaccatagtttgcataatgaatatgaatcccattggtgtgtgatgtaggaaatcctgtagttgtattttcttgaactgaaatatttgactcaaaataattaagactcattgtcatttttcatcttggcattattgtggacaagttgacatattaaatctctttgctttctggt

SEQ ID NO: 1694 - DNA, 1181 bp, Homo sapiens
caggaagaacatatctaaattttcacccacaactgagttgtggttttgcatattgcttcaacccatagctccaaacttcacctttggcgagggaggattcttttctcaaaatttaatagcagcttagactttgttcaaatcaactttctttcgtaatgttgtaagtagaaaaattaggagcaaaatacgactttcatttgctagagaagacgtggtttgtctaacagcgacaatctaaaagcaaatacttctttctcactgaatgaggaagaatgaggagctttgtgactgacaagtgaaaggatgatatatttgatgtgttccatttatatgtaaatgctaaggaacatagacaagtataccaagtaaagttttatttatttacctagaataccaaagttgcatgtaaatgcactgttatgtacgaatcataagaggttgcaaggaaggagatggatagatggtttgaaaggaggtagatacatagaaccaacaatgctacatttatatgagtagtagatgataaatatcaagtatctctcccatgcttttggtttgaagttagccagtattctccaccagtaaatcagaatgtgttcattttacaagtgactgtcattgctctccttccttctgtttttcttctccttccctttcttgcttttgcttcataaatcttcatattttattctcaagtacatggttgtcatgatttgtagcagcagaggtaggtatgcagctggctattatgtttcaaaatagaaatgccagtatccctatcacctcccccatcacgtttacattgattataaggaatattgacaccaggggcggtggctcctgcctgttaatctcaaccctttagtaggctgagtggggcggattgcttgttctcaggagttcaagactagcctgggcaatgtggcaaaactccatctctagataaaatagacagattagccaggcatggtggtgtgcacctatagtcccagctacttgggaggcttaggcggaagaaaggcttaagcctgggaggtggagattgcagtgaactgaaatcgcacctctgcacttcagcctgggcaacagaggcagaccctgtctcaaataaataaataaataaacaagtaaatagctgtatcttcctcattacagcagaattacagttaataagtacagga

SEQ ID NO: 1695 - DNA, 1199 bp, Homo sapiens
ctctatgaagtacatgaaaaattagctgggcatggtggcgcatacctgtggtcctagctaatttggggagctgatgtgggaggatcttttgagcctgggaagtggaggatgcagtgagctgagattgcaccactgcactcaagcctgggtgacagagtgaaaccctaactcaaaaaataataataataataataattgtagttaaaccaattgaaaccagttgttctttcaggaatttcaaaggagagtctatttgaaagccttataatctgacagttataaggcagtcttttgaaatggctaataacttgttgctgacttctgattgtattaatcccttctccatttatggtggctaaagtgaggagctgaatctgcatataataagatatactgaaattttgaaaagaaaactggaaataacattgtaaaagagacattgtgtgaagtacctacagctcaaggacaaactgacaagtgtttggtcgttgaagactgaatattcaaagacccatttttctaacatctggatttctatttaaatctatttcttataaatcttttgctacaaaaatcattgttgtgagagtttggctccaggaaacctagacaacggtttcgtagttattaatatgctttataattaatatttaaatttcctggagctaaagccttagaatagtgagaaatagagcaatcaattctatttgatgaatatggaataagatttccaagactggtgtgtttgagtacatatgtatgcgtttgtatataatattataaaacaatatgtaatatgtaaatatactactaaaagagaatatataagctaacagtagaatctcaaatcacttttgtataaacagcaggctgaatttgtatatttgagccaatttctgtttgaaatagaaaatcattttttaaacaggcatatatacatctcaaatttataattgaatttactagctgttaaaatatattttgttaaaatacaattcgcaaataatcatttattttgatgttgggcttattttcacaatgaataatcacagtgttctctaacaaaaggcaaatgagcttcctaaatccaagttttaaatttagcagggaaagcgtagtattttccagcttttgttgtttttgttttttttttaataagtgaaagattggtttggccctgctttcaggtgatgagactg

SEQ ID NO: 1696 - DNA, 1177 bp, Homo sapiens
ggatggagtcagggcccagaaataagaaaaccaaggtagttcaaataaaacatggactgaaatctagaagtacagagctattttataaaacttatactttaatttcaatcactccattttgatagtaaattggttgttatattccattgactttggaggaaaaatgatgagttgaatatcccactgttgaccacagtctgcagcaccctcaagaaaggcattccccagttggcctggagagagaaagaatttacccagtcagggttattgcggaggccgcctacctgccaattttcaggtttcttttttgtaatgttttcagtagtaagaaaagatggaatgacattggttgcctcttaatataacagtctgcctcttcattcaagattaaacataacaaaatatttgcaatttcattaggaaaaaagctccaaagttagtgtctgtgagtagaacaagcaggaaacaaaacataactgcaagtttggaatcttccccgggagtttcacctttccctgtgatctgagtcctcacctttgatgcccatccctgtggctgctcccttcctccaggggaggcgggactcatttctttcttttcttttcttttttttttttctcattgtgggaaaaaaacccaaaaaaacccataaatttgccctctctgttcttcagggttctccaaagaaatggagccaataggctgtgaatagaggtgtatgtcctatttgatagttagatagacaaatagttatcctatgagagaaagggagatttatttttaaaatatgtctcgtgtgattatggaagagaagtcccaaaatctgcagcaggcaagaaagtcaatgaatatttccagctggagtctcaaggcctaagaaccaggagggccagtgccagtccaaatgctggcagccttgaagtccatgaagtgccagtatacccgcctgtgtttaaaagtcaggaaggagcaatgtcctacctcattcagggaggaggagctctctctgactctgcctttctgttctattgagatcttcaactgatcgcacaaggcccacccacagcagggagggccagctgttctactcattctcccgataccagtgctagtctcatccagaaacactagcgtagacacacccagaacaatgtgggaccaagagtctgggcaatcc

SEQ ID NO: 1697 - DNA, 1183 bp, Homo sapiens
tctgtaaaatgtaactcattgattaaaaaacaatactacttgtttttatcatttgtagctttttgtaatacacataattttgaaacaaattactcttttctataatcttcaggtaaaaattagggtagctttttaaaatttgttaagctcagttttaaaaaataaatgcctaggtagatcagttttgaaataacatatattcccccatttcaaatatgtgaagaagctcaatggcttaaaatttggaaaatgtaatatttaactcagttgtttgcattatgtaatgtttactatacacccataatataaatattccttaattatatttaaagtaattcctttttacatttttctcctctatttatttatgacaaattgaactcagatattagtaacttgttcaggccatacaagttgtcaccggaggacattactaattctaaagtacataccttttttaatacaaaagtttattaattttaagcagcatcttatgttattaaggtttcatgggattgttatgtttgcaattctgcctttgtagaaacaatctatatgtccatcagtaggggaaggtttaagttttttttttttttcgataaaacatagtacaccatgcaagaatttaaaaggaatgaactggagctgcaagtgtcaacatgatgaggttcttttttgatttagtagaatatttttagtgaaaatgcatcttgtctgtatggtaaaaaaggacaaaattttgaaaactaactctttactgagggcatagagtgagggaagagacaggatttattcatgttcttgtatttttccagggaacatcctcatcttatgcttcctttgcatttaattccattttcgttttgttttctttaccaacattttggtgattgctcatattattatatataaattacctcaatctgcacagtgattcactgattacatataatatcatgtatttaaccagtctctttaggatatttccaaacttttgatttataaataaagctacaataagcattctagtatgtaagtctttacccaatgagtggtaatatctgtaaattcatattagtagacttgcttggtcaacaggtgagtgcattttaatttttgatgtgatgtcaaatctttactaaaatattatgtaaatacaaatcattgtcctttagaaaataaa

SEQ ID NO: 1698 - DNA, 1196 bp, Homo sapiens
tattgtaaaactctcaattatttccacttaatctatatattcaatgcaataccaatacaaatccaattgaaattgttaaattaactttaaagtatacatgaaccaaaggtcatgattagctaacacatgtttaagaacaaacttaggggactttctatttgtcaggattgactatatagctgtaatgatcaagatatttggtgatttgtttaggaacacacggaccaatacaaaagaaaacagatcctagaaatgcacccactccctggggtcacctgtttaggacaaaggtgctgtgatcatgcagcagggagacacatgtgggaacagttttaatctggatcctcctccttcacaattgtgaaatcttttccacatgggtaatatggtagccttgggtttgggccataatcccaaaagacaccaccctaaacaacataatcctggatgctgaaatcccaagagagtgaaatacctaaagtccaaaatcctgcaagtcaaaatcatgatgcaactcttctgcatacaaccaaaaccacaataatcctttccctagaattcagctttcaggattttaacattcagaattttattctttcaggattgtgatttgcaggattatagatgtttggcatttcagactttggggattttgatttttgaggatttcgatcttttgagatttcaacattctaaattatggcattggggattgtgtctttcaggattatgatcagcaccaaaatatcttaactgtaaatgctaaaataataaaatgttataaagaaaatgtaggaaaacattttcataactaatgccaagctttcttaaacaggtcacaaaaagtatgaaccctaaagaatctgtaaaattgtacactttgcttcttttaaatacgctatttgaagagtacaatacaagccataaactggaagaaaatgcaatatgtatgtttcacaacaaaaagaatatcgtgaatacataaaaactcctatatatcaagaagaagaaagaaaacccaattttaatggcactataactgaacaggcagttcacaaaagaagataatcaaatgaacaacaaacacatattaatattttcatttgttaaatcagagaaatagaaattagaaacacaataagctaccactctacaactgccagaatagctggaatttgaaaaactcttagtgaaac

SEQ ID NO: 1699 - DNA, 1170 bp, Homo sapiens
ccaccagccccggctccctgtcgtccagcagcggccacggctcgggctcctacccgccgccgcccggcccgcacccgcctctgccgcatccgctgcaccacggccccggccagcggccctccagcggcagcgcctccgcctcgggctcccccagcgaccccggcttcatgtccctggacgagtacggctccagcccaggcgacctgcgcgccttctgcagccaccgaagcaacacgcccgagtccatcgcggagacgcccccggcccgagacggcggcggcggcggtgagttctacgggtacatgaccatggacaggcccctgagccactgtggccgctcctaccgccgggtctcgggggacgcggcccaggacctggaccgagggctgcgcaagaggacctactccctgaccacgccagcccggcagcggccggtgccccagccctcctctgcctcgctggatgaatacaccctgatgcgggccaccttctcgggcagcgcgggccgcctctgcccgtcctgccccgcgtcctctcccaaggtggcctaccacccctacccagaggactacggagacatcgagatcggctcccacaggagctccagcagcaacctgggggcagacgacggctacatgcccatgacgcccggcgcggccctcgcgggcagtgggagcggcagctgcaggagcgacgactacatgcccatgagccccgccagcgtgtccgcccccaagcagatcttgcagcccagggccgccgccgccgccgccgccgccgtgccttctgcggggcctgcggggccagcacccacctctgcggcgggcaggacattcccggcgagcgggggcggctacaaggccagctcgcccgccgagagctcccccgaggacagtgggtacatgcgcatgtggtgcggttccaagctgtccatggagcatgcagatggcaagctgctgcccaacggggactacctcaacgtgtcccccagcgacgcggtcaccacgggcaccccgcccgacttcttctccgcagccctgcaccccggcggggagccgctcaggggcgttcccggctgctgctacagctccttgccccgctcctacaaggccccctacacctgtggcggggacagcgaccagtacgtgctcatgagctcccccgtggggc

SEQ ID NO: 1700 - DNA, 1342 bp, Homo sapiens
gatatgcaacaacacagatgaaccttgaggacattatgccaagtgaaataagtcagtcacaggaagacaaatactgcaagattccactcatatgaagaaccaaaaacagtaagactcctagaaccgaagagcgggttgctggtgaccatgggctgagggtcagggtaaatgaagagttactggtcaacgggcatgaagtctcagttatgcaggatgaaaaagctctagagatctgctatttacgacattgtgcttataatgagcaataccgtattggatgcttaaacatttgtccagagggtagattttcataccaaagtaaaataaaatttagtaaaaagaaaaatattccaacagctatgccagaggcaaagagaccaaatctgaggggcacatagtgtgctggggaagggaaagagaatgacggcaacacagtggttcatggtggtgttctgtgagtggactgtgttcctccacattcatatgtgaaagtcctcactctcagtacccagaatctggatgtgagggagatctcgctgtgacatctgtctccccactgatcgctagggttgcatcggctgatctggctggccaggcgggtatccctttcctccgtcacccctccatgtgcgtccctcccaaagctgcacgctcggtcaaagaggaaaaccatccgcgatagaggaagaccagtctttggtcaagggtttacgagtagctgcgttcccccgctagaacctccaaacaagctctcagtacccggaatctgatcttatttgaagagagggtctttacagaggtaatcaagtttaaatgaagtcgtgagggtgagccctaatccaatatgactaatgtccttagaaaaaggggaaatttgaacacagagatattcatagaggaagagaattgaagcctcagggagaattgaagcttcaggaagagacttgaaatctaccagcacagaagagaggcctggaactaatccttcccttatggtgctcagtaggaacgaaccctgccaacaccttgatgttgaacttctggcctccaggactatgagaaaatggtttcagttgtgtaagccacttagtttgtggtgctttgttacagcagccctaggaagctgatatatcaagtgagcagggttctagagaaacagagaaagcaacagttaactctgtcttggggaatgaaagaatgcttcactgagaaattctggaaagaagacactattatgccccaaatgctgctccttcttgtatgttacactcacacctcttaggtacgatgtctggatttgataagccagttatggcaatatttaccagagaggacagaaggc

SEQ ID NO: 1701 - DNA, 1178 bp, Homo sapiens
ggctgtgcgtgaatgtctagtcaccaggtaaccctcagcagaggtggtgtttggaaatgccccactggtaaagaaggaaggtcagtggttcggggctttcacctgccgtcggggcagccagagcctgaaatgaaagcacttggtagcttcgtgcctctcatgaatcttcaagatcagaaagaattgtgtcagtccccatgtcctggtggcagggagctggtagaggctgagacactggctgagttctggagggagccccatgggacagagaaagggccccgcaggggatgggaggagaggtgaggacacagtgtacttggagggtgtcatgggggcgatggggaaggtggggcaggaacgttgccatcagagaagcgggacaagagccccgaatccagggagcagagaactgcaggaaggaggaggtggccagcgtggtaaagggaggaagaagcaagagttaatttcacagatgccacaaggagggattggttgttaacttttttaaaaatgttatgattagaatatgaaaaacttggtagaattggttaaacattctaactgtagagagtagttaatttttgaaccagagaatttccatacttggtacacagcaagatcctaagatggtattgaatagtttctttcctcaaaataatgtctgacttcaatgtaataaaacatgtatctgaaacccatagttatgaaaacatctgttttttagtatttagtgaaaaggtaattctttaagaaatgcaaatcaaaaccacagtgagataacatctcatgccagttagaatggcgatcattaaaaagtcaggaaacaacagatgctggcgaggatgtggagaaataggaacgcttttacactgttggtgggagtgtaaattagttcaaccattgtggaagacagtgttgcgattcctcaaggatctagaaccagaaataccatttaacccagcaatcccattactgggtatatacccaaaggattataaatcattctactataaagacacatacacacgtatgtttattgcagcactgtccacaatagcaaagacttggaaccaacccagatgcccatcagtgatagactggatgaagaaaatgtggcacatggaatactgtgcagccatagaaaaggatgggttcatgtcttctgcagggacacgggt

SEQ ID NO: 1702 - DNA, 1157 bp, Homo sapiens
tggtagatatgtatatagagcaccaagactgagcctaaacagcagctccaggcaggaccccactcccttcagggcccaccctgcaccatcttcctcaaatgttttatacaaaaaaaaaaaaaaaatagtggtgcctaattggcattgcatcgattttcttaagagccaggactaacacaaagtgatttcaaagcttccattaggacaccatgaacactgggcccacggtggtggcatcaggcagaccttgctcccttctgcacagagcttgcagagaaagcccaggcaagtagggtggagggccttccctaagaggctggctctttcagaagttcaggtttggccgggcgcggtggctcacgcctgtaatcccagcactttgggaggccgaggcgggcggatcacgaggtcaggagatcgagaccatcctggctaacacagtgaaaccccatctctactaaaaatacaaaaaattagccgtgagccgaggttgcgccactgcactccagcctgggcgacagagcgagactccgtctcaaaaaaaaaaaaaaaaaaaagttcaggtttagcgggacaggactgacagattgacagctcttctgcggcttagcactggtggtgcatagcattcctggaacgcatactaggaacgcgacccttgagcaggcggcatcccccaactccacagagagacccaggtgttcacccaggccagatggagcagtaacaacgtctgtgctgccccgagacaccagagcacacatacgctgtagggattggcccagtctgcgaaccccactcatgacggggccagagcaatggattcccagtaaatgagggtcatgagcttgctcttcacccgggaccctcccttcatggcccgggaccctcccctcacagcccaggaccctcctctcacggcccgggactctcccctcacagcccaggagcctcccttcatagtccaggaccctcccttcacggcctaggatcttcccctcccctcacggcccgggacccttccctcatggtccggaacccttccctcagccaagacgctccccccacagccagggaccctcccctcacggcctaggatcctcccctcccctcaaggcccgggaccctcccctcacccgggaccctcccctcacggc

SEQ ID NO: 1703 - DNA, 1157 bp, Homo sapiens
tatgatgtgtttaatccatggacattctaagaaactcaggttgcaattttcttaaaacttaattccttgatatgaatatttatcaaggacaattttgtcaaaaatgaaagcattttcattctggaaaattgactcttagggtcacatgcccactgtggagctcctgaaaaagtatcacctgatgcagtttgcggaagtaaccagagctgtgaggtagagtatgccatccttcctgtttggggttttaaaaatgcaagcctgatgagagttgacgtgcacgctctgtgagaaactcaccctccttctgacgcgcctcccccctcaccagcgagggcaacctgctgctgctgcacgaggcgctggcgaagcacgaggccttcttcattcgctgcggaatcttcctcatcctggagaagctgaagatcatcacctacaggaacctctttaagaaagtgtaagcatttccccggcacattgggctcccagtgtggctctcggcagagcagtcagacatccagggctgttgcagtctaagagagaaggccaccgtgtgggtggggtcgttatcttccttccattgtgtgggataaaatgaagcctccgcccactgcctcctggggaccctgcgcgagacacgtgagtagcacaagctgtgcctggacttgtgggggaggtaagcaggttctatgtgagaagacaacttgagaacatcagccctgagagccgcggtaccacatttcatcagagcacacaggactcgccactcactcccctcccttagtgctgaccaagtagccctcccagccacttctgcctgtcacaaaggcagatgcagagatcgtcattcctttcctcacacgtcttctgaggcctcgtcccagcaggatctcagttgtgtaaacttcaggcaaaggccaactttgtatagagctgtgggtagcacgtcacaaacagtagggaccctatttcgctgagtctgtgagacacagcccattgtcaggtgcttcctgatttcagggagattaaaatgtgaaaaaaaaaaccgaaccttaatgaaatacttagaaaataattaaaaattgtgtttgtactagtgactttttaaagattgaaaagtcaaattagatttaatagctctgagagtgtagtttagagtt

SEQ ID NO: 1704 - DNA, 1143 bp, Homo sapiens
tgatgtatgtacatttcacaagtttcacgtttccctcaggaaaccacactctgaccataaactcacatggacgctttttttatcaagagataacgttaactttgtctttaaaatagaaagttttgttcatttcataaatatgtgtataattataaatgattttcatataaatatctatttgtatatatatttctataagtatagttacatacttcatgcatataccccttgtatgtaaatgtttgtaaatttaatgccattgtaattaggggggttttattcttcttttttagcctggagatttgaaaaagagaattgaatctctgatagacagagactatatggagagagacaaagacaatccgaatcagtaccactacgtggcctgacgcatctgcagacggttccccttcatgaaacactagaatgtaccctcagagcaggaagcacacctgtgccatttctgggactctgattgatccagctgtggacattggaaggcgaaggaagggaggtggctcctgggtcatctttcacaaggctcaagacttcaacctgcagatgtatctttttccctccagtttttcctctagttcttttaggcatttaaattgtttctgttactctgtgcaaaataactttgagattggacaagaagatgttactaaagagaagttcctttaaaaggtcttgttcttgtgtcaaaaagctgcaagtttggtttgttctcgtgtgtgatcatgagtgcacaatgaagaagaccctagatgctgcattttttagctctgaagattccttaggtatccctgaagacagctcgctcagatgatcagcatttagagtgaaaacaagggcccttcatgggtgaacattagaaagagccagggttcaaagctggcgaatggatgacgcaccctagccactggcccctctctgtttcatgtatttccaaaagttgtaaactttgatggctgatttttcgtaagtcaggtttctaagtgagctccctgaggtgccaaggccatggtgtccgccctgctgcgtctgttcgtcagctgagttccttgtgaatctctgttttagggtttggggctagtgtgtttgtgtttccattctaagattgagtctggcagtccctgtttt

SEQ ID NO: 1705 - DNA, 1226 bp, Homo sapiens
ctctgcctctgggaaggtctctgatgagcttgctcttgtgcgtgctacggaagatcagtgtaaaggtggcatggtggatctgcagatggcagcttatttcttcagacacctaaaattatggcagataaagatgactctgtgaccactgggctcgcacctgtaatcccagcactttgggaggccaaaatgggaggatcacaaggtcaggagttcgagaccagcctggccaatatggtgaaaccccatctctactaaaaatacaaaaaaaattagccaggtgttgtggcgcattcctgtaatcccagctactcaggaggctgaggcaggagaattgcttgaacccaggaggcagaggttgcagtgagccgagatcacgccactgcactccagcctgggcaacagagcgagactacgtctaaaaacaaaagagtgagacagtcatctcaacctggtacagagagagcttggttgcatcataattgaggtttccaatgcagtgcacattcttacatatgttggattacccaagcactgtgtgattggaagtgggtgtgatctggattctgccacggatggatttggggagaacacagtgactcaagtgtggctgtgtggagtagtgtgaacgtggcaggtgtttctctccaggaattgaatccagaaatgggaactaatgatgatcaggaaacttggaaggaagtgtataagatagtggttgaaagtgcctgtggtcatcaagctaaaaggatataccgactgggctcctgggtgaagtgtagctgatcttattgaatccacgttgaaaaatctgtccagggctcacccagtatcaacaatagtgaaggggatgcagggcaccaagaatgaagccctctggagcctcccatgtaccctcactgctcagggattaaacagtgttaccaaccacagctaagggataatgaggttgttctgctcaagaaaagtgcagataccccgtgggacatccaaaaggacctcaaagacctgtgactcctaagctgtagaaatttaaaaccacagtgagatgaaccctgagccttcagtgttcatccatatacatgcatcaccgtttgcttttatcttcttcagtatgtgaatttgggctcacagaatcaaatcccatgcttgatttcatgcttgcaatcgagtccttgaacaaatacaatgaaccaaatgaaccatggtagcatgcttcttaacaaaaa

SEQ ID NO: 1706 - DNA, 1234 bp, Homo sapiens
agagccgggcgcagcggcttccgcctgtcatcctagcgctttgggaggctgaggggggcggatcacgaggtcaggagatcgagaccatcctggctaacacggtgaaaccccgtctctactaaaaatacaaaaaattagccaggcatggtggcacgtgcctgtattcccagctactcgggaggctgaggcaggagaatcacttgaacccaggaggcagaggttgcagtgagctgagatcacgacactgcactccagcttgggcgacagagcaagactctatctcaaaaaaaaaaaacaaaagaaacagaaacagagtcagaattgtagaccacgttcctcctgacgctaacacagagctcccatttgacccagctgttcgctcctcggtatttacccgcaagaaacaaaaacacacatccacattcagactgatacacggtggtgatgggggtacaacagtgtgaatccacctgataccacagagttacacactcagaaatggttaacatggtacattttattgtatgagagtttcaccacaatgaaaaacttgtacctgaatgttcaagcagcattattcgtatagttaaaaagtattaagaactcaaatgtcaattagataacaggtagatatacaaaacatactatattcagcaaaggaatattattcagccataatatagaatgaacattgattcatcctatagcacagatgaagcacgatgcttctgaaagaaccggacaaaaagtccacacgctgtgtgattccattcataccaacgtccagactaggccagtccgtacagacaggatgaattactggttgccggagggtggggaggttgggggagatggggaggaagtgctgatgggtacagggtttctttttgggatgatgaaagtattctaacatggattgtggtaatagttgtgtaattttgtgaatatgctggaaaccattgaattgtatactttaaatgggtaagttgtatggtaagtgaattatatatcatagctgttaaaaatatatacgatattttaattagacatagaagaacatgaatagagactagaaatatatatatgtatatataacaaggtgttaatgattttctactagtagactggtagatttgtactaagttttttctactatatatacttttctgtaatttaggaaaacctccctttcaattttaataacgagggaaaatttatatttaaaatatcaaag

SEQ ID NO: 1707 - DNA, 1188 bp, Homo sapiens
taagctattgaatttagatatgcacctctgataagcaaggattgtttcccgtaggattaggacgtgctgtggatgtgtgttttgataccagtgtgctgatgcagagcgtttatttacttgttaggattttgtgttttcatttgctatttttctttaagtgcagagttcatttttgcccctgaaaagtttttgctgagtttgctgaagaaattgtatttcaaccacatccatgaaaataaaacacctcctgttgtggatggtgagcccctgatgccgcttatttgccgtgagtttggacggcacccctgctggcggatagcaagactctgtggagtttgttcagtggtacggtgtccaagcaaacagcagaatgcaactttctaaacagccccaagcaaacagcagaattcaactttttaaacaataaacaccatcaaccttattgactttattgtcccttaaattatattgactgttgtgattccatcaagtttgtacactcttttctctccctgttttgcagcaacaaattgcgaagtgcttttgtttgtttgttttcgtttggttaaagcttattgccatgctggtgcggctatggagactgtctggaaggcttggaatggtttattgcttatggtaaaatttgcctgatttcttacaggcagcgtttggaaaccttttattatatagttgtttacatacttataagtctatcatttaaagacatgtactgaaacaaatgtatttgtttcataagcatcttcctgtaatctattataaaattgaaattaaatatagagaatgttttaacaattttttaactcaaaatttgtcaatcatttttaatagttctttttttataaaaagaaaaaggaatttaaggacaggcagtagtctcttttaaaatttattcacaaaacccattaactgcacagttgctattagctgcctgttctaaaacgatagtctttttattgaaacacaaataaacttttctgtaatattttatggtatataaagagactttaattgtttgacttgtttaacttggcactgttagtttttattaataaaacgcgcatgggcattttaaacaagctgtgtttctctaattcaggattattatctagaaatttgtctgtcttgttggttttactttatacttgagtgagaaagtaggttgttagg

SEQ ID NO: 1708 - DNA, 1172 bp, Homo sapiens
ctatttcattgatctatgtgtctattttcatactagtaccatgctgttttggttactatagctttataatataatttgaggtcaggtaatgcaatgcctcctgctttgttctttttgcttagggttgctttggctattcaagctcttttttttggttctatatgaattttaggattgctttttctaattctgtgaaaatgacattggtaatttgataggaattgcattgaatctgtacattgctttgggtagtgtggtcattctgatgttattcattcttctccctgagcgtgggatattttcccatttgtttgtgtcatctacagtttctttcatcagtgttttgtagtaaagatctttctcctccttggttaaatatattcccagatattttatttctttgtagctattgtaaatgggattgcttttttagtttggttctcagcttgctcttggttataaaaatggtactgatttttgtatattgattttgtatcctgaaactttgctgtatttgttcatcaaatctaagagttttttaataaaagtatttagggttttgtaggtataagattatatcatcagtgaacagagatattgtgttggtgcaaaagtaattgtggcaaatggcaaaaattgcaattacttttgcaccaacccaatagtttgacttcttgttttccaatttggatgctgatatagtttggatgtttgttccttccaagtctcatattgaaatgtaatcctcaatgatagaggtggggcctggtgggaggtgcttgtgtcatgggggtggatcccttctggatggcttggtgctgtccttgagatagtgagttcttgtgaaatctgactgtttgaaagtgtgtggcacctccccaccactctctgttcctgctcttgccatgtgatgtgactgctcccacttcactttctgccatgattgtaaggtttctgaagacttcaccagaagcaggtgctggagccatgctgatacagccttcagaactctgaaccaattatacctcttttctttataaattacccagtttcaggtatttatagcaatgcaagaatggcctaacagaaaactggtatcaggagtggggcatcgctataaagatacctgaaaatgtggaagcaactttcaactgggtaatgggcggaggttg

SEQ ID NO: 1709 - DNA, 1284 bp, Homo sapiens
tttttttttgagacggagtctcgctctgtcgcccaggctggagtgcagtggcacgatctgggctcactgcaagctccgcctcccaggttcacgccattctcctgcctcagcctcctgagtagctgggaatacaggcgcccgccaccacgcctggctaattttttttgtatttttagtagagacggggtttcaccgtggtctcgatcttctgacctcatgatccacccgcctcggcctcccaaagtgctgggattataggcgtgagccaccacgcccggcctctagttcttacttagatgtaatgattcctatcttataagagtctcttgatgtcttcatttttttttttttgagacagggactcattccattgcccaggctggagtgcagtggcataatcagggctcactgcagccctggcttcccagcctcgggtgattctctcacctcaggctcccaagtagctgggaccacaggccaccatgcctggctaattttttgtatttttttgtagagatggggttttgccatgttgcccaggttgggatgtctttattttttataaacgtttcttaaattaatgtggttggagttaaactttgatggctgttcctctcactgcttgaagccttaggcagtgggattttgatccatcatatatcaaaaatggcttatcttcactcagggcaccatgaggatgggctggctgtccgttagtgccttctgatttttgcggagtcaaacaattactaaacgggtggtgattccagattaagaaaatgtacctgtgattaaaaaaataaaagaagcagcctagtttcaaaacacgagcatatagtaattagatagctgtcatctggtgctgtgaaataaagccagttgattctgagagttactgaaacattatactctaaagtcattcatgttcaaattttaaatggtttactcagttttttagagtggttgctcacacacgtcagggcagttttaaaaatacactttttggctgggtgcggtggctcacacctataatcccagcactttaggaggctgaggtgggcggatcacctgaggtcaggagttcgagaccagcctggccaacatggtgaaaccctgtctctactaaaaatataaaaattagttgggcatggtggtgtacacctgcagtcccagctacttgggaagctgaggcaacagaatcgcttgaacccgggaggtggagattgtagtaagccgcgattgtgccactgcactccagcctgggtgacagagtgagatactccg

SEQ ID NO: 1710 - DNA, 1410 bp, Homo sapiens
gtgtgccttacaattactttttgtaaattggatgacattaggtattaacaacagtactggcacattagttgttacagctccgcaaggctttatgcacaattatgtaatccccaaagctctgaaaaccgaaatttacaaaatttagcaccccaactggtttggtagccaagtgcaggttatagggagctggaaggggaagggggtcacagtaggtggcatcgttcctttctgactgcccgccccccgcatgccgtcccgcgatattgagctccgaacctctcgccctgccgccgccggtgctccgtcgccgccgcgccgccatggaattcgaacgctgacgtcatcaacccgctccaaggaatcgcgggcccagtgtcactaggcgggaacacccagcgcgcgtgcgccctggcaggaagatggctgtgagggacaggggagtggcgccctgcaatatttgcatgtcgctatgtgttctgggaaatcaccataaacgtgaaatgtctttggatttgggaatcttataagttctgtatgagaccactttttcccatagggcggagggaagctcatcagtggggccacgagctgagtgcgtcctgtcactccactcccatgtcccttgggaaggtctgagactagggccagaggcggccctaacagggctctccctgagcttcggggaggtgagttcccagagaacggggctccgcgcgaggtcagactgggcaggagatgccgtggaccccgcccttcggggaggggcccggcggatgcctcctttgccggagcttggaacagactcacggccagcgaagtgagttcaatggctgaggtgaggtaccccgcaggggacctcataacccaattcagactactctcctccgcccatttttggaaaaaaaaaaaaaaaaaaaaaacaaaacgaaaccgggccgggcgcggtggttcacgcctataatcccagcactttgggaggccgaggcgggcggatcacaaggtcaggaggtcgagaccatccaggctaacacggtgaaacccccccccatctctactaaaaaaaaaaaatacaaaaaattagccattagccgggcgtggtggcgggcgcctataatcccagctacttgggaggctgaagcagaatggcgtgaacccgggaggcggagcttgcagtgagccgagatcgcgccactgcattccagcctgggcgacagagcgagtctcaaaaaaaaaaaaaccgagtggaatgtgaaaagctccgtgaaactgcagaaaccctttgggaacagagggaaccatggggcaggaagcccacgaaaattctaattggtcttctggttcttggtgacatcaggtgaggggcgcccaaatgtttggcttcatgagaatcaccgagtatggggactgcat

SEQ ID NO: 1711 - DNA, 1227 bp, Homo sapiens
tatatattgaaaccctaatcccaatgcgatggtatttagggtgggatctctgggaggtcattaggtcatggagtttagaatactcataaatgggattggtggcctcataaggagagacggaagagctagctagctctttttccacgatatgaggatacaagaaaacagccatctgcaatcccaaggaagaccctcatcttcagaggcagaccatgctggcaatctgatcttggacttccattctctagaactgtgagaaataatatttgttgtttaagccacccggtctacggtaatttgttatagcaacctgaactaaaacatttcctttttataacaaatattttaaagctctttttatttttctgaaacataattcgtaaagaatgtaacttacccccacgcacaattttaaaccaaaatttaaagacaaaaagtagagacagggttttgctatgttgcccaggctctctacctccagggctcaaatagtcctcctaccttggcctcccaaagtgcttggattacaggcataagccaccatgcctggccaaaaaattagtaaaatctcttaaagagatataaaggagtctacggccataccaccccgaacgcgcccgatctcctctgatcttggaagctgagcagggttgggcttggttagtacttggatgggagataaaaggaatactagaaagaatatgacttataattaaatactatatgtttagatatgtaaatgtttgtgtataacattcaagaagacacaatgtggtactcagatatatgcatctgtatataaaatcacctggaatgtaacagctacaaatgcagaatgatacaggcattataatggcgattcaaataccatgaacagaattactgatgtggtatgattttccagaatactaaatagcttttggcagattttcaaacaaaacaaggtatgatcatcccatgattttcatggtagttgcatccctggaaagttcagtgtgtattaaaactacgcataaaatgccttgtgtttatatttaaaattaaattatggtcaggcacggtggctcacgcctgtaatcccagcactttgggaggccaaggtgggcagattacctgaggtcaggagtttgagaccagcctggccaacatggtgaaaccttgtctccaccaaaaatacaaaaattagccgggcatggtggtggccgcctgtaatcccagctacttggg

SEQ ID NO: 1712 - DNA, 1099 bp, Homo sapiens
gaaagagttaactttctttcctctgaccacagaaaactcctccaagtttagaggtttagggatctggattgagaaaggaaaaagccgtggaaaatctcttctcacctccgtccctggattttaccaccatattaagcggaaggcgagcactacaatttccttgtccatcagacgccctccatagacgcctcatatttcgggaggtgtgtgtggggggggtcgcccttgtacccaaagatctgaaattcttacatcaacaccgtttccatgcaccacagaggcacagtaggcaaagtctcaagagagtatcacggtgaggaacgggaagacagcctgatagttgctctgctcaaagcagaaccttttcgagggatttacagagcacgaaaatgttttcattttgtaggagaatatcctggaattttactcaagctaacatcctattcagtagccggaatgctaggagcataacatcaatctataagatgaaaggaagagaaactaaaagcagacgagggctccatagctcaggggttagagcgctggtcttgtaaaccaggggtcgcgagttcaattctcgctggggcctgtgtgttttttcctcctacccacagggatttccacatcaggaggtaagcggggtcggacaacgcggcagcaacgtgactgccgcttggcacatctgcatgtcttcggcgcctcttcggctgtcatttaggctacgggggttcacgcctgctgcagaagctgccagtctcaatgactcttggggcgtgtggtttacctctactattcaaataagtacgcattcttgccgatagaaggcacccaagaacctagtttatcagaaaaatgcctaatgatttgaatgagccttagtgcaaaacttaagagtatctgtatcgcggctcgttggtctaggggtatgattctcgcttagggtgcgagaggtcccgggttcaaatcccggacgagccctcgctcttttcaactcaacaaggtgtgtcttgtttgaaaacttcacgactgcactttgctgtccctgtataccgttctttgaaaaattgcagctattaactccccagggatgtgaagaagc

SEQ ID NO: 1713 - DNA, 1237 bp, Homo sapiens
ctcctgggcgcccttgaaagacgccttaaatctaaacctataatacataggtaatcaactaaagctgaaagggaatggccaaagcacccacgtggagtgctgggtgctgtaggcgagaggtctgaggtagtggcttttagagctcaacatcttggtaatgttggttcgaccttttcccctgccagtcccgcggtgacctttatctttcggtgagtgaaatcggtcgttcgtgtttttcgtgggtcttccaaccacaggccgcctgagatggttctagtccctttgagtatacagacccttcctgtgcattgaccgacacagctcggcccggatcccgaaatgaacgtttctaccttcggaacgctgcgtctcggatccttctgaacccgcacgttgactttcctggagtctggagaaaatcactagattctaaaggaatcaaaactgttcaagtgttgtgctacaactaaaaaaataaatgaacactcttaaagaatagaatctctccagttctggctcgttggtctagtggtatgattctcgctttgggtgcgagaggtcccgggttcaaatcccggacgagcccctttactttcctttccgtttcatctttctctctttaaagtcagtagttaacaaatactgcaatcggcgctacggctaggtcacctagccctcttcaacctcgacctatgggggatgagattgttgagcaaattgcggctactttcgctgaaagaatcaaagacaacgaagacgctgcgaagggccaaggtcttcatcacagatcggggttccctgacgggctctgacaggatcttttgtcaggagcagagtgttcgggcagttcttacccagtattttgtgtggaacaaactagtgcacttttcactaggtcacttcgtatggaaaagattgctacctgaaggcgtgttagggtcacaatgtcccaatagaacccgctttctgagaccctgaccgcgcggtgatccagccgcgggatggagtctagcccctgccctggccttggcgcctgctccgcagcgcagtgttgcactcttggttgttgtagtgagactgcctttccgacagttgcaagcgctgttgcatcgttcgaatgcgaagtcgcagccctgggaacttgagggtttacaggacacagacattcattttgttcaaggaagcgcaattcgattatttccaggtgttattttcgaaaacatagtataacatagga

SEQ ID NO: 1714 - DNA, 1244 bp, Homo sapiens
agcgcatcgggaggaagaacgggggtgggggatgagggggtgggagagcagtggaaggtgtagggaggtcagagtgttagggaagggcctcattaccggccaccaccagaccctgcggctcggctggggttggaagccttctaccagtgtccattccaggtctcctcctttctcctccagcaacccttccctcaccggacccccgcaccctgcatccacctcgccaacccctctgcctctcaccctctcacttttttttttttttgccactgaggtctgtcatcctcacctgtagaaagggggatgcacaggaggaagaagatagcaagtgagagcacactcccaccactacccccacgccccctacccggctcgcccctcatgggtcgttgttatcgatgccggggaaagccagtcaaccacagccagaggattttgttccgccgcaaaaggagcgcggtggcgatcggcgcaggattatctctctaaggcgagttccaaccaacttaaagcttattggacgactagagttgcaaggagtcttgcatttgctgaaagatcaatgacccaaccccagaaacgtgcgcccttcgatagctcagctggtagagcggaggactgtagcctgtagaaacatttgtggacatccttaggtcgctggttcgattccggctcgaaggagctgccgtattcttttgcacacgcacgcaccaaaactacgtggctgcatctctgcctggtcaaaggctttgccagccagcatccacactctcccaggagaaacctagcaaggcctttccggattacccagcttcccacagcctatgctgtggccttgggagtctgctcattcttcaagtcattgctttctctactatcttcaaattttttatataatctgggatttttatctccaagtcattgatttttatggccattaggtgacactataactgatattcttatgaaactagatgaaatatttgaataacatgttagaaaattgaattcatgtatattaaaacaatgtcttaacaattatttacatttacatataagttctatttctttccttgctcataaattttttgcatctcactgttttgtgattttattttttattttcaggagttcaaccttgagcaattcctttagaatgcatccatggatcttaatgaagatataagttctagaacaccccccaaccaagtgccctcaatgtaaactctcttttgactgctatt

SEQ ID NO: 1715 - DNA, 1127 bp, Homo sapiens
gaggacaggctgttagggcagtgcccccttatggtcttccatcagaccctgacgctaggctggggttggaagctgcttacaccacgcccatgctggttctcctcttttcctcctccagtgtcctctcctccactggacccacccatcagtctcaccaagccctctgccctcgccgtcttacctcattttccctctggccactaagggctgtcatcttcacaagcagaaagagcgatgcagagggagaggaaggccacaggtgagagctcctcctcgtggatcgtggctatcggcgccccagagacgccaggcacccccccgggcccagaggatttgctctgtccggaaaggggcgcagtggagaccggcgcagagttctcttccaagtcgggttccaattaactcaacgagtattggatctccggtggtccagggacttggcttcctccatttgcagaaagtccagtgacccagccttaacagtgtgcatccttcgatagctcagctggtagagcggaggactgtagactgcggaaacgtttgtggacatccttaggtcgctggttcaattccggctcgaaggaagcgcctgactcttttgcgcacaatgctgcctggctgcacctgttcctcgtcaaagaccttgcagccttccagtcataactacactttccccaggaaaacccagcaaaatcctgcctttcctgatcacaggcctgggagcctattcattcttcccgaatcctcatagtcttcagctcaaaacagtgccccttgccttgtgacccagccagaccccaattcgtgcccccaccatcctacgcctttccacttgtatttacaaactgcccacccatccccctgtcccagacccgtcaagcttcatctttcctgagctttcacaagtttttatgttgctacagccaagtttggctactgctggaaaagtaaggatatctaatactcagttcaaagtctgcaaaaacacctgcaccaagtgccctgcctacttgggagggtaagggaaagggaaagcgagtaccaaagaagtgcagacttcaaaacagcttcagtgatcctggagagttaggggctattgggtccatggcagggagcagacgtaaagc

SEQ ID NO: 1716 - DNA, 1228 bp, Homo sapiens
aagcataggacactgtagggaaaagggcggaggcacatcgggagaaggggcatgtgtgtgttggccgggaagggagtaggaaggccagagttttaggaaagggctgcttaaggactttcagcagaccctgcagctggtctgcggatagcggccgcccacccagaagctttccgagttcttctttcctcctcctgcaacccctgtcccacaggatccacccatccacctagcccatccctctgaccgagccctctcaccctcttgttttctttcgctgagggctgtcatcctcacttgtaaaaacagagatgcacaggtggaggaaggccacaggcgagagcctcccgtcctggattgtggctatcagcgctctgggacgcgaggaaaccacactcggaggatttgctccaccctgagaggtgcgcggtggcaaccagcgcaaggttctcttctaaggcgggttccaatcaactctaagtgtgttgactccagcgttccaaggacttggcttcctccatttgcggaaagtccagtgatccagctcttgcagcgtgcacccttcgatagctcagctggtagagcggaggactgtagattgtacagacatttgcggacatccttaggtcgctggttcgattccggctcgaaggaagtgcccgatgcttttgcatgcaatgccacctggtgcctggtcaaacgccctgcagcctccaactagtatccacccacaccctcccagtcaaaacccagagaaacctttcctgatcacctggtttccacacctgtgctgtggccaggaaacacgcccgtaagcccactcattcttcccacagtccagggacaggtactcttcaacgcaaagggccccttgcttctgctttgtgacccagtcagcccctctccccaacccccttcgcacccccaccatccagagctctttcacttttatccacagactgctctgggtgctgagggccatggactctagcaacattgtgtgctcaccattgatagatctctcgatctattaaaccagtgggcccaccatcaactcctagaagatcaagcctgctggaagagaaaagggtcagagacaactgtgacatcctcaggaaaaaaaaaaaatgctctctatgctgtctctctctcatctccttctccaggtctctagcaaatgcttttctatctgagcattctctctctctctctctgtttttctctgactcta

SEQ ID NO: 1717 - DNA, 1177 bp, Homo sapiens
gtgcagagcctagtacagaactggaatgcagtgtttgttgaatgaaggaatgaattaaactgcaaattaacgaatgcctgctctggcactgagactcgcagctgtgagaaaggtctctggaggcagacagttgctggtacgaagtcctgagtcaagcaggaaacaaaatgcggatgtcagcagtttcaagtgagacctgtggtgagctccttcctctgccggttttcccttcttaattttcagtctgaagtgagggagtggagaatctttctgtgttagactgtgtcgcgttgggcagatttctccaatcttaggatagtagtggtccctctcactggccttcactttgtaccatccccagcaagaacactgagtctgtgaaccgaattctagtagtcgggaaatggattgaaaggacatccaggttttacttagtttctatgctcagatgctggcagaagccctgcaaatcttttccttttctgtgaaaggaagaggcggtttctgcgtgaggccctatagctcaggggttagagcactggtcttgtaaaccaggggtcgcgagttcaaatctcgctggggccttgcgaaactactttcttgattcaggtgttttttgaaaaactccccttctagtctttctgaactaagtcacagaaaatgtggcaaattagagcttctttcctctgttcagagcttccaaacactagctcagcagaacgtttcctttaggttccagtagtaatgctgctttagctcctggaatgcggcggaatccattacacaggcggtggaaatcaccgtcagcctctgcccacgccctggcttgcggactggcggcgagagccctgctgactgccgggcgggaaatggggacagctaggcgagacaatagccctttaagctattctcaagccccgggtctgggcatatttggagtagagatcaaggttccacttctgaaacgggaagagccagcaatggccgctccggccaggcgtccagaagagagatgcacgttgtgaggcaaggtttcatgtgccagtggggttttgggaaattaagggcccgactttaggggcgagacttgggtcactaaatttgattttaacgcagagaaatgtggccttccttttgaatgagctgcaaatattatctccaaaagcgaattcacaca

SEQ ID NO: 1718 - DNA, 1321 bp, Homo sapiens
gtccctagtgccaaaaatgttggggaccactgctccattccacaccctctccctcccgtgtctgtggacgtgtaagcggaagagccgagattgggagggaagcgcaggaagtgaggacatcagggagcccgggcctaagcctggaggcccgccctctccggcgttcacagttgcgcagtcagaattgtgtgcgtcccaccgcctcagcccccagttctccgacgcccaggtgccggtccccaccctacacacaaacacacgcatccacgctcgcgaggcccctgggtccgcgcccagtgaggccaacagccctcgggcgcccagaggatgagcagcctcggtatgcccgagtttcaggggcgcctgctctgcttgggagcccctcagtgaggcaggggaatccagatttagaaaggttgtcctcagaacctcggacgcaggactgtcttacaagctggctttgtgactctgcagtaattactttccgggtataaagagatttctttctttcccgtctctggttaaggatgtctcgagtagggatttttaggagagttgtttccgtgcttccttcgatagctcagctggtagagcggaggactgtagtacttaatgtgtggtcatccttaggtcgctggttcgattccggctcgaaggagacgctgctgttttggggtttacggttgctcttcgtttgtgcaaaaaatctctgtatcttgacgtgatcaaatctgtttctgtctctcacccttgtccgaaggaaacagcttagccgcgaggtgggctgcgttaatcgcgtcttgaaaagttggttacctttctgaaagatagtagacccgaatcgtcccaccgttgggggaaggcactgttgtcttaccgaagtgtgttatattttggcttctacgttaagtccaaaggccggcagatatatacgtatcgcgcgtctgtcctggggctcagtaccctacagccttgcaaccgagctcagctctggccctcgatctctatttcagccccctccaggttccctccaggccctagcgggcttaaatcgctccccgggctcagtgagacacaagcatgtgacctaaagtctaaaaagctgccttccttcaccccatcctgcatctggatcgaggagaataagccagagaataagccacacttgaaacttggtgaagatggaaggaataactaaataaggcctaagggaaatgtcacaacagaggaaaagaaacaaaacaaaaaaccttcagaacagcaggcggaaaagagaaattcagagtgataggaagcaccactcagctacagtggctcgttg

SEQ ID NO: 1719 - DNA, 1164 bp, Homo sapiens
tgtaagctatccatattaatctagctaatgaatggcttgggacagaatttgacgtttgctatgctgtgtgtatatatacagaaccggtgaaactcaataaaagcaacgtgaatcaagattattgatggcagggaatagttagcatgacctgtaatgtgaaaaacagcagaaactggtgtcagagaatttaggcaaatctaatttgcttgagtacttagaggagggccacttggaattatgtccaaggaaattatattgccaatgatctgccagggagaatttttttttcctgagaatttagagtttagtgctgctgaaatagaatggaagaggaagaagttgactttctagagtatattcagaggctggagtctctgaaattattagcaaatacatacttaatgctgtgagtccctttaagttgcctaatactctgggcagttaacagtgattcagagtgagagtggagaatgttttatcaaggaatattgtttttagcatctgttcacctgtatacttttttttgctttacagttttcggctttgtgagaaaccttaccatcaaacacgatggccagcaacgttaccaacaagacagatcctcgctccatgaactcccgtgtattcattgggaatctcaacactcttgtggtcaagaaatctgatgtggaggcaatcttttcgaagtatggcaaaattgtgggctgctctgttcataagggctttgccttcgttcagtatgttaatgagagaaatgcccgggctgctgtagcaggagaggatggcagaatgattgctggccaggttttaggtaagtgaattttttcattgatgatgtaattcaggcctgagtttttctattcacgttttttttttgtctttatgtctgtaaaactgacagcatgagatattctggatattgcgactgtttagcctaataaaaatacattaggcttatagttataattggctaagtaaaggatattcttcattgtaccattttgtgtagtagagctaggacaactctactacaatcgtgagtagggggagctgggaatgacacttcacaatgtaaaaacgttgcctaaatggttgtgtcctgcccacagcagactggaggagccctctagtgttgattgcttgtctccccattgggatttcact

SEQ ID NO: 1720 - DNA, 1206 bp, Homo sapiens
atctttgcaatactcaaggttctcggaaatttgctaatggttgtgataaaccatacagcttgagccagtgaggcagattgggctggtgccttcgtctgagttttcctgctttcctgcctcgtgcagattctgaggtatatctgctgccttggaagacataagaagcagtgatactccctggctcggttattttctccatacaatgcacacatggtacaatgatagaaggcaaaattgccactgtcttcttttttttctcatatatctaaggaagatatatcaggttgtgcctcatgtaccgcttctagtgaaatgtagaggaaggctcaaaggagtcaacatttatatctggaagggacaagtcatgccttgggcctagaataccctgatgagaaaagagaagaggaagggaggccatatctacaacacagcctctcggcactgctgctccttattttaactttgtcttgcattgtcctgtatttatcacagtttctgttgaacagcttttcaagtatttggggagtttatcttgccatcctccccttctggttctctgcacccacctgtcccactgcagttccttccgtgctctgtgactttaagagaagaaggggggaggggtcccggattttatgtttgtttgttttttctccttagcagtaggacttgatattttcaattttggaagaactaaaagatgaataaactgggttttttttgttgtttgtttttgtaaattcacctgtgaccgttcattttcagttcttgaaagcaagcctgcttcctgcctggtaaagtgctaaggtactggagaaaaatgcctttagctagctagttttacaaatgaaactttcatcattctaaactttcatcattagattgagagacactagacatcacagtaaaccaaattcatgttatagcaagctaactttataagagactttttactatggttccctcagagacttttagattggaatagcacttgttccttcatgaaaacaaatcttcagtcatctccttgtaaatagcatggaggacagcagctgcttgaagggaaaccttcagccttcctattggggtagccagatcttcagggctaacaactgttgggaaagggaaaaaaacagcatcactcagttgaacactttgatacttggtatttgtcaggttaggtactggggatgctaaatgaatgaa

SEQ ID NO: 1721 - DNA, 1220 bp, Homo sapiens
taagccactgtaccaagcctccttcccagttttttatcatgagctggaagtgttgcttaaattacttaattagaaaatgtttaattcagccacttgaaagaataaggtaaataaaaaatatatatggaaaacatttccaggaaatatcattaaataaaaaagtaagtggcagaatagtacatacagtagattctgtttattaaaacaaaaaaaacttcagaactaagacaaaaaagcaaaaaatggaaacaaaatcttcttgcatttttgcactaacgggttgcttctagtgtgaattatattgcaccctgcagcctgagaatccagttttgatttcccagagcttcttgccactagtggacaggtttttctcagtggattcttggcctttcataaagcagttaagcaaattgatatatggtcagtacatagcataatcacattgtttgacagataatctccttatcatcttttggtctgatttttcatgaaaattttggagtagaatctaagtatatgaccatgagcaaataattttaaaagtcttctctgtgagagacctaactagtcactctaactactttttgctctacagaagagacgctcaaaccgccaagttaagcgaaaaaaatatacagaggacctggatataaagatcacagatgatgaagaagaagaagaggtggatgtaactggtccaataaaacctgagcctatcctccctgaaccagtgcaagaaccagatggcgagactttgccttccatgcagttctttgtggtaagctgtaaactcaaatgatttcagaggattgccttgctggtcacaatcatctgttgactgactgcatcttttgctgcaggagaatcccagtgaagaagatgcagccattgtagacaaagtgctttctatgcggattgtgaagaaggaggtgagggctttttattattattattatttttatttatttatttatttatttatttatttatttatttttgaaatagagtctaactgtgttacccaggctaaagtgcagtggctattcatagatatgatcgtagcacactatgaacttctgggcttgagctattcttctgcctcagcctcctgagtatctgggactaccattgtgcaccactgcgcctggcttttctctatcttaatattaacccgtaatgctatgttcacaggctttatttaatgagcacctttggatgtc

SEQ ID NO: 1722 - DNA, 1319 bp, Homo sapiens
ctcggaatttcattgagtttttttcttccttgcctttgggtgtctgcttgccacttcctaagaattcttgtagaaggcagtttcctctacttgcccaagagcactgagtacttctctactatcctattattagcttctatctcttagtgtaacttcaaaacttttaagagcagtgaagttggtcagggacatgtggccacttattattacctaaagaaaacatttgttccctgttcattttattttaggggccagatctaacattgtagtgtctttcaccagatagacttctactgtttcatcaaactcccttcttaactagacctagactttctactccaatcaggctaatctacttactgaatgtgacatatttattcctagttccatacctttgcacatgccctactctccactaattatacttaaaagtccaaaaattttttctttagtaacagacttaggtactgctaagcagttattaacacaatattccttagttttcatatgttggttattcatatgtctatttatatgtatatttatttttatgtatgttactatgtaaatatggtttgcagttgtttttgtgtggaatcttgtctttccgtataagttgtaagctccttgagagcaggatccatgtcattcctttatttttataaattattccccctatcattcctttacagtgcctagtgctactcattatgtgttcattgaatttgactgacatagttaaaaacttaaggtttattttagactttcaaggaaacaaaagactttagagtcctctctctgtaattctgccccactcatttgtttaccctgggttttatacagttctcttccttctcccctcccacctttccctggctttttgcctccattccatgaggcatacagtaaggctgcctgctagtaagcagtcacataagtgggtacctatccagccattctcttttcagagcatataatactatcttagccaaacttgcctttgcttcactcatcatgcagccttctgggttggttgctatatatatcttttttccttgatgtcccgttctcttccacagccctgaggtcttacgaatttttctactttctttttgctgttgatgaattgtttcattattaaatatatgcatgtatcaaagctattcatactccatgtgtcatttctaattgtatcccaaacattagtagatactctcctctcagggaattaaatcaaagataatgaagaagcctctttgggattcatgctatactcgattctgaccccagtagtagtagtaatagttgacagtgcacca

SEQ ID NO: 1723 - DNA, 1329 bp, Homo sapiens
ggtaatctagtgctaaagttggtcacagaatttcctgcacaaaatgaaagatctgtgtatgggaatgctagagaatttgacttctcagaaatatatagaccaacagtggttgccttttttcattttcacttctcttcattcttagatctacggaatccagaggcagcattgtctccaaccttccgtagtgacagcccagtgcctactgcacccacctctggtggccctaagcccagcacagcttcagcagttcctgaattagctacagatcctgagttagagaagaagttgctacaccacctctctgatctggccttaacattgcccactgatgctgtgtccatctgtcttgccatctccacggtaatgacctgacagagttaggatttaccacttattttcagttcacggtcagtgtcttattgcccatacctcccctcgttctctagccagatgctcctgccactcaagatggggtagaaagcctcctgcagaagtttgcagctcaggagttgattgaggtaaagcgaggtctcctacaagatgatgcacatcctactcttgtaacctatgctgaccattccaagctctctgccatgatgggtgctgtggcagaaaagaagggccctggggaggtagcagggactgtcacagggcagaagcggcgtgcagaacaggactcgactacagtagctgcctttgccagttcgttagtctctggtctgaactcttcagcatcggaaccagcaaaggagccagccaagaaatcaaggaaacatgctgcctcagatgttgatctggagatagagagccttctgaaccaacagtccactaaggaacaacagagcaagaaggtaggggtcatgtgaaaatactctcacaatatgctcttaattatagctttgtttgacagggatttacccctagggcaaggaactgtttacagcagtggttctcaactggggatgattccctactgcccaactcccaggggatctggtaatgtccggagacatttttattgtcacacacatgggggagtgctattggcatctagtgggggtagaggccagggatgttgtcaaacatcctacagtgcatagtgggacaaacccccacaacaaacagttgtctgtcccaaagtgtcaacaatgccaatgtcgacaaattcttatttagataatctgtcactgaatctgaaagaattggatcaagagaagaggaatccaaatatatagaaatatagggagatgaatggagaggaatactagaccaattatggaaattgactaaataatgtgaattggttctgagtataagtattggcct

SEQ ID NO: 1724 - DNA, 1217 bp, Homo sapiens
ctcacccctgcttctccgggatgactagtctgcccttctccgtccccgagttcggaccccgcattccgctcgtggaggtccggccctcacccctgcttggccacagcccctagtgtgtcagctatttcggggacgcaattcaggtccctcccgctggacacgcggctcccaccagcacccccgaccgccatcgccgccatctttctcctcgcgctgtccacgccgggattccttgatactagtagccaatcacaaagtcaaactagtgccccagaaggcgggacgagtcgccttaacaaccagagcgtctgccacagctcccgaacaggagggatggggagtggcttttcctgccaatccgcgggctgcacagtggcgtacggcatggatccaccaatctcagggtctggttcctgacgaacttcaatctcccagaatgcttagtctatctgaagaacgccgttgagagactacaccgcccatgaaaccctgcagtataaccttgaagtaccatcacggagagaaacagtgccatctcagggccagtggcgcaatggataacgcgtctgactacggatcagaagattccaggttcgactcctggctggctcggtggggttcctcgcagcttcgctgcgtgagcattttgtaattttcctttcctttcgcagcttgatgcttctttattatcttcacgctttcattatcagatcctgagtcggttgggttatgcagccatgtaatgtcagcttttcccgtaactaccctcaaaagtgtttttcttgtgtcattatttacgtccatatgaacactgagaaaactgggttaatggctggtgctattaaaatgagctttgtcaccttactatgttacatattaaaataaactgctaactcagctactacttcctagtgattctaggaagtagtgttttgtgtttcaaacacaaaaggtgtaaataaacgcctaaacacacacacacacctcaagatagagaaaaggaattcattaattacagtgggcagcagtcatgaaattggctggcatggaggccagagagaatctacattttctcatgtcattagctgctagagatggaaaggaaggaagcaaggaaagacatagggaggtaaatgggaactccagaaggcagggggcccactggtgttgagggctcggcagcaaggatggagaggagaacacggtacaagagaccc

SEQ ID NO: 1725 - DNA, 1174 bp, Homo sapiens
aaagtctaaggatctccttggggacaatctgcccttcataaaaaccttcctttatcaaagacacctttgagttctttttgctagcacttggctcaagagcctcatctccagtgggtctggtgctgcccttttccacagtgtggtgggggtctgggcagtcttgacatgacagtctgctgtccaagcatctcaaagccattgtcagtgggcatcagtctggccattgaagaaaggagggttaccttgttgaagttgccatccaaagttggttttccttgtttcctcgagttagcaaggaaggacctgggaggactagatgacccagtttggggcacagtttgtttggcttggtgtcctctcgactcagacggtgaaagagggggtatgaccaacatctttagggggctgagaggctactgaactcctcttccagcttatttctggttaagctaatacacaggtgtgatacggagtagatgacttttccctgctctgatgtttagttttatttttttctctaacttgcattgattctgcttcgtttttgccgtttgccgcttctgttttggtctctgtctgtctctgtgtctctctctgtctctctctctcactctatctgtgtctttggaggctaagctaagactgccccatctaacctccttcccccctctctgtggggtgtctctctttctcttttttttcccctttttcttcttcatacagagctcgctgcccaaatcattcaagaggaagatctccgttgtctgtaagtccagccccaaatccctgataaaagtcaggaataccataaaaaccagcattcattgagaaccagaatttcattctcaatggcattcttgggtcactccctcctgccccaccccttgtgcctagcaaatctgaatcctttcctatgtagggtttcattttggaattcaaaacttgagacaatccccatcatattgctccagtcacattttaatgagatacagtgtgaggtgtctgagaccatgtcccatttagccttagaggcatttattctttcagatacctgaatactcaacaaggaatgagtttcagggactcctatgtgatgcttagcagtttatgaattattctgggtattttgttgttgtttttttgagacggagtctccctctgtagtaccctaggc

SEQ ID NO: 1726 - DNA, 1341 bp, Homo sapiens
ttttcactcccacctctactgtttgcctgccttctattctctctattttctagaatcttccaatcaagcagctgtaactttacatgtcctccacccagccccctcccctgccccctgggaagaccaggagggagcactccagccctggggggttaagcctctgtagctgctgtaacttgagaaaagaaggccaggcctctggagccagcagtcggctccctgtggcctgccaaaggataagaaccttgctcactcagctccctccctcttttctttcccctcccctgctgcagcaaggccctcccccatccgcacacacaggctgctgggtaagtggcaagatggctcccctgcatgtctccggctgatcgctgccgctccgccaatacaatagagccagccactaccagcagcctggccctcttcctccttctccagagagaccaatccagccgaactcggggtttgccgtgaggacttaacgcttatctcttaaaagccagatctgttttagcctccccgcaccaccaccacctccccttccatttaccattttttggatccccggttgctacatctcaattttctctctctggatcgggtggctggggaggaggtggtgggatcttggaacaaggaaggtgtggttttttttctttattttttttaggattttttttgtttggtttttgttatttcttccattccagaaagggataaacagcacttccagggggagaaaaaaaatcatgttatcagaaagcaaagaagggtgagagcttcacatttccatgtatgccttttccccgccgccctagctcccttcgtcttccttctcttcctcatggctttcattccgtctttcgttttggtttgttttcagtcattctgccttccccctttgtcctgcctgcccagtttctaattggccccacatgccctttctgtatgggaaatagatattttttttgtataagccttttctctagatgtaagcagctaaatctcgtgtttctctgggggcctgtttagctgggggcacagttccgattttcccctccccctaacccccctagtgcatcccttcttgactgctctagggaggttcttctgacctctgagtgtcagtcagtcagcctgttgggaatgctgacttttctggtggtggttatcggcctgggaggcttggtttcccctctcctgagccttaggcctctgatcatcttgatttgattttttttgcttggtgtttgggtggtagagggggtgagatttgagatagaagttggggacgaagacagaaatcaaaggtggaaagatagtttatctgaagtgaatctc

SEQ ID NO: 1727 - DNA, 1178 bp, Homo sapiens
cttcacagtaactggggcaggggcctacggggaggggcttgtactgaactatctagtgatcacgttaacacctaactctccttctttcttccaggggccgggctagagcgacatcatggtattccccttactaaaaaaagtgtgtattaggaggagagagaggaaaaaaagaggaaagaaggaaaaaaaaaagaattaaaaaaaaaaaaaagaaaaacagaagatgaccttgatggaaaaaaaatattttttaaaaaaaagatatactgtggaaggggggagaatcccataactaactgctgaggagggacctgctttggggagtaggggaaggcccagggagtggggcagggggctgcttattcactctggggattcgccatggacacgtctcaactgcgcaagctgctgcccatgtttccctgccccacttcacccccttgggggctgctcaagggtaggtgggcgtgggtggtaggaggtttttttttttacccagggctctggaaggacaccaaactgttctgcttgttaccttccctccgtcttctcctcgcctttcacagtcccctcctgcctgctcctgtccagccaggtctaccacccaccccacccctcttctccggctccctgcccctccagattgcctggtgatctattttgtttccttttgtgtttctttttctgttttgagtgtctttctttgcaggtttctgtagccggaagatctccgttccgctcccagcggctccagtgtaaattccccttccccctggggaaatgcactaccttgttttggggggtttaggggtgtttttgtttttcagttgttttgtttttttgttttttttttttttcctttgccttttttcccttttatttggagggaatgggaggaagtgggaacagggaggtgggaggtggattttgtttatttttttagctcatttccaggggtgggaatttttttttaatatgtgtcatgaataaagttgtttttgaaaataaaaattgtttggccttttgggtgtaaggattatttatcttcctattctctcttagatcgcagatggctattaattctgccttgtggtagaagtactggtgttgtggaagggaggttgccacttgtgaattaaggagtaggaattacattacaactagcaggaacattatgt

SEQ ID NO: 1728 - DNA, 1178 bp, Homo sapiens; identical to SEQ ID NO: 1727

SEQ ID NO: 1729 - DNA, 1202 bp, Homo sapiens
ggaaagagccttactaataaaattgattttgcttatgaattaaagcccctttttgcacatgtattgtacgactggagtcgttgggtttgggatatttttggtgagtggttggtgaaaagggaaattttttttggaagtgcaaaacatttgtattgttttctttgataatatatttttcccaaaaactaaaaattggttacgtcacaaaaagtattgagagacgaggctggtataatcaactctttcaacccatgttgccacaacttcctgtatgatttgttataatacaatacagattgagatattaacacatgaattttaggttttattagtgttatctgggctggccaccaggtggcataagtggttcaagaaacttgagcttggctgtaatcaaaagcaagatagaacctttccacatcagcaagattattcttatctccacttctctgaatgtttttcatttctttctgaaatagcatgaacataaggctgatctttggtcagttactgagggagtttgtagaaaatagtagagtgagtaagaaggctagagtgaagagtcagtatagtcttgtgtttttcagactctgacccccacccccccgccttcaactgagggtcattttaccagagtcaataaaggccaacccttctataaagagctggcaaaaaaaaaaaaaaaaaaaaaatgccagcagacaagcagaacattcctagcttaacagccaaacaaatgaaaatcccacagaaataattagccaaactcaagccaggagactggtgggcgttatacatctgagatcttgtattctaatgagagaataacctctgttggtgagatgtcccacaggccttggataatacagaaagtgaaaaaagggattaaaaaaagatagaagttgggtctgtagaattaattcattggagtttttaaaaaaggctttgggtctcatgaacatctgattttaatgtctagtattgctgggttatatcgatagacaaattaatttgggttatatgactaaaacctcgttgattctgaatttctgaatttggatttatactattcagcctgattggggcaggggtctttcactcagctgccgcttggtagaaagtagttaggagactggacctatggctgtcttaggctaattctgtgatcttgggcaaatcacttaatatccctggcctttaat

SEQ ID NO: 1730 - DNA, 1175 bp, Homo sapiens
ctagatactgggaatgttgaccagtgcttcagggctgtgggcctcaactcctccccaccctgcccaccctcaggtgtgagctgtcagtggagaagtccacagtgctgcagtctgagctggaatcctgtaaggagctgcaggagctggagcctgagaataaatgtgaggccccattccgtgagagtctgctcccagagcccgctgaggaaacccctttccagtgtggccctgagaggacagcaggaaggcctcaggaggatgggagcagaggaggttccaagagaaaccctccttttccctgccctctcctcagggtgcctgcttaccatcatcctgctgatgcgggcactggaccccctgctgtatgagaaggagaccctgcagtacttccagaccctcaaggcaagttctgtctgcagaacagaccagggggaggcccagcaggcaggaggcaggcagctgacatgcataccctgcccacctcatccactccaggccgtggaccccatgcgggcaacgtatctggatgacctgcgcagcaagttcttgctggagaatagcgtgctcaagatggagtatgccgaggtgcgtgtgctgcacctggctcacaaggtatgggctgccatgcatgccttcccctggccctcatcccgctggcctccccacgtccctgactttgcccccagtctcaggtgcctttgtggacttccaatcaagatagagttcatccctgcctcccagcttgctcctcttccaggcctttctgtcactcagcccattcttcttcttgccactcactttcaaatcccgagtcaccaggacctccttgtgctgtttcttccccaggctggtcacagcttcatcttccttcagagtgaccgctagcccactcctcccacacattccagcacatctcaccctggagcaacctccaatacctgaaggccaaatactttccagagattcctgagaagttgtccaggctccactttcctagtccttcccaacacattagttttatcacatcaccacagcccacctccattcctgccaaactcatctctgcctcatcaggaccagtccccatgggggaccagtctttgtttacccagcaccctccactggcccctgtacctccgaactccaggcctcctcctcctcacccaccccactgg

SEQ ID NO: 1731 - DNA, 1123 bp, Homo sapiens
tttgtgtgtctaaagtggaactgaatagtaggctgtgagaagataggaaagaggtagtgccaatctccttgcccagatcataaatccagactcagcagggtaaccacatgggcaagcacaaggtaggtgcttggggaaaggggaagtaattggcattctgtgtgataccaaggagaccatttggattttggcttctaccaaagagaatggagaattggttgacctaaatggaaccagtccctttaagtaaggggaggaaagggggtgctggaagatggccctcttcccaccacctagatcatagcttgaactgaagccaaggacagagtgctgcccccttcggcatttactgatgtgccctctttaaatcatgatgttatctaacccaaacccagacccaggacctagtcacagctccaacctacacttcctattaatcttaaaacaaagcaaaacaaaacaaaaagatatcagcattgtagcctccaatctgagcccatttcccttctctggctaccatacctccttctcctatatgataccattcactactttgttcaattatccagtctagacctgcatcttgaggccacacccagccttctcactccccacacccctctttcctctctcactgctccttcctggtctcttctcatctggccccacctctaaggagtcctcctgccttctgggttgccctggaaaacagactatcccccctcctagtgaagggagtgggtaggggtttcagccccaccctcaggaagatgcgtcttccctgtcctctgctctgtggtacttcctctctggctgatttagcaaacagcacctagacctggggccaggcctttggcagtgggacagatccagggataggctacaccaccctgccctgaccctgggattggcatcagcttccaaccagttcctgccaaagcttgtaagtaagtttcctgggagcggccgtggttgtggtggtggtgggacagtgtgcagccatgaaagaaggtgcaaaggaatctccaaagaaagcctgaccagcgtaaaaagttgggaggctttgtccttgtcacttgtccactaaactcctcccctccctgttattcctggttgaccctgg

SEQ ID NO: 1732 - DNA, 1213 bp, Homo sapiens
gtgttggagatgactctgctgcctgagaacaacatggcggccaagtaagtcccatgcaacttcccctcagtccgcaggctttgtactagctttctccactgggcctatgctagcccacttcttccttttcccagaagaggtagacatttttcctaggagctggcttcaggcctacccaccatctggaagaggacttttggggttgggggtaccccagagaggccatctctgggttagaaaatagcctcctaggcactcatcgaaagtcattcaaggctttggatggagggcgggaacttccctctttagggatgtatcaccattttggcttcagctaggagggcttgccatccatcctttgcctccagcattgactgcgcgggaatcctgaagcttcggaattcagacattgagcttcggaagggtgagacggacatcgggcgcaaaaacacacgtgtacggctggtgttccgggtacacgtgccccagggcggcgggaaggtcgtctcagtacaggcagcatcggtgcccatcgagtgctgtgagcaaagaggccctgggccatgtctctgtctcttgcaactcttttgtctgtgtgtgtgtgtctgtctgcccattccctctgcagcgtcctgtgccctgtctgtcctgggtagctctatagaggactcagcttctttctattctagtttgcccctgccacagactctgtctctggggtggcccagagtgacactggaccctatctattcctggggtgccctgtgcccttgtttgggaaactccctggtctaccctgtttaaccctctctctgctctgggagcggccccttacatggtgtatgtgactccatggatattactggtttatttgtgtgtctactgctgaggagggctccctcagagccctgtggcagttttcccaaagagggtggggacagaggaggccacccctccatgcccagcccagccagtcctcttccttgcactgctctgcagcccagcgctcagcccaggagctgccccaggtggaggcctacagccccagtgcctgctctgtgagaggaggcgaggaactggtactgactggctccaacttcctgccagactccaaggtggtgttcattgagaggggtcctggtgagtacctgctggggaggggagggcaggcagggagagcttgggagtggcaggtgaaacatctctggcattg

SEQ ID NO: 1733 - DNA, 1220 bp, Homo sapiens
ctggtgtcagatgggatggcgccggaagagggtgccacagcggggacggaaggcgcccccaccccaactccacgggaatataaacaatttgtattttccgatcaggtggcgggacaggcttcattgggacagccctaacccagctgctgaatgccagaggccacgaagtgacgttggtctcccgaaagcccgggcccggccggatcacgtgggtaagtccatcctctggaagcgggtgggagggcagagttgggcggcgcagggcggggcaggggcactgtgtgctttctccgacaggatgagctcgctgcatcggggctgccgagctgcgatgccgccgtcaacctggccggagagaacatcctcaaccctctccgaaggtcagcccgggccctaaagctgatacccactagagcacagggaggacagtgccccactgatgagaacctgtgagctatgggtaatggagctcccagattccgaactaaaccgatatcccagactactcattctgctccactcctccacccccacctgctcctccacccagtcagccaattggcttaagtcctcacgtataactcaggatgcccaggaaatgaatgccctttccctctacaggagacgttgactgtttctcttaagccgaaattcagggctttacaagaaattggtatgaaatagctcccaggaaaagacagagagagggatatgtgcacttatgtatttagtggctttttatttcccatgtttctcctgcagatggaatgaaaccttccaaaaagaggtaatcggcagccgcctagagaccacccaattgctggctaaagccatcaccaaagccccacaaccccccaaggcctgggtcttagtcacaggtgtaggtacgccccccaaatcaccagccccttatattcgccaggggaacggggtaactcagacctctgtagctatgcacacaccagagcactggtcttttccaggcaaaatgacttcctaggcccttgatccatgcatgtttctcctaacctttgtgtactttcactaagaaattgagaccctgaaaaaacagtggggagtggcatcactcaatgccagggaaaagtccacctatcccaaagtcccttacttctcacaccatagttctttaggaacagagttcctggtcacctttgggaccaagtaattgcaaacaattatacacaccagccactatttga

SEQ ID NO: 1734 - DNA, 1183 bp, Homo sapiens
ggaagagaaaaaaggttgaagttttgtccaccagaacttataagttttagtggtcattcaccttctacaactaaagatacttccccttctatagctagagatacaggagtaagtaataaatggttgcttcttatatcgttgccacagtcataaaccttatatatttgctcgataaagttggtgttggaagttttcccagtaagaacacctaatgaacaaccagttctttacttaaaattatctaagatatttggtctcaggaggtgatgaagggtaaacagtgtttatttagcattaactttgtaccaggcactttacatatattatctcattcccctcctatctaaaccatatgttagatactgtcacaaatattttagtgtttaaaagcctgagacaacaaaggcagagaaagttaagacaatttgtccaaggtcacatagatggaaagagggtataggcagggtagggatccagctaggacttaactcagagcctgagtagcaggctacatatgtccagcagtaaaaacaagacgcagacaaacaaaagcagacacattcatacactagtaatttataatcagccacactggaactgggaaatattctctgacagaaagaaccccatccatgtttcaacacatatttctcttgtctatctgccatattgaaaggtgacaacgtgctagcaaccctccctggggataaccaaggcagagccagctccctctgctagtagggaggtgtggagggagaggcacaggcgggagctgggactgcacgggacggcgcttacgggccggcacaggttcccggtgggtgcgggctctgagggccctgcactcgatgcagcaggcagacgcctgctgggcttgatcgggtgtcaagctccctctgggctgccagagtgcccgggctaggtgccgcaaagtcccgcagaaagtgccactgagaggtgaaggcagctgggcttctgggtcgggtggggacttggagaacttttctgtctagctaaaggattgtaaacacaccaatcagcactgtgtctagctagaggtttgtaaatgtaccaatcagccctctgtgtctaaaggtttgtaaacacaccaatcagcgctctgtgtccagctaatctggtggggactcaaagaacttttgtgtctagctaaaggattgtaaat

SEQ ID NO: 1735 - DNA, 1270 bp, Homo sapiens
ccgggatgcaggaggagagcctgcagggctcctgggtagaattgcactttagcaataatgggaaagggggcagtgttccagcctcggtttctatttataatggtgacatggaaaaaatactgctggacgcacagcatgagtctggacggagtagctccaagagttctcactgtgacagcccacctcgctcacagacaccacaagataccaacagagcttctgaaacagatacccatagcattggagagaaaaacagctcacagtctgaggaagatgatattgagagaaggaaggaagttgaaagcatcttgaagaaaaactcagattggatatgggttggtcaagtcggccggaaaatattccccccaaggagttcctctttaaacacccgaagcgcacggccaccctcagcatgaggaacacgagcgtcatgaagaaagggggcatattctctgcagaatttctgaaagttttctttccatctctgctgctctctcatttgctggccatcggattggggatctatattggaaggcgtctgacaacctccaccagcaccttttgatgaagaactggagtctgacttggttcgttagtggattacttctgagcttgcaacatagctcactgaagagctgttagatcctggggtggccacgtcacttgtgtttatttgttctgtaaatgctgcgttcctaattaagtaaaataaaagaatagacactaaaatcatgttgatctataattctacctatgggatcaataagcatgtcagactgattaatgtctactgtaaaaaatttggtagtaaattttcatttgatattagatataaatatctgaatataaataattttaatatactagtcatggtgtattgtattttaaaaattatctgcaaccttaattcagttgaagtactttatatttcaaaagaatgaataacattgataataaaatcgctactttaaggggtttgtccaaaataaatattgtggccttatatatcacactattgtagaaagcattatttaatttaaatggatgcaggttgtctactaaagaaagattatacataactatgctaattgttcataatcaacagaaaccaagatagagctacaaactcagccgtacagttcgtacactaaactcttgttgcttttgcattataaggaattaagtctccgattattaggtgatcaccctggatgatcagttttgtgctgaaggcacctgctcagtatcttttcgtctttatcactctgca

SEQ ID NO: 1736 - DNA, 1175 bp, Homo sapiens
tggtcttgaaggatattccatccaggttatgggaaaatcttattgagtcacctgataagattcttttccttggataatttgatgtaaacactggtggattcctcaggttccaatcttttatctgttgctccaactgactgaattacagttctcctttacatcttccattctgatagtatcattctaaagatgtcactttgttaccttgttttaaatttagcaacttcctatccttgtcaattaacttgtaaagtaatccaggtctagaaaaccacatttagatctatctaatccatctactgtggtgcaaaaatctttggatggctgttctcatacatcatgtgtttgcttttgagcctttatagtctcataatgtgctttttatctgaacttacacaagaattattaaattgccttgtgcattagatgtattgtcttcttcctttcttaatctatttgtattatggttattggcaaactggccttatttactatcaggtctaaatttcttaaaagctgggactattacttattcttgtttgttttttctgtagtctcaagtagagtcacatcttttttttttcagaaatgtagctttacattcttcatttatttattaattctctccttccctctttcccaccctctctcccttcctttcttccttcgctcctttcttccttcctttcacaggcatttatgaaacatatactatttgccaggaatgtattaatgtctgagattacaggtataaaagatgtagacccaggccgggcctggtggctcatgcctgtaatcccagcactttgggaggctgaggcgggtggatcacctgaggtcaggagtttgagaccagcctgaccaacatggagaaaccccgtctctactaaaaatacaaaattagccaggtgtgttggcgcatgcctgtgatcccagctactggggatgctgaggcaggagaaacgcttgaacctgggaggcggaggttgcgatgagccgagattgtgccattgcactccagcctgggcaacaagagcgaaactccatctaaaaaaaaaaacacgtagaccctaatagcatagttactgccactcattgattgccttaagctcttcatgtaattcatataagaccaccaaaacctaagtgttaatactccccacttgttttttgtt

SEQ ID NO: 1737 - DNA, 1400 bp, Homo sapiens
gatatgcccccacctctggggtagggatgatatctagttacctctcttgccactcacacacacggggagctaaatctgtttctaaacagagaaggcatagtcatacccaacaaaaaggctggagccctacactacagcccacacttgtagtcatggagaaaatatgaatatggactggcatacaccacataacacagtggggaaacatggagctgggaacagatgacagagaatataaatatgagccaggtagatctggattctgttgaactgcacaatacctgaggtgtttgagcaagcttattttaggaaatattcctcaccttgaaatttactgaatgtttcttccatatcagacacactgacacagcaatctccctgtaagcatagtcatctctaagtagaaaggaaaatttattttctccctcttagtcatattttgtctgatgtttatattctttgtatgtgcatatacatacaaaatatttgtttatattctttgtatgtgcatatgagtgtgataagttagttttggtttttacattagagatatttagagaagcagataatctttttcttcctttagtaaatcgattgggcgggtgtgtgcgtgtttgtgtgtaagaaggcaggccctgtggacattgctagtggttgaaactagaataataacaaaatgtaagttctgcttttctttgtgtcctcagcaaatgggaaataaagcgctgtcagtgttgtggttccagtggcacacatttagcctgctcctcattacggtcatgggagcaaaattgggagtgtttggaatgtaggggtattatctacaattcaggtaatttttttgtaattttgaataaagtttttattcaaatgtatatgatttaaaagtttttacctatatctctattatgctaacatggaaatttaaatctgtaggagagttccaaaaagccaaaaaacatgtattacccaattctaataatgtggggattacagattgtttgttggaagagtcatcacctaaattacccagacagtcacctggatcccagagtaaagatctactgaggtatgtattttgaattggagaaatacataaaaatctatttggagaaaattatgataggaaatgccatatacatttagaatattaggtgatcatacagtagtctagaagaatgtttttcagccttcaggacccaacatttgatcatgaaatcaatgcaaccagcattttaaagaaaatgaaatgggatagaatagaatacaaaataccaaactgcatcatacgtgggaaaagtgtatctatcctactgcatcatacgtgggaaaagtgtatctatcctaattatttttttgtgtactgagtaatgatgtaaaatatattttttattatagat

SEQ ID NO: 1738 - DNA, 1211 bp, Homo sapiens
ggtctccctgtgttatccaggctggtcttgaactcctgagctcaagcattctgcccacctcagcctctcaaagtgctgggattataggcatgaaccactatgccctccctactttactttttcatttcacatgttgagagatcattccaaacctgctaatagagagcatccttacttttttttttttttttgagacggagttttgctcttattgcccagggtagagtgcagtggcacaatctcagctcactgcaacctctgccttcaggtttcaagtgattcttctgcctcagcctcccaagtcactgggattacaggcgcccaccaccacacccatctcatttttttgtatttttagtagagacggggtttcaccatgttgctcaggctggtctctaactgctgacctcgtgatccacccgcctcggtctcccaaattgctgggataacaggcgtgagccaccgcgcctgaccctacatcctcacttctttttaacagctgcatagtattttgtgtagataggccaaagttgatccacctaatccactattgctggacagttgtgttaaattttcataaaacgtttgtagctgtgttctttcttaaatgtgtgagcagtcagtcttgctgcctcaaactctgttgtgtttcctttttgttgctgttgttaagagttgttagcagttgtggaaagtttaaaattttgtgtgacactttatttcatggcttgcatttaaatctgaacttaggatgtttttgctttgaaagctgttaactggggcttgcttttatttaagttatctttcactgaaatcctggagaatagagaatgagaaagaaaacaaagataataggatgaagtgggttgaaagagaaataatatgagagagtaacaatggataagggtaacaatatgacactgatagatatctcagataacaaaaacatttcacagtggcctggaatagtatttgttgtgttgcttttttgttttcttttttttgagacagagtctcgctccgtcgcccatgctggagcgcagttgcgcgatctcggctcactgcaacctccggctcctggattcaagcgattcttctgcttcagcctcccaagtagctgggattacaggcgcctgccaccatgcccaactaatttttttttatttttggtagagacagggtttcaccatgttggtcaggctggtctccga

SEQ ID NO: 1739 - DNA, 1164 bp, Homo sapiens
gtgcagtggtgtgatctcggctcactgcaacctccactcccaggttcaagtgattctcctgcctcaacctcctgagtagctgggactacaggcgggcatcatcatgtccagctaatttttgcatttttggtagagacggggttcactgtgttacccaggctggtctcaactcctgacctcaagtgatctacccgcctcggcctcccaaagtgttgggattacagacatgagccactgctcctggcctcatttataaaattaaaatgtttccgaagtattcatacagttagtattattttcatgtaaaaatgagagagctctctatcatacacatgtattctgttctagcactctttcagtaacgtaggtgtaattatttccattacaaaagaaacagaaaacaggctgggtgcagtggctcatgcctgtagtaatcccagcacttcaggagtctgagacgggcagatcacttgagatcaggagtttgagaccagcctagccaacatggtgaaacctgccgtctctactaaaaatacaaaaattatccagatgtggtgttgggcacctataatcccagctactcgggaggctgacgaaggagaattgcttgaacctgggaggcggaggttgcagtgagctgagatcacgccactgcactccagcctgggcaacagagcaagactccatctcaaaaaaagaaaaaaaaagaaacagaaagcaaaaatgtcgacgcctagagagtcttaagtagctgacatcctttagctaatatatggcagagaggtttggatttcatgtagccttgtttcctagtgtagtggcctttcttggactgcttgttttagtataattgtttttcacccatcttccaaatttttagggacccctcattcagagctcttggaagaagtcgaatgtactccgtcacctcgattagctctcactttgaaagtaacaggtcttggaacgactcgtgaagttgaattaccactcaccaatttcagatcaaccatcttttactatgtacaaaaattgcttcaattgtcctgtaatggcaatgtgaaatcagataaacttaggcgtatttgggagcccacatacacgtaagaaattttaacttaatgttttggtagataatgtcctagtgtagagccaagaagcatt

SEQ ID NO: 1740 - DNA, 1186 bp, Homo sapiens
tccataaaaaatgtagaaatcttcaaaaacaggaagaaagtatttgtcattctgacttaagattgacttcataaagttgtcttatgaattctcaaatggttcttcatcataataggatgaaatatgcctatcatatccaaaccacatgttattttatagtgattaaatcctgtgtgcttccatatctgtctttgtgagttcactttaaatacatgcataagattgtagtgaatttaaaacactgaggaggtccaccctgactcttgtggatggtctgacactatctaacacatgattttttatatcatgattttcagtaaagaaatatatgactctaagaatcatattctactcgtttgagttgtaagcaaagtaagtccatctattattaatagtattagcttgtacttccctctattccagcaggctaagtaagtcaatgtggtgggattctcttaagcctcacctcatatttattacatagattcagatatttccaatcaaagcatatatcacttgagaatataataaccagttaaatctgcaaaatctgaaatagcatggttaacatagagatgtgtagaatcttcctcaattcaccttcagtataattggacagagagggcaagaaacctgtcaaagcttaacatctcctatacatcattagagatacttgattgataacctgttttaggatatttgagtttccagcatgccattaattcattgtctcgttttaattctacttactgtttctacattgtatttatctacatactgatatttgtatgccaacagcattaactgaaatctcaattatagccagtagagggaggtatgtggaaacataataaattgtagcattacctctcaggcctgttattccaaaattgcctatttactctgtcactagctggaggcctagatagctagatagtgatttcgagtggaatgaagtgccctggaaagtttccttacaagcagtcaataaagactgctggctaaacagcaaagtcctatttgtaatagagaaaactagaggtatttaaaaataaatgttagttaagtgaaaattgatgatgcttaatgcctagcttaggaattcatttgggtgttcgccttggcaggtttttaccagattaattccatgatttgtagagaggggtaaccatatgaatacttacta

SEQ ID NO: 1741 - DNA, 1219 bp, Homo sapiens
ttttaataaaattccttattatccttttagtgccttctagcatctgtagtgacgtctttcttccctgatattactaaattgtgtcttttttgttgtggttgaggtttatcaattttattgatcacttcaaaggactagcttttgcttttattgattttcctttttttttccattttttaatttattgaattctacttgtttctttcttctttggtttttctgaagtttcttaaaatagaaatctagattactgtgttagaccagttttcttttctagtgtaaatatttaatggtccagattttcctctaagcattgttttagctgtattccatatagatatgctgtgttccatttttgtttaattcaaaatactttgtaatttccttttttttttttttaaattaactcatcggttattagatttctaaatatttggtggttttccacatcttttttgttcatttctagtttaattattttgcatttgaaaaacaaggagtttgattccaggttaagtttattgaagagtttaatgagaccttgaactgaatgtttattatagtgtgaagggttctataaatgtcagatcaaattctttgagtgtgttggtcaagtcctgtatgtcctattttatatcctatttttcttgtttaacttttgtaaaattaaagaatactgttgaaatctgcaatcatgattgtagattgtgtgtttctcctttcagttctattagattttacatcatgtattttgaagatcttttaatttcatacacatttaggattatgtcttttttttttttttttttttggagacagggttctctctctaacacccaggctgaagtgcagaggtgtaacttcagctagttgcaacctccacctccccggctcaggcaatcctcccacctcagcctcccaaatagctgggactgccaccacacccagccaccttttttggttttggtagaaacagggttttgccattttccccagcctcgtctcaaactcctgagctcaagcaatcttcccacatatgtttgttctgaagtctactttgcctagtattaatatagccaatgttttttcctttgagtagtgtttgtgatatatctttttctttacttatgcttttatgtatcttcatttctaatgtggtatacatctttatagattaccttcaagtgatataccactttaatgtgttttataagaacct

SEQ ID NO: 1742 - DNA, 1197 bp, Homo sapiens
attcaatggaagattgcagaaataaacaataagttttaaattatgcgctgttctgcatagtgcagtgaaatctctcaccattactgttctgtcctgcctgggatgtgtatcattcctttgtccagcatatccatgctgtatatgctaccagcttgttaagtcacttaatagccgtcttggttttcagatcaactatctcgctatcataatgcccatgttcaaataacctttattttacttaataatgactccaaagctcaagattagtgatgctggcatattgttacaattgttctgttttattattagttattgttaatctcttattgtgtctaatctataaattaaactttatcacaggtatatatgtataggaaaaaacatagtatatgtagggtttggtgctatccatggtttcaggcatccactgggggtcttggaacatattccctgataatgagggggactattgcagtttgaattaataaggcatacagtttcttctccacgagcacataccggtcagtaattgaattcctgagttggctttaagatttggtgaagataaaggacagactttgttttcctcataagccaccagccatatttttctctgttcttcagccatggggcatgctccaaactcttccagccatcttgcagtggtgtgctttgagtcacaagggtaagtagggagagaatgtggaacctttattttattttcagatttttttttggagacagggttttactctgttgttcaggctagattgcagtagtgcaatcattactccctgcagccttgaaattctaggctcaaacgatcctcccacttcagcctcccaagtggttaggactgcaggtgcacatcaccccacctggctagtagagcctttagaatggggtctcaaactggctaatacatgagctaaacctagcctgcagcttgttttgtatggctgctgggcaggctttatgggtgtgcaacctgtgtagttgcatagggccctgcactgagaagggcccacacttagtttaatactctgctgtaaccatcttggaattcttaataattttttaataagaggctccacatttttattttacagtggaccttatgtagccagtcccatatggcccttttggtgcccccactgatactgcctgagccctgtagatgtttgagtttcagactcc

SEQ ID NO: 1743 - DNA, 1233 bp, Homo sapiens
ggggacctcaatgccatttcttgagttttagaggagaaatgatttgtttaatacgtggcagagctaagaccagaacctcagtttcctagcctcaggctggtgtttacttgtgttatttcagtgtctctgatgcattggtttaataggaactggtttatcctgctttgtgggggttcagctccacccttcaatgagctccctgaaaagaacaaagtccacattattgttacttgttttggttttagggggcatgattgtcactggcaaggtgtgaagtgtacgtaaattctgaaaacattttgtgctcatatatgcaggggtggggagagattaaaatggggtctgttagggtgggtggagggatatggatgatgcctataatgaaagctccagttgcaaaaattgattcaacttatggtaatgggtgctgatggaattaatggggttttatgaatattccatgctttgatctgcttggcattagggagatctgcaaggagcaaatttgaaatgataaaaagctctagactacttttttggtgcttcacctgtcatgatgctgtcgctggtcttgcttggccttcaccttcaataagaaactccatcttgcctcatgacactctgaaaaaaaaaagggtagatgtaagagacattttttttagagagaaaagccgcatccattatgcagattggaagcatttacttaaatgtttactctgattcaagctttgaagccccagaattcaggtcccatagccataaaaggagaggaattcttcccctttatcttttgatggcattggtttgaacagaagttctgtttttactaagattgttattttttatttgcaactaaatgtctctgttttttatttttatttctttttttttttttaatttccacaggttattggggaacaggtagtgtttggatacatgagtaagttctttagtggtaatttgtgagattttgttgcacccatcaccctagcagtatacactgcaccctatttgtagtcttttatccctcacccccttcccaccctttcccccgagtccccaaagtccattgtgtcattcttatgcctttgcatcgtcatagctttgcactcacttatgagtgagaacatacaatgttttgttttccattcctgagttacttcacttagaattatagcctccaatctcatccaggttgctacgaatgccattaattcattcctttttatggct

SEQ ID NO: 1744 - DNA, 1128 bp, Homo sapiens
tcaaagcagtttatttatttattactgttggcatttctttccaaacctggaatttaagaaccagaatgcatattttggatttagactctgaatatagtttgctttgatttcctgcaccatttatttgtagctgcagtttagtctcactctttagggctcgcaaggtcatgccttgtaaaatatatacttgaatgcatatttaatagaagtctctcagtagaagcaagtatatcttgactgacataacacatcctaaaattaatttaaacaatgctgggttaaaatgaaactctttaaatcagaggttgaatgtagagtgcactattagaatctagtatagatttgacacctaaaatctaatatagattttacacactaaaatgctacagttatcaatgatgttaagatttttctgttatgttgcaatagtgatagtgtcctataaataactaggtgatgccttttttgggggatggagaaataaattatgaaatgaaatatagtgccttagtagatatttgcctttaatgtttttgagttaccatggtttagcgacaagtagtttcaatttttttttcaaataggtgagaactgcaaccaactgacatccaatattatagaaccttatgattttaaacttaagataaaaaaatcttatttcaaatttcacgttattgaattaactcaggttagaaatgcaattgtttgacataagccagtcttgaattactatcagctgttgtatttatatttttccacttcaacttctagaatcatttaaaactatctgatagtttggaacatcaatttgagattgaatcctcattttagcttggtggaaagaactgaatgagaaaactggatttttttccctacttgtcaggaggcttactctgaagtagtttgaatttcataaatccattaatgattagtaagcttcacccagaactaatctgtggccagctacaggcttttggaaagaggcatactttctacagcttaaacattacattcaacttaatcatcaatcctagaaacctaaaatttagagaaatttgcctctgcctgtctgaaaatttgtctctgagttagaagtcctgaacagaggaagacttcagattgatttct

SEQ ID NO: 1745 - DNA, 1104 bp, Homo sapiens
cttgagactagagactccccaactcctcaactcctccaaagactggagacagcacgaattagaattcatatgtatattttactaatatatccttaaggttggcatcttttacaaagctattttgtttgtcttctctgtaacttgctgtgagcaccattgacaagggagtagtaagtaaggtaagaatagtaaaaacaaaatactaagaggtggcatatgaaaaagattaattggggatgatgaattataggaaaatcatgatttaaaggaggctcagttaagagttaagtagaaaaggggtctcaagatgccagtggataatctagtaagtttttaagctaagtaattaaattttttcaaccaatagcagaaaatcatcaggaaaagtatttagaaataactgaaaacctctttcccttttaaaattaagttacgctgttgtttttctgtggatttttttttttttttttgacagggtctggccctgttgcccagactgtgcagtggtacaatcagaactcactgcagcctcaatctctcagcctcaagcagtcatcccgcctcagcctcctgagtagctgggactataggcatgtgccaccacacctggctgatttatttatttttttaacttttagtatagatgaggtctggctatgttgctcctgagctcaaacaataatcccacctcggcttcccaaagtgctagggttatagatgtgagccactgcacctggccttttctgtggatcttataaatcaaccacactgtcctatgaagtgtgaaataacaacataatttaccttttaaagggatgtacctgtaccagtcttgctgctatacagtagtcatatatttgagttccttttttataccagacactgatttaggtgttatggattaatggctccccgactcacaaagccagacatacttgctgcttctcaaatatgccaggcatgatccctgcctcagggcctttgcattactcttctctttgtctggaatttatttccccagatatcaacgtggtgagttcttttacttcttcatgtcttcctccatatcactttcattgaagccttctgtcctatctgaaattt

SEQ ID NO: 1746 - DNA, 1391 bp, Homo sapiens
atgccacacaagggaggctgggaaagtgattgtcttgcatttgtgcttcaagacagtgcatcccctaaacataggaaatgggttcaggtgacaaatgtcccaagatgtcaacagcggtttttgctgggtggttgtcttctatggtgttttaaaaaaagtattatttagaagttcaaatatacacaaatgtagacacaatattaaaatagatatcatctctagcttcgttatcagctcacgggcaattgtgatattgtgaaatatatatttgggccttctctcaccaggcatcctcgtggaagtgacatcgtgttggcctgcgtggccatccctgacacaccgccgtgatgcccagggaagacagggcgacctggaagtctaactacttccttaagatcatccagcttttggataattatctgaaatgtttcatcatgggagcagacactgtgggctccaagcagacacagtagatccacctgtccctccaagggaaggccgtggtgccaatgggcaggaaccccatgatgcgcaaggccacccaaggacaactggaaaacagcccagctctggagaaactgttgcctcctctgcaggggaatgtgggctttgcgttcaccaaggaggacctcactgaggtcagggatctgctgctggccaataaggtgccagctgccacccgtgctggtgccattggcccatgtgaagtcactgtaccagcccagaacactggtctgggacccgagaagatttcttttttccaggctttaggcattaccactaaaatctccaggggcaccactgaaatcctgagtgatgtgcagctgatcaagactggagacagagtgggagccagcgaagccacactgctgaacacgccgaacatctctcccttctcctttgggctggtcatccagcaggtgttcaacaatggtagtatctacaaccctgaagtgcttgacatcacagaagaaactctgtattctggcttcctggagggtgtccgcaatgttgccagtgtgtctgcaaactggctacccacctgttgcatcagtacccccttctatcatcagtgggtacaaaggatgcctggctctatctgtggagactgattacaccttcccgcctgctgaaaagatcaagaccttcttggctgatccatctgcctttgtggctgctgcccctgtggccactaccgccacggctgctcctgctgctgcggcagccccaactaagtttgaaaacgaggagtcggaggagttggatgaggatatgggatttggtctctttgactaaccaccaaaaagcaaccaactcagccagctttatttgcaaaataagcaaataaaggcttacatttttttaaaaaaaagtatgcatatatttggtct

SEQ ID NO: 1747 - DNA, 1250 bp, Homo sapiens
atggatttataaatgtgtagtaataatataaaaatattttttgaaatgattaataccaaagcctagataatggtttcctctggggaagaaaggaacaatatgatttgggcctcagtgatacctgtacagttaagtaaaacattggagataatgcaggtaagtgaaataaacatggaactacgtgtagatttattcatactgagtggtggtcctctgcaggtttgttcatgttattttcagtattttattataggtttgaaatatttcataatttaaaagaaaaaaggaaatattaatgacttttcaaaacttagaaaattagtataatggaaatattcattaggaaatattacagttaaggatgttcatgtggttaactaaatgaaaattttctatagtggatttcatttggatagtgataaaagtattttattttattcttagtctaaataagagatttataatagattgttgtgttaaatgcaatttcgggcctaggttttgttaataaaataaatcatgtttaattgcaataaagcatgtgttgaaaaggtgattctttttatatgcccttctgatcccaagtatggcagaaggatataaaggtcaccaagaataatttggaggttgccaaggacttatttaaaagtgttttcaagtccgaccgagaactctgacatttacaaatagataagatgtgaatatttaaaatcatattttcttttcaggattgattttaaagaagctacttcacacaggaaactccttaaaggtacaactatgtttactttccatgactttaaaaatactgagtagaacatacatcccacctgttaacacttttcctacctaagctttttcctaaagatctctgaattgtcttcagtttatttaattgaagtgagttcccttaaaatgtagcaagaggctgggtgcagtggctcacgcctgtaatctctgcactttgggaggctgaggtgggtggaccacttgaagccaggagtttgagaccagcctggccaacatagtgaaaccctgtctctactaaaaatacaaaaattagccgggcgtggtggcacgtgcctgtactcacagctacttgggcagctgaagcaggagaattgcttgaaccctggaggcagaggttgcagtgagctgagatcaagccgatgcactccagcctgggcgacagagtgagactgtatcttaaaaacaaaaacaaaaacaaaaaaaaaacgtagcaagagttt

SEQ ID NO: 1748 - DNA, 1162 bp, Homo sapiens
ttcattttgaagtttttctttagatactcataccctctgactaaattgcttgaatagataaattgtcatcactaagatacatgtaatttggggccttttgatgcttcagtaacaaaacaaaaatcagtttttcatgtatcataattcctttaagtctttattgaactaattcatcttaaagcaaattgaaaaacataactgagaactatacttggttagattggaaaagaacatatttgcttgtagtttggcactgtaattatattttttaatacacaatgtccctgagggttttacattagaaataatccccagggaatgtactttaagacatgaatgcatacaagtatacagaaaatattattaacacataaatataatgtcttcagttttaaacaaattaattttgtccctgctttaaaaaatatcttttcttgtgtatgatgtcacaaaatgacattagaagtacaatatttaatattaaagctgaaaaataaaaatcaggctgttggaagatagttatctcaattgattgttcatagttacagatggaactccttgttctactctttcccccttctcactactgcacttgactagtctttaaataaataagtacaaaaactacctcaaactcattcctttaaggtaaataaaaaagaaaaatatataatataattatatagtatatgtaaaaaaaaaaaaaaaactaagaccagcctggccaacatggtgaaaacccgtctctactaaatatacaaaaattagctgggcatgatggcacatgcctgtaaacccagctactcaggagtctgatgaacccaggagccagaggttgcagtgagacaagatacagccactgcacttcagcctgggcgacacagcaaaactccatctcaaaaaacaaaaactagatgagggtgatatcaagtaagaataccagcatgctgcaggaaaaataaagaatgctacctcatttcagatagaaacaaaaatatgtctccagagtttagctcttcctactacagttttctagaaacaactgaaaaggacaggggaagaagggaacttcctgacatcctatgctctgtgataggctcaggggacttattagggaacagagcagacatgttccctgcccttatagactttacatgagaca

SEQ ID NO: 1749 - DNA, 1324 bp, Homo sapiens
actataaaaatgtactttaggacattaaagaaaactcaagttagaagcataccattttcctttcatggaagggtacagtattacaaagataatttgtttaacttgatttattaaattctagttatgtgccctataatgatgtttcagtcagtgacagacctcatatatggcagtggttccataagattacaatactgtatttttactgtaccttctttatgtttagatatgcaagtacttaccattgtgttacagtgtcctacagtattcactacaataatatgctgtacaggtttgtagcctaggagcaataggccatagcttaggtgtatagtagatcataccatctaggtttgtgtaagtacactctgtgattgtacaattttaaaatctcctaatgatgatgcatttctcagaatgtatcccctttgctaagcaatgcatgactgcaatcctaattctcacatgttttggggaaaaaattttaattttgaaaaaatttaggaaagttcctaccaaatatacatgtataaagtttattaaaagtcataatgacccaggaatagctaatgacacagaagtagatcaaaatagaacacaatagagaacttcaaaataaaacaggtgtgagaattgtgtgtgtgaaaaagctgggttcaaataagttggtttgttagacattcatatgcctacccatcagccatttcgttctcccttccttgctgacaaagccccattttttttttctttttttttggcctaaaactctgtatggctgccttgtgctatagaatagggtgcttccctagcctagagagggtgagtgttgattagattctgtgccaatcatggtaattggcttacttgatcatttgatggaatctaggctaacgagacaaaggaagtctgaaggctttgaataagaaattttctgttgctcttaacaattgatacaagttagggatttgccagcatccctcttctgcttctcagtgaagatatgtgatatggatgtttgaagctaatctgcaacagccttctgatggccatgaaaggacaagtatggagatgaaagctatcacactgagaatagtgggatgtagatagaaagcacctgaattgtgcttctgaattaaccaatccaggaactgctttacctttggactttttgttatgtgagatattctttatattgttccatttgctttgggtatatgtatattgttacttgtagccaaaaagaaacctctcttagtagaaacaaagggagagttaggttattcaaaaattagtatgggacaattgaatatgcctttttctgcgg

SEQ ID NO: 1750 - DNA, 1735 bp, Homo sapiens
ctttctcctgggaaagagaatgtcagtgctttagacatggaaaaggagtctgaggaaaaagaagaaaaagaatctgagccccaacctgagcctgtggctcaacctcagcctcagtctcagccccagcttcagcttcaatcccagtcccaaccagtactccagtcccagcctccctctcagcctgaggatttgtcattagctgttttacagccaacaccccaagttactcaggagcaagggcatttactacctgagaggaaggattttcctgtagagtctgtaaaactcactgaggtaccagtagagccagtcttgacagtacatccagagagcaagagcaaaaccaaaactaggagcagaagtagaggtcgagctagaaataaaacaagcaagagtagaagtcgaagcagtagcagtagcagttctagtagcagttcaaccagtagcagcagtggaagtagttccagcagtggaagtagtagcagtcgcagtagttccagtagcagctccagtacaagtggcagcagcagcagagatagtagcagtagcactagtagtagtagtgagagtagaagtcggagtaggggccggggacataatagagatagaaagcacagaaggagcgtggatcggaagagaagggatacttcaggactagaaagaagtcacaaatcttcaaaaggtggtagtagtagagatacaaaaggatcaaaggataagaattcccggtccgacagaaagaggtctatatcagagagtagtcgatcaggcaaaagatcttcaagaagtgaaagagaccgaaaatcagacaggaaagacaaaaggcgttaatggaagaagccaggctttcttagccattctttgcagcagaagatttcttgataaaaaaggattacctttccttgtaaagaggatgctgccttaagaattgcatgttgtaaaaaatctttttggaaaatacagactgtttgtttaccagacattcttgtactttttgcataattttgtaagagttatttatcaaaattatgtgaggttccaaaatatgtaaaaatgataataataaaaaaagattaacatcccttgtcatcttttttaaatatcctatactcttcagtaagaatctgtatattttaataggcaaatctttaagtctgttcccttctaattctgtatcatacattgcttttgtagaaataaatgtgtgtttatttcattatttttgggatgtcctcgttgacacttgtataataaatatcctctttatcattttcagcttttaacactagatactgcacgtgattagaatgtttttgaaggtttcctcgtttttatttgccttggacagtttttagttgtcagagtcagagctttgcagctttgagggggaacagttctctttaaaatcatttgctattttctattctcccttgttattttaatctaagcattttcccccgtttctcatattttaaccatatgttcggtagataactaaacagtatgatctggttggcattttcttcctgatgatgggagcgtcattcttttgtcttcatggttacttgtgtgatataacatacatctgttaaagaaaatcacttctttctaggggagggaggtagaaaagtatctttcaaacttggtttttgagtttgtgtcttgtcttaactttgtgttggctctaacttaaacatgctgatatgtgttttcaagaattttgtttaaggaagta

SEQ ID NO: 1751 - DNA, 1202 bp, Homo sapiens
ttcattttgttccctttgttggtaacctgatttttttcctatggaaacttgcttttttcccccctttatctttggtgttctgacaatcacaatataatgcatttacatgtgaggctcttttcaattattgttttgttaaggttctctgagaaagattccaagattgaattagacaatgaagagatttattgaggaagaacacctgtgaaggattaaggggcgagagagcaaaattagattggagaggaccttcagacagtgattcaggtctgtcatcagtgaatggagagagagaaggaagaaaaattgggtgtaaacagtcttagtgcatctctgagaaagtctcaggcagggcagtggcaattcccagggtaaaaattgcctgttagaatagtccctcattaggtaggaatggctctattctggttcccctgctgtgttctgtccttggcttggagaatctcccaggaggaacctggtttttgtgtgcgtgctgaaggctaaagagctgtactcctcatagcaggatttttgcagaggagagacatgatttggtgtaccgtggctgccaccttgtgttaaggcacttactctgaagactcattttctgaaattctgggaatttttttttttaatctttggaaaattccttttctacttttcttatatttttagtctctactttttttctttttcttttcttttttttgtttttttttttggtaatttttgacccataggtaatttagtctttcaacttttgttctgaaaatttttttcaattatatattccagtcattctcttgaaatttttttcagtaaacgtacgtttaatcttcaagaacatttttattatacttgtttctttagttcaaactttgtttcacagatgttgtcctttttgtaaagatttattatcttcttcaatctctctatattagagctttctaaaagttgtcttctaaattatctgtttcctctggagttaataattaaattccatttgcttctcttgggtcttctgtcctcaccatgcttgctaagtctgaagttatccatgtttcagaaagatgaactagttaactagtactggctcatatttttttaaatgtaagatggactgttttcctgttacatggctttctcaagtgagaattcagactgggagatcttttttcttgtgggtagggcttggggagggg

SEQ ID NO: 1752 - DNA, 1155 bp, Homo sapiens
agaaggatttgttttctctcaggttggaaggttaccttagcacagccttcatcgtagaaatgcaagcagaagggtaaaagactttagtactgcctgttgcttcatgttgctccttttggggacaatacatttttaagatgccctttcggcacaaaatttgtggtcagaccctgttctggtatttggtttagataaaggatcattgtaagcatagttcaaatgagaggttaatttcacataccggacattgtgtattggggagaataagaaagagaaagtattagaggagaaagattatcctgagtacttgagaacaatcgttacctgtgtaggatctgaaatcagaacacttacgatctgggtgactttggaatggttacataatctctttaattcagatgctttatcctttaaaagagagaataatacagtttggtgagttttaatgaggccgtatatataaagcacttatctgagtgtctgggacatagaaagcaatcaaataatgttaggatttgaaggttttccaagttttcaatcagttgagataccagacttctacgttaattagaatactggtatgtgaattgcagaattcaacttagacaagaggccaccattggtactgatatgtttaactgaaccaagtcattgtattagcttttttaggtgatattgtggtaacaagctatctcaaatatctgtaggcttacaaaaacaaaggtttagttcttgtttacattgtacattggctgtaggtcatattaggctctgcactatgtctttattccaggatccagaatgaaggcatagatgctatccaggatattattaggctggtggtacagaaaaataaaggagtggttgatttgtgaaataacttttcttagaagtagcatctgtcacttccacagatatttcattggctaaaacaatgacaagcctgatatcagtttgacagagatatataatctaccttttagaaagaagctgtggatgtttttacagtaatacagttgacaagagttcacactttaggtgtaaatatttatttgcttttctttcataagaaaagcacattcaccctctccccaagtgcaatgtcgatcatggagttgggttcaaggtctgtgagtgattacctttgcatcagct

SEQ ID NO: 1753 - DNA, 1213 bp, Homo sapiens
gggctcgtcacccttgtaaacgcgttactctctaccaccctgagtaactgcgatcctttcctcttgccatctgcttatcaggacagaagatctggaccacggccaagctcacaaatcgggtattttttttcaattcctggtctttggggcctttattcgcctcccccttctccttttgtcgacttctcttaaccctccggccgcagagggttaatttttttttgtttttgtttgtttgtttttggcaacgtttccttaccctcatcactttgcgttttctttacaacgtacataatatggaaataggtctgtttttttccccctgtagctaaccgcctctcccttagacgttatcaaaatctttccttctaatgcagttcctctgtgggactctcccctaacctccgccccctccgtctgccgccctagcctccctgcaggatcctcaagcgtctctgcagcctttcagtctcctagagacagagattgcgaagacaatttcacttgcggtggaagttcttggcatcatggttctaagagaattctgccttgtggatttaggaatgatagtagacatttatttattttaggcgaactgagaattttgtgtgcattttctcctcataagtgatacttaaacggacacagtggaagagctggagtgtctagtgtgagcctgaatgctttggagtgtggaagagatattttttttttttgaaggaataatactattacttttgaatgactcgtgcgaaaagtctaagttatcatttgaagacccaaatttatgcacttcaaatgcaagtattcctaccctgctctgtaccaggtgggatttctcttaaatactttttaaagtcttggaataaatgagtcacatatgccaaacagctttataaataatgctcccagctgatgcaagtgcaaaaataatttctggatttttgccttaaagtacgatttgaatatcagttttgttttgttttgtttttgggggggtgggggtggggaatagactataatgtaaatgaggctgtgtaaatatacatcctatgttttggtttaaattctaggctgttactttggttttaatgagccattttcgtgtttaaatgaatctgcctaaattaggtttagctagcatgtttcattttagggacaggttaaagacagggaggtgaaaaacaagaaatgattgtagcagttgtcaatg

SEQ ID NO: 1754 - DNA, 1216 bp, Homo sapiens
tccatgtcttaatttgcaacattaagagaaacttaatagatgttgattcttaggacaaaagataatatatattaagatgtggggttttgtttgtttgtttttgaaacggagtcttgctctgttgcccaggctggagtgcagtggtgggatctcgggtcactgcaaccttctcctcctaggttcaagagactctcctgcctcagtctcccaagtagctgggattacaggcacacaccaccacacctggctaatttttgtattttgagtagagacaggctttgaccatattggccaggctggtcttgaactcctgacctcaggtgatccacccacctcggcctcccaaagtgctgggattataggtgtaagccaccacgcccggtttaagatacgttacttgaagccaggagtttgagaccagtcggcccaacatggcaaaaccccattttgactaaaaatacaaaaattagccaggcatggtggtgtgcatctgtaatcctagctactcaggtggctgaggcaagagaattgcttggacctgggaggcagaggttacagtgagccgaaatcatgctactgcactccagcctggtcgacagagcgagaccctaactcaaaaaaaaaaacattgtaaaattcctttccaagttattattagtgattttcttgcagaatatcagcaaaatgtacattttgaatttttttttaggtgaaaaatttacgttctggagtttctcgtgctgctgtggtctgtttaagtgatcttttcacttatttgaaaaagagcatggatcaagagctagataccacagtaaaagttttgttgcacaaggctggtgaatcaaatacatttataagagaagatgttgacaaagcattgagagctatggttaataatgtaactcctgcacgtgcagttgtttctcttatcaatggtggacaaaggtaatgttcaaaataaccttgaaatgtctttaaacaaaaaatgaaatgttgcaatcgggactgtagaaaagaaacaagcaaatcttagtagtatatcagtcaaaaaacatttattaaaaagttcctatgagataaacattatactacatgccgaatatgaaaagaataattttttattatttttctcatagaatatgtatacttcttttgtccctcgggcaccttgcaaaatgtctgccacacaaaatcatctaggcaatttggctttagg

SEQ ID NO: 1755 - DNA, 1135 bp, Homo sapiens
agagatggggtttcaccatgttggccatgttgatcttgaactcctgacctaaggtgatcctcccgcctcagcctccctaagtgctgcgattacaggcatgagcctgtaatcacgcctgtaaccatttcaccatgcctcatgaaaatattcttaaattgagataaaatttgcctctctttaacttcctacttgttttaattttgtcttctgtcataaatcaatctatacaatagacatttcagatttaacaaatacttacatgtctactcttacctatttgcaatgtgtacattttgtatttaattttctatttgataaagttacataaaaagtacatttatctattctctttgttttctcactctttttaagcagctgttgtatgctttctgttattctgtctaccctttaatccctacttgcataggaagcagttgaatataatttttgaagttagcattatcttctaaatttagaaataatattttaaaagtgattttatcttggaaagataacttaagagtaatttaatttttcagaacttttgagcatgctgttctagctgcaggaacagatttccgttctgacagactgtgggaaatgtatataaactgggaaaatgagcagggaaacctgagagaagttacagctatatatgatcgtattcttggtattccaacacagctgtatagtcatcattttcagaggtaggtgggaaattctgatcattgaaacatctttgattactcagatagttggtaatattaagtattataattatcttggaatgttatgtaagcttttattatgtggaaagaggaataaattttgttgctaatcacaacctacatgcttgcttttgacattttttcatatgccttatgaaatgtttagaaattttactgtttttagatagaagtttctccttattcattttaatggataaagagaaacaggaattctgtcttgtctaaggtagttcagagtaatgaaggaatgagaaaatagtacctaagttgagttatttatttatggcattaaattgacacagtgcctggcacatgatagatgcttattttttttgaaacttaatgatttgctaaatatacattattgtgattgctataacacctta

SEQ ID NO: 1756 - DNA, 1196 bp, Homo sapiens
tgcacttcaataatcattgctgttttatgtttatttgtaaataagagaatattttatttaaatattttatattgtatacatttttatttatagattatagaaattattaaaaaagaaaaatctgatgttcagtgatcattttgactagattataaaactaatttttcttattaaataaaacaaggtttattaaaagtgttactaaggatagtttaagaaagtaaaagctaagctagagatatactttggaatgtttcccaaaattaaagttgtactgttgtgataaatagtaaagttgacatgtctatgactacagccaacttgtcgattttccctatgtgtagatagtatacttttaagtgtactgattctaaatacatgtacttggtaaggtgtgggtgatgggtgggttgtgagataaatgacccagtaactaggaaagtagaaaacttaactgaatgtttatctgaccaaaggtgtgtcccagttaagtactgtcaaatctattaatatgaactctgatatggtttggctgtgtccccaaccaaaatctcatcttgacttgtaatctgaattataatcccaatatattggggagggacctcctggaacgtgattagctcatgggggcggttcccccatgctgttctagtgatagttctcagaggatctgatggttttataagcttttcctctgttcactctgcagttctcttgcctactgccatgtggaaaaggaaacgtttgcttcccctccaccatgattgtaagttcccgaggcctccccagccatgcaggactgtgagtcaattaaacatcttttccttataaattacccagtcgggttatttcttcatagcagcgtgagaatggactaatacaaactcccagctacattactcttttttgttgctgaaatatattcaaaatggtatattggtttggacttagaaagtttctttttaatataaattactgaatgcaggcccattatgttgaccctattatatttaccgttttgatccattctgttgtctgtgatggcattaagaaggctctgcttggggccgggcgcggtggctcacgcctgtaatcccagcacttggggaggccgaggggggcggatcacgaagtcaggagatcaagaacatcctggctaacacggtgaaaccccatcccgtctctactaaaaatat

SEQ ID NO: 1757 - DNA, 1192 bp, Homo sapiens
caaagactgcaactcctaggcaagttcttgtgatgaactgggctgagagccagtggatttgggggatataggacctactgagagaccagcctgggtggctaacagactcgcaccatgccttccccaaacccaggctgtatggcttgtggcttcaaaagataccccttccttccacttgaggaatagaaaagggaagactaaagaggactttgtattgcatcttgagtaccagctcagcaacaggaggataaggcacaggttagagccatgagaccccctttacaggccctagctcccagatgatatttatagatacaccctgtgtgagaaaggaacccactcccttgaagagaaggacccagtcctggcagcattcatcacctgccaaataaagagctcttgggccctgaataaccagcagtgatagccaggtagcatgccatgggccttgggtaagactctgagactagcaggcttcaggtgagaatcagcacattcccaggtgtcgtggttatggggaaagactccttctgcttgagaaaactggagggaaaagtaaagggcgcttttaattgcacattagataccagctcagccatggtgggtagagcactgagtgggttcttaggacctctgattccaggacttggctattggatgacatttttggacctgccctgggccagagggaaatccactgccctgaagagtgaatcccaggcctggcagcatttaccaaaactggttgaaaagcccttgggccttaagggaacatcattggtagcccagcagtattccctgtgggcctggggtagtggtggctaaaaatgaagagcctctgcctgtggaaaggggagggacaagtgggaaaaactatgtctcatggtttgaatgccagctcagccacattacaatagaacaccaggtagacttctaaggtatttgactccagtccctggctcctggacagcacctctagacctccctggggcctgggagaactcaccatcctgaagggaagaacacaagcctggttggctttgccacttgctgattatagaggaccagagccttgagcagacataggcaatagccacatagtggttacagcagatttggatgagacccagtgctgtgctggattcaagtgtgacccagcactatctcagtggtgatggtcacaggagtgctt

SEQ ID NO: 1758 - DNA, 1435 bp, Homo sapiens
cgtgccggtttgaacagacacgactgtaagaaaagagacagcggttttgcaggtcatagaaattacaagactccgcactcagacggctactacccgcatcccgggactcccaagccacagtacaggcctgtaatggcggcaccagcgactcccagtcggcgtgctccctcgtgccgcccgtggcctcctctacttgagattttaagcagcctagcgctccacggcaacgcttccccaaaatcacaaactatttctcaccaagagcgagaaccctggccgaattttcgcgggtggctccagtacagctgctggtgacccatcttgctctcagcagtgcaacgaggtaaaaggaagaagctggcccacgcatgcgctcttcaaatttttgagacagtttacccagaatgcagtgctcaaaggaaacgcgtgcgcagtgtggtcaggttgtttcgctgggtgagtaaaatgaaatcttagaggcgttgtgggctggcccagttgatgacgtcaccataccacagcttctagtgctattctgcgccggtatccgaccgccgggcgcggtggcgcgtgcctgtagtcccagctactcgggaggctgaggctggaggatcgcttgagtccaggagttctgggctgtagtgcgctatgccgatcgggtgtccgcactaagttcggcatcaatatggtgacctcccgggagcgggggaccaccaggttgcctaaggaggggtgaaccggcccaggtcggaaacggagcaggtcaaaactcccgtgctgatcagtagtgggatcgcgcctgtgaatagccactgcactccagcctgggcaacatagcgagaccccgtctcttttgaacaataaatacgttaattttggactctcaagagatgaatattctcatagtcttttttattgattaaaccttttactttcttttaattaaaacgttacacttgggaaaggagtttttcctcgactcaccagtgacacctactggaataaatttacaaaacaacttaaaatcagctgtaatgatcacgagtcaacggtagggtttgcttttattttgttaaagagagtacgttttcaaatttatttttttgacacactcctccaagaaatacacctacaccattccaaaaaaaaatgagattctttggcatttagtgtatttgattcttaaatgtaattggctgaatgtaaagtaataaacaagtaatgtgcagtgtatgttgctttgaccagataatttggtgacaaaacaagtaatgaaaagcaaatgcaaaaatgcaaaaaaccaatgtcaataaacgaatttctgctgaaagatacctacattccatatggtcatttataatgcctccagataaaactgctctgaaatcaaagctttaactagatttataaaatgtagcacagggtgcaacaattc

SEQ ID NO: 1759 - DNA, 1214 bp, Homo sapiens
gtatcattatttctcattatttttgcactctgtagaatttgacaatgataattacccttttcttaataaaactctttcttttcttggtatctatgatagggcactatggtttaccttcagttttcttagtcacttctttgtctcttgcttccagcaacatttttttctatccccaaaataaaggctttatttcagtcctctgctgttttctgtcatacctgccttccatttgatagttcagctgttatatgggtgaatcccaagtctgtgaaccagtatgctttattgtacctagttgacccaggtcttctccagacttttccctactctggttcattgtgtacagtgctaccaaaatagtatttagttcttgtcatgtaactttcatacttaaaatccctccactttacgttggcatctgagctcatttacaatctgtcctcatactgtatttccaatcttttgctctacatagcttccatgttccaacaaaaattagcttttttttttttcttttttttttttttatatggagtcgctctgtcgcccaggctgccgtgcagtcttgcgatcttggcttactgcaacctctgcctcccagtttcaagcaactctcctgcctcagcctaccaagcagctgggattacaggcgcctgccgccatgccccactaatttttatatttttagtagagacggggtttcaccatgttggccaagctggccttgaactcctaacctcaggtgatccacccaccttggcctcccaaagtgctaggattataggcgtgagccaccagtcccagccttttttgtttgtttgttttgttttgttttgagaccgagtttcacttgtgtcgcccaggctggagtgcagtggcgcgatctcggctcactgcaacctctgcctcccaggttcaagcaattctcctgcctcagcttcctgactagctgggattacaggcatgcgccacattgcccagctaatttttgtattattagtagagaaggggtttcaccatgttggccaggctggtctgaaactcctgacctcaagtaatccgcctgccttggcctcccaatgttatgggattataggcgtgagtcactacacctggccttaaactcaaattttttttttttttttttaatttttcagatagagtcttgctctgttgcccagcctggagtgcagtggcacaatctcggctcactg

SEQ ID NO: 1760 - DNA, 1200 bp, Homo sapiens
ttaggaagaatataaccttgaggccccctatcctgtgggtcagaaatgacagtctggttgtatcactgtttctttctccttatggtttaatgatgtggaattttcattttacattatagctgacatttttatttttatatgttcggaacaggaagagcaagatctggatcaacagggaaatgaggtatgattttatgttggggttcctactacaacactgtgattacaattcagttcccagaatgtttgaaacacaacttattaaaacttagaaacctaagacaagactgcaggctacgaagtcaaactttcggggtcttaatcccaactctgctatatgtaactgtacaaacttggaaacattctttgtgcctcagtttcctcatctgaagaatggggataatgtccctacccaggagagggttgttttgataactaatgtatgtaaagggcatttagaaaagtttatggcacatagcaaacactcaaatattaattatacttcagcaccaagcattctgtcctaaatctaagtttattcatattgtaaaataaatgggggcaatctcacaggcagcacagcaaataagaactctgggatttctccttaataatgggtaagagagaaggctgttctagcccagggtttctcaactttggcactattaacattaggggttggttaattctttgttgtggggtctgtcccattcattataaaatgtttagcgacatcctcggcctttacccactagatcccagtagcagcccctacctattccttctcacccctcatcgtgtcaacgaaaactatctctagacattgcccattgtcttctgagggcagaatctccccaggacgagaaatagtggtatagccaaggtattagtcccatttccatgtgataggacttaaatctatttgtggttattattgcatcattttaatccacagcaggtttctgcaactcaggtaatatccaatagtttttttccttttttttttttttttgagacagggtctctgtcacccaggctggtgtcacccagtgcagtgacaggatcatggctctccacaacgtctacctcctgggctcaggtgatcctccccccctcagtcttccgagtagctgggactacaggcacccactatacccagctaacttttatattttttgtagagatggtgtttctccatgt

SEQ ID NO: 1761 - DNA, 1199 bp, Homo sapiens
ctgttacgtcttcctaattaattgagtcttttatcaactttaatgaaatgtccttctaacttgtaactattttttccttgtttgtcaggtgtaactagatgagctttcttttggttagtgtttacatggtatatcttttttatttgtttgttttttgttttttgagacatagtcttgctctgtcacccaggctgaagtgcagtggtgcaatcttggctcattgcaacttctgcctcctgggttcaagcaattctgcctcagccctctgagtagctgggattacaggcgcccaccaccatgcctggctaatttttctatttttattagagatgaggtttcatcatgttggccaggctggtctcaaactctggacctcaagtgatatgcctgcgttggcctcccaaagtgctgggattacaggcataagccaccgcgcctggcctgtcttttttcatcattatatttcaacctttccatccttatattttaaaggagcatcatatatatcattgtcattgttttccagtctgacagtctttgccttttacctgggcatttaatgcatttatatttaatgtaatctctgatatatttgggtttaaatccacccatcttactgtttgctttttgcttgtcccatttgttctgtgtcctcttttgtcttcattattgccttcttttgattgactactttttattgacttgttggctatacattcccttactaggatgattacaaaatacatctttgatttttctctcccattctttttgtccctatgtctttgtctttttacaaacctctttactatcagtaggggaatggttaagtaagtgtagtgcatccattcagcaatgaagaaaatgtacttttaggtgaaaaaagcaatattcagaacagtttgtgctatgtctaaaaatgtatcagggaaacccacctccagtatttcaacataggttctttctattttccttaagtgtcagccagctgagaaataaagagaaagagtacaaagaggaattttacagctgggctgctgggggtgacatcacgtatccgtaggaccatgatgcccacctgagccttaaagccagcaagctttattaaggatttcaaaaggggagggaggtgcaagaacagggagtaggtcacaaagatcacatgcttcaaagggcaaaaaggagaacaaagatcacat

SEQ ID NO: 1762 - DNA, 1246 bp, Homo sapiens
aataatattccactgtatgtatgtatgtgtgtgtgtgtgtgtgtgtacatatatatttgcactcattatccgttcatccattgatgaaaagtagattatccctatatcttggctattgtgaataatgctgcaatgaacatgaacatatatcttcaggatagtgatgttgttgctagatcacatggtaattctattcttaattttgtgaggagcctttatactgttttgcacaatggctctactaatttacattcccatcaacagcatacaaaagttccctgttctccaccttctccccaatgctttcatattttgggccattctgtatggtttactgtaccgtatgacagtaatgctgtgcagtatgtgctatagccatttttgcatctactggtaccagttctgaaatagcagcggcgccctttctgtttagagtcgccttctggtggtaggaattctggttgctaccatgtgtagcctgcaagcctctagcagctcttttgcagcgacgccgagcgccgggcgcggtggcgcgtgcctgtagtcccagctactcgggaggctgaggctggaggatcccttgagttcaggagttctgggctgtagtgcgctatgccgatcgggtgtccgcactgagttcggcatcaatatggtgacctcccgggagcgggggaccaccaggttgcctaaggaggggtgaaccggcccaggtcggaaacggagcaggtcaaaactcccgtgctgatcagtagtgggattgcgcctgtgaatagccactgcactccagcctgggcaacatagtgagaccctgcctcttttgagttctcaccttataaagtagcctttcttcccatgcatctatcctaagacaaaagaaatgcagaatttacattcttacaggactattttcctcactacactgtgaatcccccctcccaccccacccccattgggaatcttcttgtttttatttttatcttatttcaccattatctagctaaacacttgcacattcatgctgccaagtgtttatggagcaccgattgtacaccaggtactgcggtgagtctcaggggtaccaagaccgaggttcgatgagaatcctgtaatcaattgcagaatgctccttccgagagcaggacccatcaaaataggaactccgttttgagagttcgcctcgatcgttgaggataatcttagaaggaccgaagcagttccgtttcgttacatttcaaaatcttatgtc

SEQ ID NO: 1763 - DNA, 1212 bp, Homo sapiens
gatgcagcacatatttaaggcctgctgaagcaagcaacgctgacggaccaggttattgcgtttttctctcgctgcgtgtccggacgccacactatgagcattaagcgcatactgaccaatttctgttaagcaggaacgtggtgttctgatcaaaacacagggagccgcggccgcaaccgcgccgataagcttccggggtcccaaccctgtaaggcagaacggctgcccagctcggatgacgccacactaacgtagcctccagaccgcccagtgtgggtgtgtccaagctcacgtcgcccggcgtggcccccccgctccccaatgacgtaactgccctgcagcttctagtagcttttcgcagcgtctccgaccgccgggcgcggtggcgcgtgcctgtagtcccagctactcgggaggctgaggtgggaggatcgcttgagcccaggagttctgggctgtagtgcgctatgccgatcgggtgtccgcactaagttcggcatcaatatggtgacctcccgggagcgggggaccaccaggttgcctaaggaggggtgaaccggcccaggtcggaaacggagcaggtcaaaactcccgtgctgatcagtagtgggatcgcgcctgtgaatagccactgcactccagcctgagcaacatagcgagaccccgtctcttttgcccccctccctcattaagggtacctttgtaagtaaatagtgtctttgaagttaagaagtttgcctcctttccggttcatacgtattaagaaacatactaatgtgcacatttaaagacgagtcctctcttcctctaaaggaaaaaatatatagagaaagatgttactgaggtttatagttggctttctctctccactcttatatttatccactgttttacgtttccttcagcgcgaaagctcaccagttgacgggatgcttggggatttgcaaccgcctcatcgctgccccctaccggcgcatattcaaaacgtctctgcgaaaagctgttattaccttcggagccaacaggggctgctcgtttacccacagacagtcggaaaaaaatggccgccggatcacagagagcaaaaagtacgttctcttaaagaatttccaagttcttcccgcggccgttcaggatgctgcttgcagttaccaacattattcccctgcactgagctgacctgagcttccctgcctacctcctgtcacggat

SEQ ID NO: 1764 - DNA, 1385 bp, Homo sapiens
ggaaaggaatgaagttggtgagctggatgtggtgcctggcactcccacccactgtgagccttcctgtatgacagagacaagaacactaaaacctatgtttccagattcctttgcagctagaattctgcttaggcattaggtgctcccaacaagatgcactgggatgagatctgaaggaccacagtgaggtagaggccaccttcttattgctgcctctgcgggcaaagcctggtcaactgtgtggaaagaagctgtggaagatagggttagcactcgatgtctcttaaccagcctgaggggcttgccgagcatttgccgagatggggcagcagcagtgactgcccaggagtccttcccaaagacatgctagcaaaaacacaaaaacacacacaagcgtgatcattgcactgttgtaataagcaaaggactggcagcaacccaagagagggaactggttgaataaattatggcctatccacacacataatggaaggctgtgcagctctccaaaggagcaaaaataatattttcataacatgccatggagtaattgttaagatttgtgaaaatggatgcagggtgatctggctgtgacatctgtcactccattgatcgccagggttgattcggctgatctggctggctaggcaggtatccccttcctccctcactgctctatgtgcctccctcctgaagcggtgctctcaatcgaagaggacggccatccctgatagaggaggactggtccttctttggtcaaaggtatacgagtacctgtgctcccctgccagaacctccaaacaagctctcaagattggtgaaaaagccgggcatggtggctcacacctgtaatcccaacactttggggaactgaagcaggtggatcacctgaggttaggagttcgagaccagcctgaccaacatggcgaaaccccctctctactaaaaatacaaaaattagccaggcgtggtggtgggcacctgtaatcccagctactcaggaggctgaggcaggagaatcgcttgaacccaggaggtggaggttgcagtgagccaagttgccccattgcactccagcctgggcaataagagcaaaactccatctcaaaaaaaaaataaaaaataaaaaagattggtaaaagaaacaaactggagaaaaaggtataaagtacacttccacttacaaatgagggatacgtatgtgtattttaaaggaatctcggaataataaacaaaccaaaaaaaggtagtcctaaagatctcttttaataggaaaaatagtgagactaagatgtcaggccccaaactctggctgtaaaactagaagcaaaggatgagtggacccgtctctcttctgctcagttcagaatgaaggaggagaaaac

SEQ ID NO: 1765 - DNA, 1193 bp, Homo sapiens
aggtaaagggaaagttatttgcatgcctggctttgtaacattctagcagtgattggtcaagaagaatgcggctgacagctgacacctggcttctcttcaggatgttgtgaattcggattggaccagcaggtctgccctgctgttagctctctagggcatccaaggacagaggatcattctcaaggcattcttagttgttctaactccattcaccactacaagagcatgggctttggaaacaggcagagttgggcctgaaacctgtgttcagcccttgatagcagggtggctttgtctctactgatcaatctctcagagcctcagcttcttctttcataaaacaggccagttaataatcccagtcagttaacaaatccatgtaagattgtcataaagatcagagataatgtggatactgagcctgaaatgcgtccctaaatgatagttattagcttttgtctgtatggactctggaatcaatttctttcccaattccacttaaaacagagacaataaattcaagtatttcctcaagctgctgtagagtgtcattttaaaatgacattgactcaactcccctttccttacaacataattggaaaaaaaaaaaaaaaagctggctgggcacggtggctcatgcctgtaatcccagcactttgggaggctgaggcgggcggatcacgaggtcaggagttcgagaccagcctggccaacacagtgaaaccccatctctactaaaaatacaaaaaagtagccaggtgtggtggcgggtgcctgcagtcccagctactcgggaggctgaggcaggagaatggcttgaacctgggatgcagagtttgcagtcagccgagatcgcaccattgcactccagcctgggcaacaaagcgagactccatctcaaaaaaaaagaaaaaaggcttcaagcattggccctgggttctgcactcagatgaggcttcagtgttctgcccaatctcatggaagttcattctcctggtgctggagctgcacacacatgaagttgctgagctaccatgagaagggagcatatagacaagatgagtcttcccggtagcctaaaaaaaaggaggaaggtgctacactgtgcatcattttaagtgctctgcgccagctctcaatgtcctacacattaactcaataatcctgacaaccaccacaatgcattaggtagt

SEQ ID NO: 1766 - DNA, 1179 bp, Homo sapiens
aaaaaattaactgagcatggtggtgcatgccctttggtcccagctactggggaggctgaggtggaaggattgcttgaacccaagagacagaggttgcagtgagccgagatcgtgccactgcactccagcctgggtgacagagcaagaccttgtctccaaaaaaaaagtaatagcttcacacaagacattttcgatgttcctgttggcggttaaaaaaggcaaagcccagctttgcacagcagctgtggttatgggtcacactcactgccttcacacctgtgtatgcaggaatcttgtggtacagccttgtcaatgcatcagtcttgttacttactgttatggcaagacagcattcctgtttctggtcagtttccatattaggcttagcagttgagggccattctgttggcctatagaagttcatgcaatgggcagcacaagcttgctctggaaacctctgtcccttctacagaagctgtgcaggtctcttaggagacccagtgatcttgcctgttctagagtggcccccagctgcagagtgtgggaaggaaaaaaaattctcaatgacgtgtgggattgatttcttcctcttataatgaattctgaatctgacagatcttgttttttgtttgtttgttttgttttgttttgttttcttgagatggagtctcgctctgtcgcccaggctggagtgcagtggcgcaacctcggctcgttggaagctccgcctcccaggttcaagcaattctccacctcagcctccctactggctgggttacaggcacatgccaccatgcctggctaatttttgtatttctagtagagacggggtttcaccatcttggccaggctggtcttgaattcctgacctcatgatccacctgcctcggcctcccaaagtgctgggattacaggcgtgagccaccgctcccggcctctgacagttctttattgtactgctggccgcttttttctcccttttggttgctggaagcccttctgtctcctctctttggggatgttgggaatttattccttgggctcatacttaatctcggggctaccaggcaatgtggaaagagggactggggccgagtctcccctgatgtgactatttcataaggagtaataagatggggatctggagccaggtcttctttgttttgattgcagttttcc

SEQ ID NO: 1767 - DNA, 1137 bp, Homo sapiens
cctggcccatgctaaatacaaggcatgacgctaatctgcatatacaacattaagtaatcctcacaccaacctcataaggtggatattattatcccattttacagattaggaaactgaggctaaaaaggtaaattaaatggcccaatatctcacaggattcaaatccagattagaatgacaccagggctcttgctcctaaccactgagcgacactgcctccctcgcccctcagaagggggcaggctaagtgctgtcctgttctttgctgactctcaggaggtgtatgtggggaaggagacaatgtgcactgtggatggtcttcacttcaacagcacatacaacgctcgggtcaaggccttcaacaaaacaggagtcagcccgtacagcaagaccctggtcctccaaacgtctgagggtaaggcccttcagcagtatccctcagagcgagaactgcgtggcatctaaagtggctggcaagcccggaggtaaccccaccactgcccacattcctgaagtgtttccatgacttgctctgcattctgcacagagccgctgttcctctcctgcctttagagagcctatggtatgtggatgtgatcaaaccaaagattccacatcggcagttccaatggcttgggccggcggcttcctttgataacaatctaaataagctgcagttgaagaagctgaaaaatgaaggcctgaatgtgcccctggtgtgtaagacaaatgtatctaggctctagagcaggctcccattctccaccgatacacatcatgtgccagttttgcccagatgattctaaattactctgtagtacttgcttgttctgagggtgggacctaggttctttccagtcgtggatttgtatgactgaatgtgtttcaaatgggtggtggggtgctagagctgtttagagagggcctgttggctgctcctggcttacccacttagactgcctccgtttcatacccaaagcggaggccgtcagcaccaggattgagacttcctgtgggcaccaaacaggaagagaccagcaacttcgcattacccgccattttcatctttgccagtcccttcagtcttggctaggctaccgagagccaccatacaaggttcatctctagagaattttt

SEQ ID NO: 1768 - DNA, 1219 bp, Homo sapiens
aacagtggagtaggcaaatcaaatttgtaagataatttttgttgtcatattttttagaagtggcattctactatgtaacattttctcagcttcagtaatatttatagggtagttatatagtaaaatgaaatgccaaattgtatgagatggctaatatttactgttccatatttctcttccatgatgccactaatgaacattatactagaatggctttatgtagatttttggatagtttcatttcattgctggttttggaactcctagctttttaaattttactaaccttataattttacttctgatgagaacctgaatgagaatgatcatttttcttgccccaaatccacaatttaaatctctttgagttgctgacaatcatgccttaattaattcactgctgaattattttataccacctcacaaatttggctgtacatttggttcttcactgtgactctcaattctccttgaataactccttgcacagtataggtaataaataattatttatgggtcaaactaacatcctcttttatattcttacagattcaaattaaccgcaacatgaggcttttatgcaagtttctttgtggttttgaaaatagctggttctctaaaagagcagttcaaaacacccaagtaaagataatatggccttaattttttaaaataatacaattcaacttaaaaatacttactgctcactttttaattatgagacatataatgaagccatccctgccctgtcagaattgctttattagagagtataagacaagccatttatgatcagagtataagaccacgagtgccaggaaaggggtccagagtggggcagggggtcagaagagggaaagcagcacatgtggaggaggttcagaagtcttcatgggtaggattcaaaagaaggagctggggaagggaaaaatgtctagtagggcatgcagtaagcagagaaactacagcttggggcttttgaccatgtaatgtagtaaaggggcatcagccttgagttattatttttgtcatatatggcatgagatcatagggatggtagaagcagctggacttcagggcagaaacatgtccgtgaattttagcatcctctgacagacttggagtaactccttgctaactagtgaaaatctgatattctccaggatctaaagagggaaaaggggctggatgcagtggctcacacctgtactttcagcac

SEQ ID NO: 1769 - DNA, 1203 bp, Homo sapiens
ccagagaatatggggtttaaatgaaaccttggaagtagaattttaagagtggagcgtaagcattttattgtgaggacaatctcataaacagtcattaacaggaacatgttatgtccaaaaagtagctaagaaagtgctgttgtacagccttgggtagagtaataggtgacagttgggtaataaaacagaatgagcaagattatgtagtcttcagtgtcaggtctattagtttgactttatcttctaaattgagggtatgaaatctcaagtctgtgtaccccaacatcatgtagctggtaggttaaataccaggaggtactgaaaataagttgacaattctttgtatttatagcttgcttttctttgcccttttttcttttttttatggttttaaaattcacccctactccctttacatctatataaatttctgttcgctgtctccataagtgcttctgtcctgcccttctcattcagtccttttccccacgtgccccttcagtctctccctttgcttttcacttcttagtgccctgtgaccttatttggaatttcctgccctttttcttttagtcaaaattgtttaccatatcctttctcctgtttcctgcctgtcgaaatcttacctatgcttcaaataatagctcaaatgacacttcacaaaaactttgtgttttggggtggggggcttcctcgtggtttttacctctgagtggataaagggtcccttaaccctacttaacaggtccctagtagggagctgatgagtttttgcacttaaagatgttggagccaagagaacatttgtgactctgacagaactttctacattgggaatgggaaggaggaggtggatctaaggaaggctgcaaagctcactaaatagtcactgaaatgagaggaagggaagcaccataccagatgcctccagtgatttaaagcagggtgtctgaggtgatgctattatagccaaaagtactagaaaaatgccttaaaattttaagttatagcttaacagctaataattactatgtgccaagcactattctaataatttttatataattcttttaatatgtgtattacacataaggcttaaaagtactttcctgagatttatctacttactgtatttcatagtttcattacttggaagaataacagtaattacattttaaggcttatgatttaaaaaaatgtaac

SEQ ID NO: 1770 - DNA, 1189 bp, Homo sapiens
gatagttcttaaatggaaagaattggcttgacaattgtttccagtccttactttagcctccctttggtcttgctttgaaggcttttaagggtgagtaagagttgccttttccaactggtttcatggaacttgtaaccctttactcagtgtattggagaaatcatcagatgaaatacaaaatattaacatcaaaacagtgggagaaaaggaaaaaaatactgtcaagtatttttatttatgaggctgtcacatggtagtgtcaatttagaaacagttttcatgaagaaggcttattacaggcatgaaatcagtgatgtgtcactagtcttgattaacagcaataaaatctgtcatattggggaaattatagagtagaaaatagtatgtatagacaaatctgtgtatgttactcagttttttaatcatctcttttatttttaggatgagtagtatgtcagcactctttcagctatctatgtggatcagggtatggactaaaatatttttatcttaaacatttttaccactatcactttaacaaaaatgaacagatttttagtttttttttttcttttgattttagacttgccataactactttattgaagaccttggattgccagtgtggggatcatatactgtttttgctttagcaactctgttttccggactgttattaggactcgtaagtatttcatttttggagtgctaggaagaaagatatttaaaaatgtgattatttaaaatagttacattagctgtggcatatattctacattcagatttcttacaatgtttatttttacagtgtatgatatttgtggcagattgcctttgtccttcaaaaaggcgcagaccacagccgtacccatacccttcaagtaagtatattttaaaatgtttattttttattcacgatagtcctattcatttctgtaatcacaatcacacatttcacaggttgctcttccagcttagaattctaactgtggattgttggtctttatcagctatggcataaaggaaggtagaggagatgtatatttcatataagaatgtagcccagtggattttggaacattgttattttcttgactcttatattatggggaattttaacattgcatatagcatgtagctatttaataatatttatttggtgtcgttttataagtggagtatattctac

SEQ ID NO: 1771 - DNA, 1192 bp, Homo sapiens
ggtaatacaggatatgctactgatttaggaagtttttaagttcatggtattctcttgattccaacaaagtttgattttctcttgtatttttcttacttactatgggttacattttttatttttcaaattggatgataatttcttggaaacattttttatgttttagtaaacagtatttttttgttgtttcaaactgaagtttactgagagatccatcaaattgaacaatctgttgtaatttaaaattttggccacttttttcagattttacatcattcttgctgaacttcaacttgaaattgtttttttttttttttctttttggatgtgaaggtgaacattcctgatttttgtctgatgtgaaaaagccttggtattttacattttgaaaattcaaagaagcttaatataaaagtttgcattctactcaggaaaaagcatcttcttgtatatgtcttaaatgtatttttgtcctcatatacagaaagttcttaattgattttacagtctgtaatgcttgatgttttaaaataataacatttttatattttttaaaagacaaacttcatattatcctgtgttctttcctgactggtaatattgtgtgggatttcacaggtaaaagtcagtaggatggaacattttagtgtatttttactccttaaagagctagaatacatagttttcaccttaaaagaagggggaaaatcataaatacaatgaatcaactgaccattacgtagtagacaatttctgtaatgtccccttctttctaggctctgttgctgtgtgaatccattagatttacagtatcgtaatatacaagttttctttaaagccctctcctttagaatttaaaatattgtaccattgaagagtttggatgtgtaacttgtgatgccttagaaaaatatcctaagcacaaaataaacctttctaaccacttcattaaagctgaagaccagtatgatttctggttgctttttgaaggtatgctttattactttgtatttaacgatgttcagatgagtagttgtgtgttcctatatatgtacttgatatgtgtaatcaaaagactgccttctttttctattgagatgtttaaggacagtaatgctcattaatcaagcattttttttttttagtgttctagtatatgtgacatggccaatttttttattagaaaatatgt

SEQ ID NO: 1772 - DNA, 1142 bp, Homo sapiens
tataatcaattttaatgtcaatgataccccttaattatgccattaaaattgcatttttatatacctcttatagttcttgcttctcattttactttgagtttttgaactcttgactcattattaaaaattgatggcaaattttttcactgtttgatatatactgcctctgaagaacagaattattaggaaataaccaatgagtaattacttcattttttttttcaggaacaccggcttgttagagagagatattatgtgcttattgataatattgaatgagcagagtaaatactcaatttaatatgatttttcatacatttcaaattctttattattttattctttgctgaaaaattctacttttatccttatgagtatatagaaataatctattgctgttttttcctattgcctattttgagatagtgagcttgcatttgaaagagatgggtcctgtttgaaattttaaaaatactgaaacaaaattttcacctacagctatgactgtttttatattatactaatttttctaaactttcttcttttaaatgtagataacatagatcatcagtagaaaacttcttgaagttgttcaagaaaaatttgaaagtagcaaaatagaaaataaagaattaacagcagatacagaggacagcatggaagtaagtacgccaagaaagaagataagaggaggatatctagaacaaatttgatttcagaacatagaattgaattaaagtatgagttgaaaaagatatttaaatttttaagcagtatagagaaatctaagggttaggcattacaaattatgtatatttagaaggaatgttcttccattgttttaatagatttcttctaggggatttaaagtaaaagtaaacatattaggcatattttggctgtttcactcccatctaaatggtattaaataattattcgattatttcttataatcaactataggtaaagaaaaacaaaatgcccaattaaaaaatggattggttaatgtttgagaattaattttagaaccctttaaaatgacaattagcttaacacactctactaaattgagcattttctaggtagttttgatatcttttgcaagtatgaaaaatcaatagtattttcaagtcaatgttgtt

SEQ ID NO: 1773 - DNA, 1243 bp, Homo sapiens
tatcactcatggctaaagcagcaacaaaagcaatgtctttttgctgtgagtctcaaagcccccaaattcatagggcagcactgtgagaggatgttacctgcgcatgcagtggggaatgctacaggagagaaaaccctgaaataaaaacagagacagagatagacatttattctagagtgtaagcaaatcttcaccagggagagagagggagagtttactatcctggaatgtcctcagggaggacagcgttctctacctttattataccagtcaggaatattccttctgaccttaaagtaaacactatctcttgcattcagggatgtttgtcatgcaaacccctttgctcagaagatccagaccatgcaaaaacatgagacattcatagagaattctcttccaacacagattttcccaggtttctgttagcttcagatatctctcagtctgtactcactgcttctgttgtcttacttcctatcaactccttgcacttctgctctgtcaatctgaaaactattctctgcaaggtaccagtgacataccagtcactcaattaaatggtcttttcttaatcatttctgacgttttgcagaattttaacaacggctctactttcttgcttttaactctaaactactctgctgttttctatgactagtctgattcttatgtttctctcctctgcccatctcccttttctttactcttgtgctttctaattgtgactattaaatgtgaacatatcacaggttgactctcattctacactttttcccttaagtgtattctactgagtttcagctgtcacctctataggtgactgtaatttccttcttgcattccaaaactcacctattatctttatttctgcctagatgtaatacattttaaatataacaatacatttcgtgacctggcttttaagttttttgtcagtggtgccctcattctatcaattgtttagattcaaaacctgagaatatagtttagtcagctcaagttcaacagtcttttaactggaattctttgccccaccgtaatgcattttctacactgtcacttaagaaatcattcaaacgtagaatcatattacagagtttatagccagcccaattcttcagcattttatacaaagcctccatgatttgatgactgcttgcctccagcttcaacttctgctgtttcccacactatcccacacaccaccaccacacgaaaacactttctttgaccttaattc

SEQ ID NO: 1774 - DNA, 1195 bp, Homo sapiens
tggtggcacatgcctgtaataccagctacttgggaggctgaggcaggagcattgcttgaacccaggaggtggagtttgcagtgagccgagattgtaccaccgcactccagcctgggcaacagagcgagagtccttctcaaacaaacaaacaaacaaacaaaaagatggaaatttaggatcagagagataaggatgtaaatcccagctctactgtttattggctgtgtgaccttagtcaaattgcagcatctttaagcttcactttcctgatctgcaaaatggagataatgatagtgctctcatgggttgctatgaggataagagctgtccataccttataaggttgttgtaaggattaaattaaaaaatacataaaatgcttggtatattgcctaccactaaaaaattgcttataaatgttatttattatggtattaatgtaattaggggatggtaatctaacttcacagagttcctgaacacctgaaaatgttggcaaaatttgactggagaggggtcttgtataatgatcaaatctcaaaaggaacagtcactgaaaaaaaggaataagaattactgaagaacaggattccccttttgaatattttaactttgcttgactctacatgatttatatcctactctactttttggtaagagttgacctgtctgatagattacattttatctactacttaagtagtttttctgagaaatttttggaacaaatatgaaatagcctttttgatgggcatttttgttctgaaatctcatcttttactccaatctcagttttgttttgtttgcattgacatgatagactggatactgtcttttaactttttgtctattgctaacattttaagtgtgcctcactaacttaggcaaagttttatggagtttaattatgaatgagcacccctttttatagggtaactcaaatagtttccatttattaccatgattgtcagtatttgtctttttctctctcattaagtttttttgttgctgtttgatttgccttcatttgtagaatttctagggcacatttactttttatcagaattataactttttatcagttataaatcaatgaagtaaatatgctttttatcagaattataacttttaacattaaaacgcatgctaatagaattatttttattctaacattattttccatttcagaaaaaat

SEQ ID NO: 1775 - DNA, 1127 bp, Homo sapiens
agatcccagcttcagtgttaccattacagactattttatgtgtattttcatcccatattttctagtcttaaatggtagtggttctgaaacctgaaaattgactagccacttaatgtgctaaagtatatttgtgtatacttctacaaagaaggaacctgaagaaaagcataaggtcattttcttccttctttattgtcctaaaggctccaaagaggtttgctatttcttttcatttaatacatttagatataaaagggtttctaatagtacaaagaatgtcatcattcttggttatttcaggtatcagtaaatttaccacttagggttgtaggtatgtcatagctgattgctttcaacacagatatttaatgtagtttaggggagtacattcacttttaaaaacagtattcttggatgtaagagatatttttaatctcttaattttcagtatattctaaatgtatcactatggattaactttagcagtttaaaattatttttatgactaacttctgattctttttccacagcttctcttttaaaaaaaaaaatgctggattttgtctttgacaaaacacgttacagggctttgtgggattttttttcttttaatgttttaaccaaatctcattttacagtttctttatttgatcaccaattttcataaattttttcaagtaaaaaaaaaaaaaaactcttacattacttcagtttgcgttgatctaactcagtgaattccccttaagaaattatcttacataagtgctgtctctggtctctgcccaagccagcctgtttcataaataaataattttatttatgttttttgcatttttggttggagaaaggaaaattaattcattcatatttgtcctgcaaccaagtagcccatatatccagtatctcaaaaccatcctacctagctacctaagtagttaaacctgtagtcataactacacaaaatgattcagatggtaatatctatatggcttctttttgcgcttcctgttttcattcactcaacaattatttacttcactgtttaccttgagccaagagaccatggcagtcactagaaaagataagatgaaacaaatttcaatactgcctataaagatgctagtgtg

SEQ ID NO: 1776 - DNA, 1144 bp, Homo sapiens
attgatcattcctttctatacaatggggatacacatggtacctgccttctaggactccttgaaggattaagcaaggtaatgtatataagagacctaacagggcctggcgtgaagtgagccctccagagatactcattctattattagacacaactccagagtgtgtgatgtttggatggcttctctaagctctgatccgccattaagctttcagctgtgccgttctacttgctaaaattggaagggaataggggacaactacagcatatgcactgagccaagtcatatgttaggcaaaagtccataaatgcaaattaaaatcactgtgaacttgtcattagtcttgtcattttctgtgatactagtttgctatataaagcatactctctcatgctctgagtttttttttaataattagtaatgttcaaattaacatcttttttcttcttttcagcatgatctatgttttggtgagctcttagaacaacacacagaagaattggtccagttaagtgcatgcaaaaagccaccaaatgaagggattctatccagcaagatcctgtccaagagtagcctgtggaatctgatcagttactttaaaaaatgactccttattttttaaatgtttccacatttttgcttgtggaaagactgttttcatatgttatactcagataaagattttaaatggtattacgtataaattaatataaaatgattacctctggtgttgacaggtttgaacttgcacttcttaaggaacagccataatcctctgaatgatgcattaattactgactgtcctagtacattggaagcttttgtttataggaacttgtagggctcattttggtttcattgaaacagtatctaattataaattagctgtagatatcaggtgcttctgatgaagtgaaaatgtatatctgactagtgggaaacttcatgggtttcctcatctgtcatgtcgatgattatatatggatacatttacaaaaataaaaagcgggaattttcccttcgcttgaatattatccctgtatattgcatgaatgagagatttcccatatttccatcagagtaataaatatacttgctttaattcttaagcataagtaaacatgatataaaaatatatgctgaa

SEQ ID NO: 1777 - DNA, 1231 bp, Homo sapiens
cttctgaagtagtacggaaactccacattcttcagaccaacttgcggcatgccagcacattcctctccgatgaggtggaggaatactggtggctggcctgggacttgtaggactggggcggggagctgctgtttaaaaatacatttaattatattccttctctgcagtaacattgataccatttttagcccattacaaatactgtgattttcatttaaatcacgtccattatcttattgacctagtttttattttgtaatcaaaatgttctatttctggatagcctcacccagaatctttttttttttaaaggttacagaccctttgtgcagttttttcctttcgtatctgcgtacagatgggctgcatctgtgttcacacagcagaaaatggtactatattgttccctttaagagtgtgggttttctctacttaatctcggactcttcatggagacacagctggcaagatgccacgagacctcgcatttggtaactgttttggtgaatggatattgggagagttaagtaatcctatttctattcgaaatgagaatcctgattctcttcttccatttttgctctttctctgttcgtctgctagttccctctgtgagccttctctttcctccccgcctctccagccgtccactatgaacctcacgtagccctgtcttcattcatgccctctcgggtgctccctgctgcttgtaagatcccacttatttctggcctttgctttttctacatttctttctctcctgtttccttctttccctcttaccttctcttccttgctgtcagccatgtatttctgcactctggttggaagctcaccctgcaaagaacaccccggaggtgtttccagggctcagctgtttttcactcatgtctaggcagggccttgaggcccctgaggaactttcaactttgccctcaagacttcctcttaatattattattattattattattattattattattattattattattattatttgaggcagagtctcgccctgtcacccagggtggagtgcagtggcgtgatgatctctgctcactgcaacctccatctcccgggttcaagcaattcttctgcctcagcctcctgagtagctgggattacaggtgtgcgccctgacgcccagataatttttgtatttttagtagagacaggatttcacgatgttggccaggctggtcttgaactcctgacctcaagtgat

SEQ ID NO: 1778 - DNA, 1198 bp, Homo sapiens
cttctcggcttcacttctagggtggtttttgtttgtttgctttcttgcttgctttttggctaggaagaaaggcacttgcctaaaaatatggggatgctactgtatatctatggaggatttgtgatttttgttcattcaacaagtttttattgtacatcttccaggaaccaagcagaagttctggggctagaaccacagcaaataacaatagagacatagtggtgcttccataaagctcggggcagccgtggggatgacaaagacagaaaaccaagcaggaggggcactgagcctaggctagggagggctcctagaaggacacaatgtctaagccaaggcctgaagcagtacaggcaaagaagggaatgcaggctgctggggagcagagggggagcaggggatagagcaggaggtacaggagaggacaatggaataacgttacgtgtgtttccatctttgtccaaatagttctgccttcctattgttgaacaggtatgtggtaatgataatatgaaaattctatacatagaattcactgtcaaagcatttctgaatgagaactagcacactgatcatggcactcatttatgggttacgatatggtttggttgtgtccccacccaatctcaacttgaattgtatctcccagaattcccacgtgttgtaggagggatccagggggaggtaattaaatcatgggggccggtctttcctgtgctattctcatgatagtgaacaagtctcatgaaatctgatgggtttatcaggggtttccacttttgcttcttgctcattttctctttctgccgccatgtaaggagtgcctttcacctcctgccatgattctgaggcctccccagctatgtggaactgtaagtccaattatacctttttttgttcccagtttcaggtatgtctttatcagcagcatgaacccgaactaatacaggctatgaattagaaatcaagatttggcttaagcatcacctctgctttgaaactttcctgcccatgtgtggtctggctatctaaatgtcacatcaaacctccttctcccttactgcctctctactagaggggctgaaaaccaaatattcacttttccaacttcccttgcagctaaaagtggccatgtaaactagatctgggctgtgacccctaaataaatgtctgcaggggaggcttctggaaaagcaaa

SEQ ID NO: 1779 - DNA, 1206 bp, Homo sapiens
agtctccccaccaatggatctccacttcaggatattctagttcacccttgtgtaacttctcttgactctgcaattctgacttctagtagtattgatgcaatggatgactctgcatttagtgggccttacaaatttccattcactccacctttagagtcattcaacttatgcttctacacttcccaggtaacaaccctagaatagttgagagtttgctgatctttatattcataaatactattgataagtagataattcatactcttggtatgagaacttagaaaaagttctatttatcagacaataattgatgattgaagatgaagatttagaccaggcacggtggctcatgcctgtaatcccagcagtttgggaggctgaggcaggtggatcacttgaggtcaggagttcgaggccagcctggccaacacgatgaaaccttgtctctactaaaaatacaaaaagttagccaggcgtggtgtcatgcacctgtaatcccatctacttgggtggccgaggcaggagaatcgcttgaacccaggtggcggaggttgcggtgagccaagatcgcaccagcgcactccagcctgggcgacagagtgagactccatctcaaaaaaaaaaaaaagattcacttatttgaataagatacctcttatctttggtgtcggtaactatttgtaaatagctttcaaaataattgaactttttttttaatattccctaaaaaggagttcatggtcatgggatagattttggtatgatttagtcatgattttaaccatgaacataaaatacccctcatcgcaggcaacctgaattacaaatatatattattattaatagctatttattgtttattgaataattgcttgtgtgtcagacattgtcctaagcactttacatgtattttctctagtactgtagtactgctaacaacctttagattaaacattatccccattttacagctgaggagagtctcaaagaagtgaaatgacttgcaccacgtctatagttgataaatgaaactgcctggatttgaaccccaatttttcagacttccaaacctcgtttctactataccatttatctcttgtcctagttgtgaatgagtaggttagaaaaacctactcaagctagcttaagtagagcaaatttattttgagaatgcaataggcaatctcattgccatttaaggataag

SEQ ID NO: 1780 - DNA, 1218 bp, Homo sapiens
tccgctcaccacaacctccgcctcccaggctcaagcgattctcctgcctcagcctcccaagtagctgggattacaggcacgtgccactaccacccggctaatttttgtatttttagtagagacaggagtttcaccatgttggccaggctggtctgcaactcctgacctcaaatgatctacccgcctccgcctcccaaagtgctgggattacagacgtgagccacggctcccggctgataattagatcttgatagaattttagagtaacattttttaaaattgtaactacatcccacaactaagttaccatttttttaaagctgggtttctgtattctttcttgctaaaaatatcaccaaggtgagtcagaaatttaaacataaatatatgacaccaagaatgtaccagaaataatgaataagtatttttatagccttgcattacagaagtgttttctaaatattacagttatttcagaagccatacaaagaataaccaattagttcatacagaattgaaattctagctgggtatggtggcatgagcttatagtctcagctactcgggaggctaaggtgggaggatctcttgagaccaggagttctgggctgcagtgcgctatgccattggggtgtccacactgagtgtggcatcactatggcgacctccaggagtggaggcccaccaagttgcctaaggaggggtgaaacaggttgaaaacagaggagatcaaaacacccatgctgatcagtagtgggattgcacccgtgaatagtcactacactccagcctgcagcaacacagcagaccccatctcatttaagaaaaacaaaataagattctgaagggtaaaagttactttaaatagagttgaaagaagaagcaggaaaaatatttgtaacaaacatgacacaaaagaggtgatttatttcataaataaagggctcttataaatcaaataaaagcagtcaaaaaatcaaagtgggacaaggggatgaggaggccatttccattacctgtcatccattctttgataagaacaacgaacaatagaccttttctcaatcttatgtaaactatggcacaatcacaattttaaggcaaggtccttagctttaccctttccaacaaggttgcttatcttaaactctttctgtatagaaattccggtgttgccactaaaaagaagacactcaattcaacagaataatgggcaaa

SEQ ID NO: 1781 - DNA, 1197 bp, Homo sapiens
cgtcctatctctcattgtcagacaattacgctaaagagaccttatattaattgactcgaagccccccttttctgaatttaactctccttcatcagaccatgctaaagaaaatagctaagccccgcggttgttcagggaaactaacccctcagagattggactttgtttctaaatgcggagcccaaacatgtaggaatccggaatgccatttgatggaagttggatggccttgatatgtgtttatgtaaacaaaacatattggttggtaaatatttttaaacactttgttaaaaagattcaatgactctgtaatgataaagattcgcataagttttcaatgatctttggatacatatacaaacattcttaaatctaagtacaattaaatatttagaacgctctgaaaaataattctgaagtgccgatctaatagtacgttataaatttttttagaaaagaaactacgcggagaatataaaaccatgtagttaaacagtcctcaagaagtaaaaaagcaggctaacgtaacaggcgcccggctagctcagtcggtagagcatgggactcttaatcccagggtcgtgggttcgagccccacgttgggcgcgggttgtaacttttttcctgaaacttaaacgctttcactaaagcacttaaactacagagttctcaagcagaattaatttaaacactttcaatattaaccagattctccagtaaaaagttaaccttttgtaaacgaaacaggtcacaaactgtgtttgcgcaattgaaatcacacgtcctccccgtgttctccttaaaacacagaggaaaccaaatgcccactgttaaagactagttttttgtgttactgtgcatacttggatagttagtggtagagggcagttttaattgttatcttaacaaacctatgagccccacattttggctgctcttctaaaatttaagagaccggatgtaaaaacattcagaggcacctgaggactccgaagaaaaagaaccaatttatccttctctgtttctcttcctctctctctctctctgtcctttttcctattctcaatatggagtctatccctgaagaaatatatagtgaaaaatagttctttttgtagtgagatttataccaccagtgcatacatcaagttttcttccattcttcttggggatggatactaggaaattaagattcta

SEQ ID NO: 1782 - DNA, 1260 bp, Homo sapiens
aagataaagtctattaaccttgtgttacaaatcatatcctggaagtattcaaaaatattactcaattcccatatttgtgtggtattataccatatacaagtgtttgttcttttatgttatggttttttgtttattggctttttagttcatcgcttaaatgtgctcataaaaaatgtgtatttgccagaataaaatatggtagaaggagctattttgccttaattaaatttctctctttttgttttgttttagtatcaccttttgccatgatagcatttctttcattggacagttccttacaagggctccactcagtgtctgtctgtattggattcacaagagcctttagaatggtaatcctaatatgtgtttaatagtattttcctattgctaagttttattgtaattttgtttaatagtttgcttagattatctaattctacctgataaaaatggataatttgtatactgcaggtatggcagaatacagaaaatgctttattggagacagtcattgtatcaacagtacacttgatctccagtacagacatatggtggaacagaagcctggatacaggactcagactcttactggtaagtgtgtcttttaacagctttactgaaatatattttacatactataatatttgtccatttagtggtgtatattcagttttgtagtcatcaccacaatctaattttagaacattttcaacatcccaaaaagaaacctcaactgttatttcccattccccctctccatctcgcctactacccactgtagtcccagcagctactaatctactttctgtctttatggatttgcatattttagatacttcacatgaatggaattctgcagcatgtgatcttttgcatctggcttctttcacttttatgttttcaaggttcattcatgttatagcatgtatcagtacagtcatgcactgcataaggacgtttcagtcaatgacagaccacatatacaacggtggtttcataagattattatggagatgaaaaattcctatcagctagtggtatagcccttgtagggtagctcattactcacgtgtttgtggtgatgttggtgtaaacaaacctactgggctgccagtcatatagaagtatagcatatacaattgtgtacagtatgcagtacttgacaataagcaactactggtttatgtacttactgtgctttttattattttagagtatattcctacatattaaaaaaaaagttgactgtaaaacagc

SEQ ID NO: 1783 - DNA, 1352 bp, Homo sapiens
catacactgaataatgctattagtctcataaagtgggatggaaagcatataatactactgtatatactgtataattctaattttgctttttttctcctccaggattataatttaaaagtttttattgtgtggctcactcttaactatcattatagtcttttaaaattatattcatacctactaaatttgctcaatttctagtagaatttccataatattttaaaaaataatagtagcattatttttaatctctatccagaatcaaatgtgttaagtgccattaactttaagtcaggatgttgctcttgagttaaagaaattgtttttgtcattttccatatttttgtgatgagaatctatgggcatttacatgactagttgctgtatattatgtaataaatgattataaactcaagtactttttatttcttctttaggggttagaattgcaggaaacatcctgtcatactgcagaagctcgcagagttgatgaagtttttgaagatgcttttgagcaagaatacacaagagtatgttcccttaatgaacactttggaaatgtcttgacaccctgtactgttttgcctgtgaaattgtattctgatgccaggaatgttctatcaggcataattgattctcatgaaaacttaaaagaatttaaaggtgacctcattaaagtacttgtgtggatacttgttcaatactgctccaaaaggcctggcatgaaagagaatgttcacaacactgaaaataaagggaaagcacctctaatgttgcctgctttgaacactttgccacctcccaaatccccagaagacatagacagtttaaattcagaaacttttaatgactggtctgatgataatatttttgatgatgagccaactatcaaaaaagtaatagaagaaaaacatcagttgaaagatttgccaggtacaaatttgtttattccaggatcagtagaatcacagagggttggtgatcattctacaggcactgttcctgaaaacgatctttacaaagcagttctattaggataccctgctgttgacaaaggaaaacaagaggacatgccatatattcctctcatggagttcagttgttcacattctcacttagtatgcttacccgcagagtggaggactagctgtatgcccagttccaaaatgaaggagatgagctcgttatttccagaagactggtaccaatttgttctaaggcagttggaatgttatcattcagaagagaaggcctcaaatgtactggaagaaattgccaaggacaaagttttaaaagacttttatgttcatacagtaatgacttgttattttagtttatttggaatagacaat

SEQ ID NO: 1784 - DNA, 1210 bp, Homo sapiens
tgctcggggctgcgtgtacaccatcttcgcagggagtggggtttgtatctgcaggcaggtagaagagccagggctccgggcgcggacgccgtaggggtagcttccgagtccctacttggccaagggccggcacggaggggctgtcgatctactgggcacctaatagccgcacattctgtccagtccctggcgccggaacgtgaaggcccgggtcctggctgctatccgggatccggacgctcccttcggcttcggcctggtgctccaggccgtaaggcaaaggcggcggcagcagcagcggcagagaaagaagctgggtaaggcagtgacgtcatctgtggcggcccctcccccgcccgccagccctcaccgcagttcctgcccaacgacatccgggtctctgtagctgcgcgccgcgccgcagctgtagcggcggcggagccagcggggcggggcgagcggaggggtgggggaggggcgacgcggtcgtgagcgcgcctgcgcggggccgcgctagaggcggcggcggcggcggtggcggcgctagggacgggagcgcgcgcgggagctagagagcagtggtctcggcgctcgtccggcccgcagcttcgggtcctcaggcggctgttgctccggaacgggtggttggggaggggggggtggggggactctagacagctgaggcgcgaaagcgatgagtcctcggctcttcctcctccttctccgggacccgctctctgcctccctctccaacgcccggatgatctgagccgcgagggcgccgacagccgggggcccggacgcagcccggctcctcccctcctccgccccttccccagcctgacctggcccgccgctgcagcggtgacccctcccccggctgccgccgtcgccgccgcggtgaccccctccccggctgccgccgccgccgcctcggccgaccagggacctgcccgcctgcggctgctccgggtaagtgcggcgctcgggccgacggcgggctggcgggcggtgcgggcctgcgcggcggcggcggcgggcaggcctggggcctgtaaacaagccgggcgtctgcccgggcgctcccgggaggagacgcgacaactccaccccctggccggcctcctcccccgagccgggcggcggacggcgaggggttaacgctcggcgagggcggtggcggggaggcgggggcggggtgttagttgcg

SEQ ID NO: 1785 - DNA, 1206 bp, Homo sapiens
gtcagattcagtgggctgtttagttcactttttatccagaaaatggagctaaatgagaaattgcagcttccaaagaaaatcataccttgattttatagatcaaagcctttctgattagatcagaattgttcctgagattttaggggcattcagttaaagtgccccaagaagagtgataaatcacatataggtgtaaagtcaataaagtcctatagtaagcagactggaatttagggggaggggaatacacactgttagactgttggtacctatatttgactactaggatgattatatattttaaattctgtattcagtttcttatcagaaatactgcctacaatatcttatacttaattttttaaggaacaggtgataaagataggttatattttcttcagaataattgatattcattatttaatagataaaatgtgttatctgaatgtttatagtagtagaaaccaagtttacaaaatgtctatatataatttgtttttaataaccaaggattctttctttacaaaagatttcctctatataaatcttcctgttttatagatgatctgtattataggagaaatgagtatttgttgatttaactggctaatctacaggactgagcattattagaggagtatttaaacatagaagtctgtgaaaatatttttagtgctgagggaaattggagggactttctagaaccgcaaactaatagaaaaccaggcatagtggctcaagcctgtaatcccagcattttgggaagccgaggcgggaggattgctgaagccctggagtttgagaccagccagggcaacacagtgataccttgtctctacaaaaaaatttttaaaattagctggacgtggtggcacatctatactcccagctacttgggaggctgagacgagaggatcacctgagcccaggagctccacgctatagtttgagttgtgatcgtgccattgcactatagcctgggtgacagagcaacaccctacctcaaacaaacaaacaacaaaaaaacccttctacctctgaacatgtggggatttaaagattgctatgatttaaatataaatcatgaatatagaaaatatgagaacagaagagtatttgttaaacaagactaagctgtgctgcataaagtaaggcactatcattgtgctggtattttctgattctcttagtgcaataaatgttaaa

SEQ ID NO: 1786 - DNA, 1195 bp, Homo sapiens
tgcccatgacgggctacatgtttggtaaagggatctatttcgctgacatggcctccaagagtgccaactactgccatacatctcagggaggcccaacaggcttaatcctgttgggagaagttgcccttggaaaatgtatgaactgaagcacgcttcacatatcagcaagttacccaagggcaagcacagtgtcaaaggtttgggcaaaactacccctgacccttcagctagtattactctggatggtgcagaggttcctcttgggactgggatttcatctggtgtgaatgacacttgtctactatataatgagtacattgtctatgatattgctcaggtaaatctgaagtatctgctgaaactgaaattcaattttaagacttccttgtggtaattgggagaggtggccaagtcactcccgatggctctggtataaattcagccgaagcccttctgcaccaactcacctggccggctaagttgctgatgggtagtacctgtactaaacctcctaagaaaggattttacagaaacacattaaaaggttttctccaacttttcgagtcccttgttttgtgttgtgtttgtggggaggggttgttttggggttgtttttgttttttcttgccaggtagataaaactgacatagagaaaaggctggagagagattccatccgcatagactagtcctgtggaaaaaaaaaaaaaaaacaagctccattagaatgtctgccttactggtttccccagggaaagaaaaatatgtttccacccttttttctaagtgttcatctttagttttgattttggaaagttgttaagcattcatttttagttaaaaataaaaactaatttcataccattaaaaaaaaaaaaagaaagaaaagaaaggcctgtgcccctggagtgagagggcagggatgagaaacagcaaaggaggcaggtgtgaggcatgtgttcatttggagcactgctataacaaagtaccatagacaggtgtcttcaacaacagaaatattattgtcccacagttctggaagccaaaaatccagaaccacggtgttggcagggttcattctttccttgagctataaggaaagatctgttcccggcctctctccttggcttgtggagggctgtcttgccccgtgtgtcttcatatcaccttctttctgcatgtgtctctctctccat

SEQ ID NO: 1787 - DNA, 1150 bp, Homo sapiens
atatatacacacacacacacacacatatataaatatatatatgtgtatatatgtatataaatatatatgtatatatgtatatatataaatatatatgtgtatatatgtatatatatataacgtgtatatatatatatgtagctgaattatatttgctaatattttattaaggatttctgtgtaaatatccttgagagatattgtagtttcttttttggtactgtaaaactggctttcataaaattaattgggagtgtttctttctcttcagttttccaggagagattgtacataattgctgttaaatctcctttagatgtttggtcaaattctctagtgaaaccatctggacctgtagatttctttttggggagtttctacattattcattcaatttctttagtattaatagggcaattcccattatgtatttaatattggatgagttgcagtagtgtttttcaaagtatctgtccatttcctctaagttttcaaatttgtgtgtgtaaagttatttgtagcattaacttattatctgcttgatgtctgtagtgtctgtagtggtatccctatttcattcctaggactgtattgctttcttctgtctttgcttttgtccgtctttctagaagtttatcaattttactgatcttttaaaagaactagctctttattttattggtttttttcccctaatgttcttgtattttcaacttgattgatttctgttttaatttttattatttccttccttttgcttgctttgggtttattttgttcttttcttagattcttgaagtggtcatttagattatcgatttcagacttttcctcatttttaatgtatgcatttagtgctataaatttccctctcagcaatactttgactgtgctatacaagttttcatgttttattttcattctgtttgatgtatttaaaaatttctcttgagacttcctctttgactggtatttagaagtatgttgctcagtttcccagtgattggagattttcgttttgataaagtagcatttttgccttttatgttagaaatgataaagttagaatccaagatgtcttagagttctgtttattttattcagataagtgcttaggttctttgatattaaaaagatgattcttattagg

SEQ ID NO: 1788 - DNA, 1203 bp, Homo sapiens
ctgaggtgtgataattgcttgagcttggggggcggaggttgcagtgaactgagattgtgccactgcactccagcttgggtgacagagccagacttttgtctctaaataaataaataaataagtcataaatatttaaggatggacccagcagctctgcttgaattaaaaactgtatatagcccaaaagtccattgagagctgactgataacaaaagcagggtacacccttacaatagcatgctgtgtgtctgtttcgaaggagctagatatgtgtataccaatgtgaagagatgctgaagagctggtgagtgaggaatgctaaccgcaggacagaatgctgtggtgcagttcattgagtttagggatatgcatgtctacccctactggtatggagcatgttaggaacttgggacctctggcaagattgttaaggagagcaggaggtgagggagcgggagctgggatttttgcttttcccttcatccctttctgtactatttaattctttttagataactatgtgtacttctctgacttactgaagggttttcttttcttgtattgtctctcacttagaaagcagatgcatatacagtggagctggagaacgccgagagccgagtggccaaactaagagatgaaggggagaggcttcatttaccttatgctttactccaggaggtttacaaattagaggtatgcctgagcagaaaacattgactcagcactgtgattgtgaggagccagatccttttcttccaccagcagagtttagatttgtctttcagttattgccccggttggatgaaaatgcatgtgtgcacctgctcttctcttttcaggatgtacttgacagtatgtggggaatgctaagagccaggtacacagaactcagcagccctttcgtcactgagagccagcaagatgctttgttgcaaggcatggtggaactggtgaagattgggaaggaaaagcttgctcatggccacttaaaacaaaccaaaagtaaagtggcgttacaggctcaaatagaaaatcacaaggtgagacagacacatgggtcgggtgaccccttcatagactaaaatcttaaggtatttctgaatgtgaacagaaaggatccatttttcttctttgttgaaatttaagctattcattcttttaataaacatctattagaatgcttaatgtgtaccaggaacc

SEQ ID NO: 1789 - DNA, 1127 bp, Homo sapiens
tgatcttcaggcttctcagaaatgcctttgtaaattagtgatgctctgttgatgtttatcagctcccattttggaaaaatgcccacactttgtctccttcaagaaatttcaaggtgaaggaaataatatttatgtattatttatttatttacttatttttttagagataggtactcactctgtctcccaggctggagtgcagtggcgtgatcatagctcactgtaacctcaaacttctggtgaggctacctcggccacccgagtagctgggaccacaggcactcaccagaatgcccagccaggaaaacatatttagaacagacaaaaactatttaatttttcctctaaaaccaaatgcctttgggagtatggatcaattttaaagtttttactttatttttgtattataaatacctagtttcaatctctttaaagaacgcccatgtagccaggtgtggtggcgcatctcttaaaaaacaggaccttcgctactctctgcacactgcctgcggagcggccctgctctgcaggagcagtcacggagctgtaacaccgccactaaaatatagaaaaaaataaaaataaacaagaccttgtctcttaaatttttttttttttttttccttgagacaaagcgtcactctgtcacccaggctggagtgcagtggtgtgatcttggctcactgcaatctctgcctcccaggttaaagtgattcttgggactcagcctcccaagtagctggaattacaggcatccaccaccatgcctggctaatttttgtatttttagtagagtcagggtttctccatgttggccaggctggtctcgaacccctgagctcaactgatctgcctgtcttggcctcccaaagtgctgggattacaggcatgagccatcacttcgggtctaaaactattgtttttaaattgtttttaattttcagaaagcctacatgatattcggatgaaattttttaaagctgcgcctttggggcacacatcaatgtacatgtttatgtgctcataaaaagcttaagaaatgtatattttttgtattttaccctttctcgcgttctttccttttacatttgtttagcgtaatataaggtctgttacttgatttcagg

SEQ ID NO: 1790 - DNA, 1322 bp, Homo sapiens
gacaacaggcacatgccaccattcctggctaatttttagtagagacggggtttcaccatgttgcccaggctggtctcgaactcctgacctcaagtaatctgcccacctcagcctcccaaagtattgggattacaggcgtgagccactacgcttggcctcatagcgtattttaatattggttgagactagccttgctcattgatcttctcttagcgtttacttggttattcttgcttatttttccataagaactttcatttttatttaatcctgtgttttttggttttaaagactattttataataaattttcgtgattaaactcttgtgcttaaactcttgattaaacaaacaagcaatgaagagatgaatgaagcagaaaatgtgagtttcatgcctcacattcccactcctctgaggttaatattttcatgtatatttttcaggatgtatttgtaatctcatacaaacgtatgtatttttttaatgaaaatatttaaattttcatagttaacagctgtagctctaacttggcaatatcttctgtgtttctttacagccattatacttgcccacgaatctttgagaacattataatgacctttgtgcctcttcttgcaaggtgttttctcagctgttatctcaagacatggatataaaaaactcaccatctagccttaattctccttcctcctacaactgcagtcaatccatcttacccctggagcacggctccatatacataccttcctcctatgtagacagccaccatgaatatccagccatgacattctatagccctgctgtgatgaattacagcattcccagcaatgtcactaacttggaaggtgggcctggtcggcagaccacaagcccaaatgtgttgtggccaacacctgggcacctttctcctttagtggtccatcgccagttatcacatctgtatgcggaacctcaaaagagtccctggtgtgaagcaagatcgctagaacacaccttacctgtaaacaggtaagtccagtcttcattctgaattatagttgctagccatttctcaaatcactttatggttgagtgagaaggaaataatatgttagacaaggtctttattgtattaattacatagtttacttacagcacccaaaacacaggatgccctgttctattctgatattttagttctcattaaaaactggtatgtgtacatcagtgttgtggggagaatttgctatcatgactattgtctttatacagtaaatactgaacttaagtcactccttttctttttttgagacagggtctcgctctgtcactcagactgga

SEQ ID NO: 1791 - DNA, 1203 bp, Homo sapiens
caggcccccaaaatgccactacaacatgccccactgatgcagattttgttcaacccaacctaatggctttagactaaaatattcaaaggaaacaaataaagaagagagggaaacatttccctgatttttttttttttttttttttgagatggagttttgttcttgttgcccaggctggagtgcaatggtacaatctcggctcactgcaacctccacctcccaggttcaggcgattatcctgcctcagcctcctgagtagctaggattacagcccagctaattttttgtatttttagtagagatggggttttgccatgttggccaagctggtcttgaactcgtgacctcaggtgatccacctgcctcggcctcccaaagtgctgggattacaggtgtgagccactgcacccagcctccctgattattttttaattaaaaaattaatgcaaatatcatgaacaataaagaaagactaagaaactctcttagaaggaaactaaggatcacttcttggtcttttggctaagatcaagtatagtatctgtttttatcagtttcatatctgatatgtcctctatccaaggacaatatattaaatggatttttggaaacaggagatggaataggagcttgctacatccactccacacattgacctgatattgcagtacttccaggaacagtgcacccaaaccttgaaaaaaaatttttttttttttgagacagagtctcactctgtcgcccaggctggagtgcagtggtgccatctctgctcactgcaagctccacctcccaggttcacgtcattctcctgcctcagcctcttgagtagctgggactacaggcacctgccaccacacctggctaatttttttgtatttttagtagagacggggtttcactgtgttagccaggatggtcttgatctcctgacctcgtgatccatctgcctcagcctcccaaagtgctgggattacaggcgtgagccactgcacctggccgaaaaaatacaaattttaatgaaaaaacaaaaaaagaagaaggagactaaggagacaggacaactaaatgcaatgtggaatcttgggcctgaaaagaacattagtgagacaatgatgaaactggaataaggcatactactactactactactactaatgttattattagttaataatgttatgtcaatgttaattttatgat

SEQ ID NO: 1792 - DNA, 1200 bp, Homo sapiens
gcaagtgaggctctgggtgaagatcagcagaggtgatgagaagcaatgagaagatgttttccagaagctccaggcacagagagtcaggaatactgcacagatactgttgacacctggccaggtaagttgagaagagatttgcagcacctacaaaaacatgtacaagagaagaggccagagaaagagaagacagagaatgcaaacattagaaacattacctcccagcgtcaaacattctcgcaactttagctcatttatttattttttaattataagggaactgaggttacagtgagaagaataagagacttaggatgtcttttaatgatttgcagaaagattttgccattttaaaagtacagctggccgggtcccgccccgaggccaaccgggcctccccagccttttggccaccaggccccgcccccggggagggcgctgagctccgcttggcgcctctgatctttatttctcgcgccgcggtttcggtgggaggggcgggggtgatttacggatactctctgccctcagatcctgggaaaagtctattccgttcccagtgacaaagaacagagagcagtgtacgatgagcagggaacagtggacgaggactctccagtgctcacccaagacctagactaggaggcgtactggcggctactctttaaaaagatatctttagaggacattcaagcttttgaaaagacatacaaaggttcagaagaagagctggctgatattaaacaggcctatctggacttcaagggtgacatggatcagatcatggagtctgtgctttgcgtgcagtacacagaggaacccaggataaggaatattgttcagcaagctattgacgccagagcggtgcaatcctataaggcctttgtcaaagaatcgaaacaaaagatgaatgcaaggaaaaggagggctcaggaagaggccaaagaagcagaaacgagcagaaaggagttggggcttgatgaaggcgtggatagcctgaaggcagccattcagagcagacaaaaggatcggcaaaaggaaatggacagttttctggctcagatggaagcaaagtactgcaagtcttccaaaggaggagggaaaaaatctgctctcaagaaataaaagaaataatagaatttttctcttcaaaggtccttaggtgtaaattgatgccatggtaggcaaggtgctggcaag

SEQ ID NO: 1793 - DNA, 1173 bp, Homo sapiens
gcccaacaaaaaacaacaacatgacaacaagaaccccggagggagtggaatgagtgacgtcacagccgcgctctgaggctgacaaaggagggggcgcgcccctcccgctctgcgcccgcgcggccccggagagggggcgcctgaagcgccgggtagggaagtcagccgacttgaaacttttcctcttaaagaaaaaaaaaaaaaagttgtgcgcggctcacagtggggttttttttttccgccttcttttctcgtctcccctcccccttcttccttttgaaagtttcttctcctccccctgccccccctccccgcctgaccgcatggctgattcaactccagtgtcaatcaacttctttttcctcctcttcctcatttaaataagtttaaagctcctcctccccccggcccaccaaatctgaactttataaattgggctttgcgcgccccagcccggagtcagaaaggcgaggggcgccgggaactggcgtgtgggactccagacaggagaggctgcgccttccccgcaccgggaccttcgcgacacaccagatcctcgcccctggctcgcgcgaacgcacaggatgaccaccaccctcgtgtctgccaccatcttcgacttgagcgaagttttatgcaaggtaaaggggggcggagcatttgcttttcaaaaagtctttttcttttgccttaagaaagaacccccaaaagtttgggtcttggaaggcaatggggaaagtggtgcagcgagatgattcttttctcctccggcatttctcccaagtttgaaggaatttggccccgtccttcccaccctttgagtttcaacagttgctggcggggattacatgtgaatctggaggccagggttttgaggggcgaagtttgcctggcagggcagcccgggggcttcggggggagggctgggattgggacaagttttgggcgatcctgttttacgtaacgtgctgctggatcccaggtttgctggtctgatcgggttcccagtctgcgccctaggtctgtccagcggcattacccacccgtggggttgggagtgggaggtccctcggggaagtgagtctcgggacaatgttttcctccactctttggggggagctggggatatgcgaggaagaaaggccaagttgtgattcaaaaagatgttgcaga

SEQ ID NO: 1794 - DNA, 1132 bp, Homo sapiens
ctcttctaaagccaatgttaagagtcttatgcttacattttaggaatttgaggatccaagggatgcagatgatgctgtgtatgagcttgatggaaaagaactctgtagtgaaaggtgagattcctgtgtaactagataaccctgggacatagagcagactgggtctgctggcatatttttctaagtagatttatgtagcttaagtgtgtaacggagatttttcttccctttttgtagggttactattgaacatgctagggctcggtcacgaggtggaagaggtagaggacgatactctgaccgttttagtagtcgcagacctcgaaatgatagacggtatgtgaagggtggatggctgcattgaacaattattgtaggggtagcatttaagattcaggagtcattagcagtgatgattttgggtcctgccgtataatctgttcttctattcccacgttagccagttgttcttgatgaatctatatgagtcatagaacacaaatctattgacggaagtcattagaatggcttgtgatatctgatggcttgaacttgcccacagttgaacacaagtgctgtcattgcatttcttccattgtgaatacgaattttcttcctcagaaatgctccacctgtaagaacagaaaatcgtcttatagttgagaatttatcctcaagagtcagctggcaggtttgttgaaatacagttttgagttattttgatgtggctttttaaaaaagttaatgggtagctaatgttgtattgttttattaaaagtagttttaaattaatggatttaatggaattgtaattttaaacatttaattaaatgtaatttgggggatattttgaactttaatattagtgatcaaatgtaaatgttttgaggatatttttcttgttttttaaaatcaatttttaaccaaatattaaaccctttatttgccagcctgtctgtgtcgttggccttatgacgaggagtgcctgtgggttatcctaatcgttgtcttggtcactcttggttgggcctggttgactttgccagtcagctcctacagtgatcagttggccacctctagatctgtgtttgccggtctagacgttatcggtgcacttccttgaagtgccagg

SEQ ID NO: 1795 - DNA, 1194 bp, Homo sapiens
actccagtctttatggctatttgtgggatgaggaatttgccagtttaatggagacttttaaaaataaatcgcttttgaaagattaggttgaaatgtaatcagtgtagtgtctcatcagtcattactgaacttttaatgctaatgattttactgtgagataacctgtaatctttagtcatttatgaatgtctatttaccaatgattcagcaaccatacaggccacctttcagcgtgtctttgaaagggttctaggaacacagataaaaatatatgatccttaccttaaagacactggcgatttcatgggcacagaaacaaacatgtgtgaagtactgggatagcttaggaagccgatcccccacgtgtcccatttaccagagtgaatcagagtgcaggtgatgcggaatattatcttccatgctattcctgaaatatttccatctgtccctgcctctctgttaccactgaaatgttcctttttttaattccttatcatcttttcacctattaaagtagcctcttaagtggtctccagaagagaagctccagatctactgcaggctactccagtgaaacttatccttttggctaagatcaagtgtagtatctgttcttaacagtttaatatttgacacattctctatccaaggaaaatatgttaaatgggtttttgaagcaaggagatggaataggagtttgctccaccactctacacatcaacctgtatttcaatacctccagaaacccaggaacggtgcatctctcccatcttatttacttccttttgatatttcaaaattcatgcagaccaggcatggtggctcatgcctgtaatacctgcagtttgggaggctgaggcaggaggatcatttgagcccaggagttcgagaccagcctgagcaacaaagcaagaccccatctttacaaataataataataataataaattagccaggcatggtggggtctcagctacttgggaagctgaggtgggaagatcacttgagcccaggaggtccaggctacagtgagccgtgatcatgccactgcactgcagcctgggtgacacagctagaccctgtttcaaaaataaataaataaatctcacgtggcatccaggttagttaagcgtatcacatctcctactttccctaagatcctagaagccaaaggcgctgctctaaaactctagc

SEQ ID NO: 1796 - DNA, 1144 bp, Homo sapiens
ctgttacattattgaaaacaggtattgaaccatcatggtactgggttagaataattatatatcttgtttttacatactgtcttacttaaatgctatgtagttttgtctagtatcattaatttccttgagttttcaggttgttaggtttgtaactgggttcttgtatacatctgcctggggaaacagctagatctagaacttgagataagcagttaaaaatgaatttgaaaatgtgagccattcatattaaccatttatctcattccccccacccatatctccctcccaaaaaatctacttttgatatctagtggatcaaacaaagaaagaggcagaacctataccagaaactgtaaaacctgaggagaaggagaccacaaagaatgtacaacagacagtgagtgctaaaggcccccctgaaaaacggatgagacttcagtgagtactggacaaaagagaagcctggaagactcctcatgctagttatcatacctcagtactgtggctcttgagctttgaagtactttattgtaaccttcttatttgtatggaatgcgcttattttttgaaaggatattaggccggatgtggtggctcacgcctgtaatcccagcactttgggaggccatggcgggtggatcacttgaggtcagaagttcaagaccagcctgaccaatatggtgaaaccccgtctctactaaaaatacaaaaattagccgggcgtggtggcgggcgcccatagtcccagctactcgggaggctgagacaggagacttgcttgaacccgggaggtggaggttgccctgagctgattatcatgctgttgcactccagcttgggcgacagagcgagactttgtctcaaaaaagaagaaaagatattattcccatcatgatttcttgtgaatatttgttatatgtcttctgtaacctttcctctcccggacttgagcaacctacacactcacatgtttactggtagatatgtttaaaagcaaaataaaggtatttgtatatattgcttcatcatgacttttttcttcatcataactgatatttttcagatgcactttgaagacataaaggatgttaaagtagtaactaagcatatttctttttgttcagttacataatcctcagtatta

SEQ ID NO: 1797 - DNA, 1358 bp, Homo sapiens
cccagcctgataaacatggcgaagccccgtctctactaaaaatacaaaaatcagctcggtgtggtggcgggcgcctgtggtcccagctatttgggaggctgagccagaacaatcgcttgaacccgggaggtggaggctgcagtgagccgagatggtgccactgcattgcagcctgggcgacaagagcgaaactccgtctcaaaaacaaacaaaaaaaactccgtctcaaaaaaaaaaaagaaaaagctacacaaatagccaactggcacatgaaaagatacccaacatcattagtccttaggtagatgcaaatcaaaaccacagtgagataccactttatttatttaattttatttacttattccctcctaccccccttttggctgaagtgcagtggcgcgatctccgctcccggcaacctccatctccccggctcaagccgtcctcctgcctcaacctcggagtagccggaattacaggcacgagccacaacaccaggctaatttaaaaaatatttttggccttccgccacggccgccatggagagcagcagccatggctctgcgctaccttatggccgtgggcctcaacaagggccacaaggtgaccaagaacgtgagcaagcccaggcacagccgccgccgcgggcgtctgagcaaacgcaccaagtttgtagcgggacatgatccgggaggtgtgtggcttcgcttcgtacgagctgcgcgccatggagtcactgaaggtcttcaaggagaaatgggccctcaagttcatcaagaaaagggtggggacgcacatccgtgccaagaggaagcgggaggagctgagcaaggtactggctgccatgaggaaagccgctgccaagaaagactgagccccctcccctgccctcttcctgaaataaagaacagcttgacggaaaaataaaataaaaataaaaaatatttttgtagagacggggtctcgctttgttgccgcccaggctggtctcgaatttctggcctccagcgatcctcctgccttggcgcagcgttgggatgacaggcgtgagccaccacgcgcggcagcaaatctgagatttaacacagagagccagtatgtgcccagcgtatgtgtatgtagtgcacagaatatgtggaccaccctctataaaggttcatgcatgaggaggtcggctctctctcacagtctagcagttttccacacaaaagcggcacacatttttgcaccggtctccaaaatggtgtctggtttgggagcccgcagcttccggaattacaggctctttcctgcttccagggcaccattccaggcctggcctcaataggcccaaggcgcaggcccagaggaggccgggc

SEQ ID NO: 1798 - DNA, 1209 bp, Homo sapiens
tattcaagatagagttgctctggtccaaacgcctctgacacaaggattttaaagtcttattaattaaggtaagatagttccttgcatatgtggtctgaaatcacagaaagctgaatttgaaaaaggtgcttggagctgcagccagtaaacaagttttcatgcaggtgtcagtatttaaggtacatctcaaaggataagtacaattgtgtatgttgggatgaacagagagaatggagcaagccaagacccaggtaaaagagaggacctgaatgccttcagtgaacaatgatagataatctagacttttaaactgcatacttcctgtacattgttttttcttgcttcaggtttttagaactcatagtgacgggtctgttgttaatcccaggtctaaccgttaccttgattctgctgagaatctgatttactgaaaatgtttttcttgtgcttatagaatgacaatagagaacggcaggagcacaacgacagacggagccttggccaccctgagccattatctaatggacgaccccagggtaactcccggcaggtggtggagcaagatgaggaagaagatgaggagctgacattgaaatatggcgccaagcatgtgatcatgctctttgtccctgtgactctctgcatggtggtggtcgtggctaccattaagtcagtcagcttttatacccggaaggatgggcagctgtacgtatgagttttgttttattattctcaaagccagtgtggcttttctttacagcatgtcatcatcaccttgaaggcctctgcattgaaggggcatgacttagctggagagcccatcctctgtgatggtcaggagcagttgagagagcgaggggttattacttcatgttttaagtggagaaaaggaacactgcagaagtatgtttcctgtatggtattactggatagggctgaagttatgctgaattgaacacataaattcttttccacctcagggccattgggcgcccattgctcttctgcctagaatattctttccttttctaactttggtggattaaattcctgtcatccccctcctcttggtgttatatataaagttttggtgccgcaaaagaagtagcactcgaatataaaattttccttttaattctcagcaaggcaagttacttctatatagaagggtgcacccttacagatggaacaatggcaagcgcacatttg

SEQ ID NO: 1799 - DNA, 1126 bp, Homo sapiens
ccaggagttttagaccaacctgggcaacatgttgaaaccctatctgtacaaaaaaaattagaaaaattagctgggcatagtggcacacacctgttgtcccagctacttaggaggctgagctgggaagaccacctgatctccggaggtaaagactgcagtgagccgtgattgcaccactttactccagcctgggcaacaaaatgagaccctggctcaaaaacaaaaacaaaaacaaaaaaagagtaaattaatttaaagggaagtattaaataaataatagcacagttgatataggttatggtaaaattataaaggtgggatattaatatctaatgtttgggagccatcacattattctaaataatgttttggtgaaaattattgtacatcttttaaaatctgtgtaattttttttcagggaagtgtttaaaacctataacgttgctgtggactacattactgttgcactcctgatctggaattttggtgtggtgggaatgatttccattcactggaaaggtccacttcgactccagcaggcatatctcattatgattagtgccctcatggccctggtgtttatcaagtacctccctgaatggactgcgtggctcatcttggctgtgatttcagtatatggtaaaacccaagactgataatttgtttgtcacaggaatgccccactggagtgttttctttcctcatctctttatcttgatttagagaaaatggtaacgtgtacatcccataactcttcagtaaatcattaattagctatagtaactttttcatttgaagatttcggctgggcatggtagctcatgcctgtaatcttagcactttgggaggctgaggcgggcagatcacctaagcccagagttcaagaccagcctgggcaacatggcaaaacctcgtatctacagaaaatacaaaaattagccgggcatggtggtgcacacctgtagttccagctacttaggaggctgaggtgggaggatcgattgagcccaggaggtcaaggctgcagtgagccatgattgcatcactgtattccagcctgggtgatagaacaagaccttgtctcaaaaaaaatttggtttttcaagctttttgaggttttgacaag

SEQ ID NO: 1800 - DNA, 1205 bp, Homo sapiens
ctggacaaaaagagcaaaactgcatctcaaacaataaataaataaataaataaataaataaagactgttatatatgacattctttgacacctaatcaaagatatatggttaagcttatgcttatttagacctttctaatgctacagttcccaaagttctcctcccctaacacacaagcattgaaaatcatgaatcattctttaaaagactacatattaggaattcataggaactgagtttttaagatctttttcacagtcttaatttataaatcactgaatgagaataaaagatctaacatttctgtcttagtagatatgctttgtgacatatagtacattactaagccttttatctgtctgaaaaatggatccgaaccctgcttctaacttatgttttaagagacactgggaaggaaatgggtaaaaggacctagagggctttcgaatttgtcagctctctaaacgcaaattatttgaagacattgctaaggtcttcattctctttattttcttgagctgaaacagataagatagtcgttggttcatcagttgcccctggcaacactgccccatccccatcctctcccacctctcctacttctgatgccacgacctctctggagatgaacaatcctcatgccatcccacgccggcatgctccaattgaacagcttgctcgccaaggctctttccgaggttttcctgctcttagccagaagatgtcaccctttaaacgccaactatccctacgcatcaatgagttgccttccactatgcagaggaagactgatttccccattaaaaatgcaggtaatgtagcatctacctgactcactgggtactcgagcactgaagcattctcatcacttcccatgaagacactaatcccattaaactaggcattcctctttccctgaggttcgttgatagttgtatcttttgtcatttcccatagtgggaaaactaaggtccgtggagggggatgtgaatccataatttctcttcaacaaacaggcagcagagccattgtggaatttctagcctaagccataagatttgtggtttgtcctgatgtaagtgcattcactgcctttcagccaacctgctcccaaacatcaagggtctcaagtttctattcttattctgccattgggacccagcagggaattaattaaagaggccttagaaacacatagcattacc

SEQ ID NO: 1801 - DNA, 1209 bp, Homo sapiens
ctcacactgccggcagggtctcaggagactgcatgcacctatgttctgcagaacatgcctggcccagagcctccgcatcccacatttccaagggcaccattcatgtagcatgtgatgagaatccacctctgccctggcccctggcccaatggccctggcctctgttagccactctaccaggatggtcagatgacactgtgacccatgcctggagccgtctccccttggactgctctgatgcctggcaggctggctcgaaggagagaaaagccatcttattttgtggaaaccaaggagtgagttaggaagagctagagccttcacacctgagcctcttccactgatggtatcaggagcattaacaacaacaagagccagtaccttcatagcactcactttgtgcagggtgcactttaaacatcctctgtggcgggtggatgaggaacgtgaagcacaatcaggtaacttgtccaaggtcatgtagtcaggaagtgcagagctaggatttgaatccagacaacctgacaccagggtccctcttcttaatacctgtaccctgctgccaggtatcttaccttcatttctgggcctcactttctgcatctgtgaactggaggtgatggtactattgctgtcactgctgctgctactgctactattagctaacaactgagtatgtactagtgccccacactgcgctaagctcttcacatgcattatcttagttcgacctgtcaatcatcttatgaagtaggtgtatgcttatcatcgtggcttacagataaggaagctgaagctcgggttgcttgggaaacacggccaagctctgctgctgcaagtgctgagctcgggctggacccaggcagactgactccagaactccaggctccgatctcctgggcttcgttcactcccgacaccagcgaggcctggatattccagagtgtggaatccccacagaccatagcagatatgggagtctgagggagcccgttggatctttctccttcctcccacaggcccctcttgggtccacatcagctccccaggaactccacctgactatccttcaggtgactgcccctgcctctgccagtcccaagcctggctgcaaagcctcagtctcaacagctcccttccttcaaggaccagccccaggcccttctcggtaggagggcttcacagctaatagtccaggtgtgtgaaaaa

SEQ ID NO: 1802 - DNA, 1203 bp, Homo sapiens
ttcctaagcgagaatcgtacccgtagaccaacgagtcacagaagtctatttctttttcactgttacactaataaggcagatagaccgcatgattgaggttagtcaggcaagaccagaagctcagagtagaaaacatgtatggtagaaggctgggaaataaggtagtcctcctgttgcagaagtttgtcttagcactaaccctggatataatgtccagatgggtgaaaaacagaaacaaacatttcatttaaagttgtgagattattacttggccacttcagtgatttatgagtcatcctggatgaagtgctttcttaagcctaagtcaaccctcgatgactattttattttttgagatggagtttcactctgtcgccaggctggagtgcagtggcctgatcttgattcactacaacctccgcctccggagttcaagtgattctcctgcctcagcctgccgagtagctgggactatgggcacatgccaccacgcccagctaatttttgtatttttggtagggacgggctttcaccatgttggccaggatggttttgatctgttgaccttgtgatccgcctgccttggcctcccaaggggagtaatcccttggcctgtaatcctgggattacaggcgtgagcaactgcacccagcctattttttaatagtattcttgcatatataatgttaaaatagaggatgaagagtatcagtaattagaaatatgtttatgtatgcatttcaatattttaaattgcctaggtgtttttttttttccttggaagtttacattttcttgggcttgataggtgctttgaaagtacttgctgaatttattcagtggaaacctgtgaaattgggaagggagctaagttgagccagttatctgatggacatttagggaccctgaggactagagaatagtgccttatgtcattgtgtgtgtgtctcatagtgctttgcatattgctgatacccagtagacattcgttacttgattggagctagagtttttgccactaaattttgcttggttgcttctcatttcagacagtgccagtggcatatacttttcttgtttttcagctgctcctgctaaggccaagccggctgaagctcctgctgctgcagccccaaaagcagaacctacagcagcggcagttcctccccctgcagcacccatacccactcagatgccaccggt

SEQ ID NO: 1803 - DNA, 1215 bp, Homo sapiens
atttctcccaatatgtttcaggtttgggaatatgatactgccagtaaatctttttttccctatgacataatttatattagaggcagatctatttacttacatcccgttagtcaggacttctcaattccttgggctgttaattacctccctgctttaatgctgattcaaatcactctcagaccttttcttcatgccagactcccttaagtgccagcagccagaagttagcagttcctcaatgaagaaaacacacttagaaacaagacttagacacagattgattcccaatggaaaagagaaaaacaataaaggttactgtaattcaaaaaggaaatttgataataaaaaatcccaaacacccacacataagtgtgagaaaaacaatacggttgttaagccctgtggcagcttttgaaaaactattaagtagtatttggaaccagtagtgaagtgcaaatgaagtagcactctttttttttttaacatttgaggttatctctttaggtgttaccacaaaaatctggaagatctgggccttgaatttgtatttccagacactagtgattctctggtccttgtgggaaaagtaccactatgttttgtggaaagagaagccaatgaacttcggagaggaagatctactgtgaccaagagtattgtggaggtaagacacagctgcagatgttaaggaaattgctgagtgatggtaacctcatattttgtctgtagattctctgaattcatcttttcttcaacaagtattcatggtatttacctgcggtgtgccaggagctagaaattcagagatgagttagctcaaaataaggaagaagggcatttaaagaattatagtcagtgaactttggctagtagaggtatgtgttttgctttcttcccagtgataaaggtaatgaaaactaagagtctagaatgcaccaagatagtttttcagaagtgttatggaaacacagaatgacttgtgtgcctggggaggtgaagtcaatgaaaatgtcacagaaaagctgttttcttaagaaaagtttttacttttgagagaccaggtctcactctgttgcccaagctggagtgcagtggtgcaatcatagctcactgtagccttgatctcctgggcacaagcaatcttcctgcctcagcctcccaagtaactcggactacagacacgcaccaccatgcctggctaattttttccttttt

SEQ ID NO: 1804 - DNA, 1178 bp, Homo sapiens
tgcttttcttttggtagagagatggaggaaaaagtcactctgcttaatgcacctacaaagagaccaaggtaatgttcaagagactcttaaaaactaatatatccgaaattacaaccagggggttctttcttgagtgtaggcattatttgatccgaggatactttggcatcctttcaggagccagcatctgcttaaatgtcagacagtcatttctaagaagaaagctataatttcaccctcacactaaagtggccatcattaccatgatgaatgtggaaaagtgtaggtgttatgggtcagactggaatctgatctggccaagctgtgatgaagccctgaggcaggaattgcaaagtctgctgtgatagagcacattgaaacaagttgtcgagaaagaacatactttctcataccataattggcagttcttctcagggaacagactggaagcatttttctttgatattgtttttaatgttaaatgttcctttgttctgggggttgttggcaggtcaagcactgtgactgaagcacccattgctgtagtaacatcacgaaccagtgaagtctatgtttggggtggtggaaaatccaccccccagaaactggatgttatcaagagtggctgtagtgcccggcaggtctgtgcagggaatacccactttgctgtggtcacagtggagaaggaactgtacacttgggtggtaagtgaacgctaagcattttggaacagtgctgtaagcctaattgtttactgggcccacgatgtctaagcattttattagttgaacctatactaagggagtggcaacatggggtgatggaatggaagctcttataagagcagggattttgtctgtttagttcactgatgtatgcccagggctggtacatattaggtcacctataaatgttttttgaatgaatgaatgagagagggagagaaaaattgaaagactcaggagactggggtttcccatttacagctggatgatttcagacaagtcactcaattactctgttatattaccatgaggttcagagcaactattacctgtgaaatagctttgtaaacaaaggaaggactataccatgtcaggaaacccctgaagcccacagcagtgattgaagatggctaggtatattttgtgtagaatttgtttgttgccctctagatt

SEQ ID NO: 1805 - DNA, 1138 bp, Homo sapiens
tcgctgggacgtgcctggcctaaggcatcctaccaacagcaccatcaaggcacgttggagctttcttgccagaactgatctcttttggtgtgggaggacatggggtaccacctacacccaacaagtcaatgagggacttctttttaatttggtaggattttgactggttttgcaacaataggtctattattagagtcacctatgacaaaaaataggggttacctagataatgccaaagtcagcatttgtcctgggttcccttgtgtgatctgtttggactatgttttcttttcttctcccacttgctcagcagcttgggcttccattctagttcttttaccaagatttttgtgtgaccatgttgacttcatttggattgccctctttcaatttccttgtgaaaacacccttaactttctctttacccttagctgaaatgtttacatagcttctggtgatatcttttcatgattttatatctcttaaaatggtgatggatgtgacacctcataaaagtgagctttgaactgtagataactcttaaagaaaatgtcattttagacaattaaaatatttgtgctcaactgcttgaacttttttcgtgtatgtgtatttaattctatgcaatattatcacatgtgtagattcatgtgaccaccatcacaagagacagaacagttctgtcacatggatcccttgcactgcccttttacagccgcagccacatccctttcttataccctcaccccaacctgtggctaccactgttctgtcctccatctctgtaattttgtcatttcaagaatgttgtatgaatggaatcatacagaatgtaatcttacgaggctgatcttttttcattcagcataattcccttgaaatccatccaagttgttgcatgtatgaatagtttcttcctttttttcttttaaaaatgttttatatatttagggggtataagtacagatttcttacatgcatatattgcatcgtggtgaagtgggggcagttccttttgattgctgagtagtattccatggtatggatgtaccacagtttgcttaaccattcacccactaaaggacataagagttgttttcagttttttgccctaataaagctgctgtgaacattcatg

SEQ ID NO: 1806 - DNA, 1218 bp, Homo sapiens
taagtcagtcaggcgcggtggctcatgcctgtaatcccagcagtttgggaggccgaggctggtggattgcctgaggtcaggattcaagaccagcctgcccaacatggcgaaaccgcatctcttataaaaatacaaaaaattagctgggcctggtggcgggcacctgtaatcccagctactcgggaggctgaggcaggagaatcacttgaacctgggaggcagaggttgcagtgaggcggagtttgcaccactgcactccagcctgggcaacagagtgagatcccatctcaaaaaaaaaaaaaaaaaaaaaaaagaaaatacattaagtcaaaccactgtaaattgtggaacatctgtgtttgttttggtaagcagttaatatattttcttaaatcaatttgagcattttgagaattgtttcaaagcttcattagggcaggtctagagttagccctaaacactaatgcctggttgttcaataagatctctactccagctgagtggagctgagcctcctccagttctgtataagtgctggggattgtttagctcacaccttttcagtagttattgaaatatcataatgcagtctatggccataccaccctgaacgcgccagatctcgtctgaaatatcataatgcgtaaccccctctaagtcaaggaggttgtgctcaagtctgcccaggcttgtggagtttcaccctacagaggcacagcttagtatccagtcggtctggacttctagagcttttcctctccattagctccccagtctttcagactttgcttctaaaattccagccacttaagccccactaaacttcagtctcccttcaactcagtgagaccttcgtgctatgtgtggggctcccccaagctgtgccaaagtccaggaatgacctctagtgacccagggcttactttatctgttttcctgctctcaggaatcaaagtcttaggctgcttattatccagtgtctggaaacagtagtaccatgtatttttcctccagttttctagttgtttatggcaaaagggcaagtctagtaccacatactctctcatggcgggaaatggagtcttaaagcctttttttggaacacctttgcttgtgactgcacaaagagaattcagtctgtaaaacttagataattctctgataatcacaagactagggaaaggatcagaaagaacatctgtgaaatattctgggatg

SEQ ID NO: 1807 - DNA, 1223 bp, Homo sapiens
cctgtaatcccagcactttgggaggccgaggcgggtggatcagttgaggtcaggagtccaagaccagcgtggccaacatggcaaaaccccgtctctactaaaaaaatacaaaaattagccaggcatggtggcgggcgcttgtaatgccagctactcaggaggctgagtcagagagaattgcttgaacccgggaggggaggcggaggttacagtgaaccaagatcacgccactgcactccagcctaggcaacagaacaagaatccatccccaaaaaaataaaaaaatagccaggcatagtggcatgagcctgtggttccagccacttgggaggctgagatgggaggattgcctgaacatgtgattacgccactgcattccagcctgggtgacagagcaagactctgtctcaaaaaggaaaaaaaaaaaaaaggatgatcaaaactatggcactaagaaatcatccctcccatttgtttttctcagaccttgtttaaaattctagcttatgatatgatgtctttactttaggtgatgacgaacagagtgattggttctatgaaggagaatgtgtcccaggattcactgtccctaatcttctgcccaagtgggctcctgatcattgttctgaagtagaaagaatggattctggattggataaattttcagattccacattccttttaccttctcggccagctcaaagaggtgagttctgaggagaccaagaacttaatgcttttatggttctccttgggcagagcaatcaccccctagcaagcatactcatgccttcaatcacacattaactatctgaattttggagctagctcaaggattttctagaggagtcaaagtaagtctcaaagcttaaggttctctccattccttcctaaactaatccatggaaactcctgggacatatatattatcaggagattccttcagcttgccattgccgtttgtgccagatttagtgacagctgcttatcctgatgtgaaactaagaggttattgagtatcggattttggaagagaacagatttcaataagaacattcacatacatattcttattttcagtaagagtattcacatataatggtgtttttaaaacggatgcttttaaaataatttaagtagttttattttaatgaccctattgggactttaacacaaatatgtttccttttccctttgctttttcttcaattatgatgtagcaa

SEQ ID NO: 1808 - DNA, 1116 bp, Homo sapiens
gaaaaccacccctctttcatctttttgttctttttttctccttaatatctagcttttatttttagcttttaattgtttataagagaggaaccactggaaagagtttaaaatccttgttccattttcaggttgggaagtgtacgtgtgtgggggtgggtattaaacaagacttgagcattaagcatttcccctcctgagcccagctcctttcctcacttgttgactaagccctgcttcactgagcattttctttttttctgcccacaacctgagtgccccatggaggtgaaggacatagcctgagtctgagccatcagtcagtagaacaaatgggcttgctctgcctaacatcgggccatctcggattccacctcttttataggaatgagtgatgaagagaggtgggttccgctttgccgctgtattaatacacatcaggggccagctcctagcactaaatcacgctacggcatacatctgttatcggactcttcaccagtgtgatgaacaagactgcagatagaggcttccttgtgtcattctttataggattttcctaaaagaataaatagctcagatctctgccaacactctcccctgtcactgtgatgaattcagcttctttcttaaacatgcagccacaaatcttttccctttttcccctcccccagtggtagaaagttttgagttgcaattgactgaatttaaagatattaataaggctagagaggtgaagagcaggaagaaacagcatgtcttccttgcctttttgtactaatagtaacaaaaggccaaggaaaaagactgtaaatgaccataggttgttaaatagacccatcttgaaagtgtagcacctttattttctttgtatcttcattctccctcctttacggctttctagcatgcaggtgtctagtgcacagaaccacaccctggatcttagtgagcaagcatgctaacctgcttctcagacttgatacaccagaacagggatttccctgcaagtgtctccctcatgctgaagtgaactagctgaatatgctcttaaagaaagtagtcagaaaagaaaaaaaagattatcttctccaaaatttgagaccaagtagctgtaaaaaa

SEQ ID NO: 1809 - DNA, 1225 bp, Homo sapiens
ggttgacttgggggagcactttttgataagctctttttcccctaatatctgctaaacttatagagggttatgtaggtatgcagaagccagaggtgacccacccatgttactgcaggtgaaaaggctatgtactctttcctcagagggtaaagcctcacagaagaggcctgggccccagacaggggtacattggggatactttaccaggtaacaagcagatagtgggggattaggagtgttagggagtctcagtacaaatgtgtgtttctaggctaattttagctaagactgccagccccttcttagcatggggaggaattggctgagattgagtcatctgagatcatccttttaaaaaatcttcataaaacccatagaaaaagtgatctagggaaaatttagtaatttttgttaactaatgtttcccccttcatccctgtaggactgtaggtaccatccagcactgcctccacctgacgtcagtatatacccacttcctgccccagcgtggccgcccagaggtcactacaatgccattgggtcttggaatgacagtagattacatcttcttctcagctgagtcctgtgagaatgggaacagaactggtaagcctgatggatcctgggttcctccacccccaggtccctgggaacagctaatggtaggtcaggcatttggtagcatgtcttcagctgctgggatttaaccagcaaaggagcagatttcatacctcccttgcactggtcatccttatcattctccccataggccacttgcctgccttgtctctttttacccttgcagcattaaagagaggagggtaggacagtcactcccaatccccattttagaggtaaaaatagagatctaggaattggttgagtttgtttaatgacagccactgaatgagggacttggttaggtaagagaccttattttctgtctcctctccccataccagtgggcacagtatagcaatctcccagccccatgcctgtattgtgtaaagaatgtttctttttggccaggcatgtgtattactgttatggccaggcacgtgtattactggttcacaccggtaatcccagcactctgggaggccgaggtgggtagatcacttgaggttaggagtgagaccagcctggccacatgatgaaaccccgtctctactaaaaatacaaaaaattagccgggtgtggtgacggtgtctgtaatcccagctgc

SEQ ID NO: 1810 - DNA, 1157 bp, Homo sapiens
cttttgactgagcgcccccgccaggaatggccgcctaaagaaacaggcatctcaacgctttattgctaagtgtgacggttagtggggagttcgactctgcagccaaaggaggtcaggaatcgttcaataacaatcggtctggaggtgaaaagaggcgaagaagacacgtaagtccctccaagacgcggggcaaagcgatggagagacgcgcgccactcctctctctgtaccttttgggcaccaggacccttgccacgggctgcgtgggccgccgagaagtcgatgaccccttccaggtctgcggtcccgggccggctctgacggtagaagcggaaaagtttccgaaaggcgtcctccccgggctcagtcgccagagtcgccacagagcccacggccgctgccatcttccccatctcgcggcctataccctctgatccggaagcagattctctcgtgttccggatccggaaattttttccggggccgcgacctcggctcgagaaggtgctttagtctgaagatggcggcctcagcagcgagaggtgctgcggcgctgcgtagaagtatcaatcagccggttgcttttgtgagaagaattccttggactgcggcgtcgagtgagtgatggagatgtgggagtagtggaatttttaggtccaagtgatcctcaaagcttctgctttttgcagggtacttaagtcagcgtggtggctgaattaggagactgctcctgagcatgcaagtgagcagaaagaaattttgtttgcagttaaccgtttagggatgtcccttgagcttttggggtcacgaatgcaccggctcttgcctttaggagtgatttggtgtaaagatttattacttggtaaccaagatttacaatttagaagggataattttgactgtagtgtggaggatggattcaaggtggcaagattgtaggcgtgcagaggagctaaaaggcaatttcattaatttacttaaaacgtgaggacctgaattagggcgatggtagaaggatggtggtcagatgcattaatgttttaaaagcaaattagatgccgtttcgtgatggcttaagtgggagaagtgtacggaataaaggaaagggagaaatgatttctgggtttttagcattggtgaattgtttgtttagaagt

SEQ ID NO: 1811 - DNA, 1232 bp, Homo sapiens
ggaatttatgtaagcctaaatggactgaattagatttattttaagttaagagtggatatataacatatcttaatttatattacttggattaaagctaagaaaaagcaaatattcatagactgtgtccatagtgccttgtactctgcaagtcattttatagatactgtttcactggcatcttataagggctttgtaaaatagcccttggctcagttttacagctgaggaaaatctgagcccagaaaaggctaagaaacttgatctgtattttctctcatgacaaacatctattcagttataaaacttcctgagcattctaattcagtgcatctgcttttatgggagaggacactagaagtaaatgaaaagttcattttaatatcatttagttactcatttgcctcatttgacagtatatatatgtgtcttaaaattggtaatgacacacagtagaagagtatttgggttattttactgttgatatctagtggtacttttcatacctaattttaatgtgtactttgtatcaaataattttatccttttattcttttttgatgactgttcttcctgttgccttcagacctggcattaggattttaggtcatcataaattaaaatttgattttcttcactcagagaatattaggataatggagttatctgttctctgaaatttgcggaatcaaacatgtaattccttttacgcttaagtaacattgccattatttctgatttgtattttttccgacttttgccggtttaccactcttcaggcaacctggtggtcccctgctttcaggaggccaccatattgatgccgaacttatttggacacctgatcagcatagcacatacagcccagaactcctgggctcaagtgatcctcccaccttagcctcctgagttgctgggactacaggcatgcatccctgcacccggctgatttgtattttttaaacagctgatgaaagtggcatgagtctgtcagctgtcatatttggaagaaaaggactatgtagatttcaaaaactagtcacaactttttgagcttacttttattggattagtaactcattgtaacagtggtatcattgtatcagtaaaacagttaaccttgagttaagacaaaattatgtttgaaaatgtccagtttacttaagaatgcatagaactatttatgtttagatgttaaggtaactcactacttcatgttcctaaattcccttgca

SEQ ID NO: 1812 - DNA, 1205 bp, Homo sapiens
ctctgaaagctttttcttggaaatggtgaacattttattaacgaaaggcagttatttgacaaaatctaaccttaatggagtaaggagtataatacctctccatgtactggcccagtatggagaagtggtgaatattttcactgcaatactgtatcagtctgttctcacgctgctaataaagacacatttgggacttggtaatttataaaggaaaaaggtttcataaactcacagttccgcatagctggggaggcctcacaatcatgacggaaagcgattaaggaacaaagtcacgtcttacatggcggcagacaggagagagcttgtgcaggggaattcccatttatgtaaccgtcagatctcctgagacttattcactaccatgagaacagtatgggggaaactgcccttatgcttcaattatctccacctggccttacccttaacatgtggggattattacagttcaaggtgagatgtgggtggggacacagccaaaccgtatcaaataccatctacttcacctttctatctcagtcattaaaatgctaattatccaagactatactttcagggatcatttctatagtttgttactagagaagtttctctgaacgtgtagagcactaaaatgctaattatccaaagagacccatgtcactgagatgcttttccccattctcccagccaatactacattgaaaacacaaagcatattacttaaacctatcttctaaacttatttttctctacttttcttattctatcattcctcaaaaccccatattccgattgcaagttttactaagacctggtggctatggcatgtaacactcagcaaaatgccttgaacacagtagatgttaataaatgtttattgaacgtagttgatttaatcacaagtaatgagacattgaatacttttatgctaagaagaatatgaacaaactatatttcaagctgattaatatggtaactgaaacagtatttgcttctttaagcatcttggtttattttcttatgtaaatatgttcccacgatgtacagggtgcacagagctaattaccttcctttgcttggtatgcaacagaccagaaaacctaaaattattctaatccaagtgtttttccaaatggcttctctacaacccacattgattcggtatagcaaaagtaaaatttacttggcaaagataatttttttgg

SEQ ID NO: 1813 - DNA, 1216 bp, Homo sapiens
cggcctcccaaaatgctgggattacaagcgtgagccaccgcgcctggcaccatcagtttttgatcctgatacttgtctgtcctcttggttctcctcatccctaatttaaccttgaacacaaaattcaacaggttttggcatatagaataaagattatcaggcaaaggcgcactcttgacctaatgatatatctacatttcatttcctgatctatcagcaatattaattgtctagaatgatgagaagtttagagaagttccatgactttgaaattttctttctttacctaggttatctaaattacaatttgaaactcatataagatcatgaagctaagcttaaataaaccgcattttgttgaaaatgaatacatatgtactatattgtattcatggtatgtggttgtatggatattgtttacatatgtttggataaataggttcaggtatctatctcagtaacgtaagaaaaaatgaatggtatctatggattgaactcctcatatatatgttcttttcttttctttttcttttttttttggagacagagtctcactctgttgcccaggctggagtgcacagtggtgcaatctcggctcactgcaacctccgccttccgggtttaagcaattctcctgcctcagcctcctgagtagttgggattacaggtgtgtgccactatgcccggctagtgtttgtatttttagtagaaacgaggttttaccatgttggccaggctggtctcaaactcctgacctcaagtgatccacccaccttgcctcccaaagtgctgagattacaggcatgagccactgcgcccagcctgaactcatatgtcctaaaccaaaggaggcatttatatttaatatgacatagtcactgtggagttttgacgtattactgcatttgtatttctatcttttttgcttttatgtgaaagttccacagaaacagacacttccagttgctcccagaactcgaacttctcaagaagaattgctagcagaagtggtccagggacaaagtaggacccccagaataagtccccccattaaagaagaggaaacaaaaggagattctgtagaaaaaaatcaaggtaataacttaaatgatgtttcactctttactacagttttttcatgaggcattgaatattttccaatggatttttatgaaatattacactatgaaaaaagtgatgattaagcccagaaata

SEQ ID NO: 1814 - DNA, 1198 bp, Homo sapiens
aatgaggtgggtatggacagtggaggcagctggaatggcaagtgcagaaaataggaacagttctatacagtgctctcatttactaataacataatgccttctaaataatttttttgggaaactacattatcacaaaattatacaaatttttttacaagtatttacatactgtatctgaaaacagactttaaagtcacaagattataaatgtacatatatattctcacattctgaaaaataacattctcagaatccacagaaaatatacttagttactactgaagataatttttgaaatgtaaaaattagatttaaatagtatattttaaatgacagaactataattacagagatcagatcagataggtaaactgcaagatagataggatgaaacttttggcctactgtattacttacagagtttttttgtgtgtggtttttaaaactgttaaggcaagaagtgtcaaatgctttagagttaaataacagatcactgatttcaaagacttggtgtatagtgttaaaaattaaagcttaaaaggtggttagaaaagtggattaatgcaaaaggggtaataaagactgcaacattctcaggaccaaattaaactgctaaaaaaaaaaaaaaagttcattgacttgcttagtcgtatactcaaatgatgataaacctacatgtgcaaaggctcacgtttaagattgtcaagccagcagtctactgttgtgttgccattgcttttccattgggagaagaaagaattaaccagtcattaaaccatttggtaagttgcactttgctgtgctgatcccacaggaaaggcttgaaacacgagaagcagcaaagacagagcacacaagtgcataaggctgttgtcttcggcttgggtgaaatgacagttcctcttcattctaaaggtttactccattgaatttaaggcatttgttcattccagtgttgagatgctttgcatctctgcagaagaaatttattttaaattgtttaaatatctggaaatacttttagctatcatttataaagatagttttgttctcagtttcactataaattatagaacaaatgggaaacaagggtttaatttagttcagccattttacaaggaaataataaaatactaaaatctgattgttttttgctatttaatagccactgcccagacacatatttaagagtttaatc

SEQ ID NO: 1815 - DNA, 1237 bp, Homo sapiens
tcatgttcctaccatgcgtcatgttaaataaattacctgtccttgcatggtgaccatatggtttgcacattgcttgtaccaagaatatattcttaaaaaatatttgaggtgttctttttggatttagagctgtagaaagcaaggatcttttttcctttttctgtttcttagtactttccccagtaaaacagattgagtgctcaacagacattgctgactagacagacatgtaagtgtagatgttttataaataaatttgttataagtctgatttttttaaccagtgggtttctatttaatttgtacagaaaaacccagatgctgagtttatctgaagggtttgtgttatgtggattttccttcttctccttaagtgattaaagtctgaatgttttaaccaccgtgaacttatttttgaataaaaggaaatatttccttggtatagttatgggattattctcaatttctgatatattgtgtgttcattaaacaagtagttatcatctctttgcactttgaatgaggttagattaattagaattttctgatcattgaaaatttagcattcttcaatgtatattcattttacacaactcttgagaacacttctgtaggaagactaaagttaattttttggattcttattgaatgagttagagttcacctacaaatacttggttggtccttaggactttttattttagaaactgtatttcttaaaactgtttactgccttcttaatgctttccaggaaccagatcctgaattgccagtgcatcaggtaaagaaaggtttagctgcaacctttagtttagagaattctttaatgctattgcttagttgttgctatagattagaaaatttgctgcatatcttcctgtgggtttataaaattagccatatctgtcagacattctgtgccttcttatgtaaataaatgattatattttcaatacttttgtgtatattgatagccttgtagaactaataatgcagtctactcattgggacttggagcttaaatggaaatgaccaagatggattagaaggatatgaaaaataaagaaggaggtgaggggaaccaagggcttagaaagggagcgggagagtcagcggaatgacaaatgtctgaaagactgtgatggatgggatggcatgtcttgagtcaagagtggactgtgcttgggaaggtcttggttttaactgacctggtggctctaagagggaggaggctgcc

SEQ ID NO: 1816 - DNA, 1186 bp, Homo sapiens
acacacctcacactttcctctataattttgctgatgctgtttccttcgctttaaataacttaatgccttcttcacctatatttttgccaattcgaattctattgatccttcaagtcccagaagagatgctacattcattctcaatcctttcctgagcccagtttgagagtaatggtttcctcatccaagctgccagaaatgtctttttcttctgccatttctaactttctaccttgatttctacttatttgttgttgtttttaataagaaaagtaaatgtgtttaagtcatgtctgctttatcatatgtatgctagagaaattcattccccccagatctttgaggtttactttacccaaattcattcattaaacaaatattccctgagcatctactatgggccaggcattactggaggcccttgggatacatccatgagcaaaacagagactaaaaaagctccctgccctggcagagttgacattctagcagaaggagatggataataataaagaaataataggccggtctgagtacagtggtatttacaactaactgatcacaaaaactaatagatttatttgttccttctccactcccactgcttcacttgactagaaaaaaaaaaaaaaagaaaggaaggaagaaagaaagaaagaaaaataatagacacaacaaatagtaaattacatagtatgctgaaagatgaagagcgtttggcaaaaagaaaaggtagggcaggatgaaggagattagggatgctagagattgcagggttggggcaggtgacaatttaaatagggtagtcagggtaggtttacatgggaagtaacattcaagcgaaagcttgagtgagatgggatcgtagcccatctcactacgtatgtatgtgaagtagtatgtggggctacttcctcacataatcttcctatattctatagactacaggtcttgaggtggaatctctatccgattcagcttggtatcttccctctcaaattacccagcaccaatgcctggcctggcataccggatcaaaagtatttgctgaatgaatgatagaataaatgaatgcatggacaggcttcaaatctgctgggaaaatatccaaaaatgtgaaataaaatgaaagcaggatgtaagaaaagagaagagaaaggttaatacaagagacaagatgccaaaa

SEQ ID NO: 1817 - DNA, 1220 bp, Homo sapiens
tttatttagaacagaattctctctgtgcagtgcacactgttgcctttggcatctcccctgatattactggcagtaataacagtttcaccaaagtgaagggatgtaactttgataatttaggagtgttctcaatcaggcctcaacaccctcctagatggaattgtctttaaaactggtgctggaagttgataaaatcaaggctttatttttactgtaaaggttctgatgggccttgttctaaactctttgtaaactataaatcactattagaattttgtttagagtctgaaactgcctttatcgttttgaatttttagagccgggggctgaatttcctgttcgtgtacaacatgtagctcttattctaggaaaaactccagtgacattcttgttcagtaaagtgaagtaggcctgatcctatttatcaagactgacttcttaggtttgctgaaaagacattcaatggctcaccaggcaaatcaagaaatgagaacaaggatgtgagggcgatctggctgcgacatctgtcaccccattgatcgccagggttgatttggctgatctggctggctaggcgggtgtccccttcctccctcaccgctccatgtgcgtccctcccgaagctgcgcgctcggtcgaagaggacgaccatccccgacagaggaggaccagtcttcggtcaagggtatacgagtagctgcgctccactgctagaacctccaaacaagctctcaagaaatgagaacaacaccaaaagagagcataagataaagggggtgtctcagtctgtttgggctgactgataccatagactgggtaatttataaacaacagaaatttactgcccacagttctggaggctgggaagtccaagatcaaggcagcagcagatctggtttcttgtgagggctcatgcctcatagatggcaccttctatgtgtccacacatggtagaagggacaaacaagctctccaggccttgattgtaagggcattaatcccattcactagggcagtgtcctcatgacctaatcacctcccccacctcttaataccatcacagtgggggttaggtttcagtgtgaattttggggggacacaaaaattcagaccatagcagaggatgtgttcgcttcttagggctgccataacacattgccataagcttggtggtttacaaaaaatggtacctattctcttacagatctggaggccagaag

SEQ ID NO: 1818 - DNA, 1146 bp, Homo sapiens
gccttagcctcccaagcagctgggaatacaggcacctgccatcacgcccggctaatttttgtatttttagtagagatggggtttcaccatcttggccaggctggtcttgaactcctgatctcatgatccacctgcctcggcccccccaaagtgccgggattacaggcgtgagccaccgcgcctggccttgttccttaatttcaacggtaaatataaaattattttctaaagattcgcagtagaatcctagtactccttggtaatgagagagaaatcaattaagggggacaattccatccccagtgcaatgtgttttctttttttttttttggagaccgagtctcactctgtcgcccaggatggagtgcagtggcatgatctcgcctcactgcaacctccacctcccgggttataactcctggtctcaggactcccggtctcgaactgctgacctcaggtgatccgcccacctcggcctcccaaagtgctgggattacaggcgtgagccactatgcccagccgtagatggggttttcatggtctccagaaggactttctgtgatgtgaccacattgaccttcagcctaggtggtcatgtgcttaatattgttatataaattatagcacttcaaaactttaacttaacttcaccctaagcaatgagagccaagaaatcagactatttttgtgtgccacttaaataaacaaaaatggaaataaataataaatgccaatgaaatagtcattaataaaatacactgtcttccatgtgttactggaaatgatgtgtggcccccgtggtacttgggaacatccaggttttctgaattcacattttaaagtctatgaggaacccacaggtgaatgtgtggcacatggagcatatagacagacacatgaggcagatgcatgagatgcaggcctagagatagacagagtcatccccgccccaggagggaagtttctgccctggaacactgagagagagagagagagacctggatccttgtgatgaattctccctgtttgcttatgttagtttgagcaggtctggatttaaacagtcccatttccccttcctctgcccctcattatatactcattactaatggctaataactggatgagagatacatgggggttcct

SEQ ID NO: 1819 - DNA, 1197 bp, Homo sapiens
gagtattcctcggcagtgcctaggaagtaccccaactgttaaaataataataaacagctcttctcgttgtaagctgagccctcaggagggccctcagagccgtgcccatgtgagtgagtgttggggtgtgcccgtgtactgaggagagacaacagggtcgtgttcagtgcactgctgttttcaaatcactgtgacagcctcgtgagcatccttatgaaataactggtttttaagtacaaaaccagggaaagcagttagtggttcacaccagcatgtaagccagaagagaagagaatgtagaataagtaagcacacatacgtgccgtagaagagagaaactgaaactgctctctttgcggttctaacccaggtacttgatgctaacagttaacctcactcagtcagcaaacgctggttaaacaacctgcgtgggaccaccgggatcagaagcgaaaccacatagctccctgctttggaaggaaacataaataagttaggagatggtaggtagtggtggacccggggacagatcttagttctgtgactcagcctttctgagctgcatccttctatttctgagatggagtcatcatgccgtcctcgggggattgcttttagaattaagtcacatggtagcatgccgtatattaaggtgcagtaatggtggtctgtaggagggaagggcagaattactctatggaatatggtcagtccttccaggttgtgagggttaaaccctgagcctggctggtcatttgcaggtcctgggcctctgtggttgtggggagctgagttagcaagacagaggaatcagtttcactgctttatctctgacccctgttcgtctgtggagagacatcactgtgcctttgaccccagcaagggcagagagtgtgcagtttggggcaggaagggaaagggatgcttgcctgccattgcttaaatccccagcttcacacctcagtcattgtttatacacaacaagaattagttcctgtatccagaaatcagaaagtgtcttctgtctgggcatggtggctcacacctgtaatcccggcactttgggaggccaagacggatgaatcacttgaggtcaggagctcaagaccagcctggccaacatggtgaaaccctgtctctactaaaaaatacaaaaattagccaggcgtggtggtgggtgcctgtagtcccagctac

SEQ ID NO: 1820 - DNA, 1623 bp, Homo sapiens
ccactgtcctgcagggccagagcacagccatggcagccacaggggacgtggccctgctgaggcacagcaagcttctggccgagccggcgggcggcctggtgggcgagcggacatgcagcgccagccccggctgctgcggcagcatgatgggccaggacgcgccctggaaggctgaggccgacgcgggcggcaccgccaagctgccgcaccagagactcggctgcaacgccggcgtgtcgcccagcttccagcagcattgtgtggcctccctggccaccaaggcctcctcccagtagccacggagccgggacccagaggggcagcgcagggcgcagagcacacccgctgggccagcagctcccaacggcgatgctactactaagaatccccagtgatctgattcttctgttttttaatttttaacctgattctctgatgtcatgatctaaatgaggggtagtgggggatggaagagagtaccaggtggtccaccgttggggagtggggccgtccgcctgctctctactgtgcagacctcctaactgagtttacacacgcttgtgtttgcaacactaggtctggatgggaggtgaggggtgtgcgtatggctgccatgccagtgtctgtgcacatccctgtctgttggtctccatggccactgtggaccgggacccttgggggaagcctgcccatgtcgggctgtgggaggctgatcggtgcatgtgagagtggcttcccttctgcctgactccccactccctgacctgccccttccttgtttttcctcctactggtctccaccaaggctttgttagcccccaccctgcctggtgtgcagctaacccctccctccccacagccagaggaggccacagacccctcaggggagttccgcgctggggtctgggctgtgctccctcactaaagggaaggaaaggaagctgggcgtcctctgggccccccaacacacgtcccatttagccctgcacagcggtctccttcccctaagccagcactgctgctccctggagcccgggaaggaggctgcctggctggaggcccgagccgatggcgcctgtgctgaggatttgtgctgtgatttgggcaaatcattccaggtctttgggcctccacccccttgtctctagtggacatttgagatcagagagcaccacagggctggctttgtgccctaacccctgggatgcagcctgcctttccataaagtcacctaggtgaggataggcgcgggagcctcggcatgacaccatggagatcggggccctcttcccagtgggttcactccttttcacacctgctgggtccctcctcacccagcaggcctggtccacctctcattgcaagccccaagcactgagccagcaggtgccagggagccacccgccccccatcgcttctgcacacctcagactcaccccatcaccttggcagcaaagcactggctctgccgtctgacccctgatccaggcagccccctctgcagagaaaagggttggggagaagcctctgcagtcctggaagatgtggggtgctgggtgagaggcatcagcccccacaagtatgtttttgtgtcttaagatagcagtttactttgaaaaagtg

SEQ ID NO: 1821 - DNA, 1212 bp, Homo sapiens
gagaagcttctgctggcagctcgtgctattattgctattgaaaaccctgctgatgtcagtgttatatcctccaggaatactggccagagggctgtgctgaagtttgctgctgccactgaagccactccaattgctggtcacttcactcctggaaccttcactaaccagatccaggcagacttctgggagccaaggcttcttgtggttactgaccccagggctgaccaccagcctctcacggaggcatcttatgttaacctacctaccattgctctgtgtaacacagattctcctctgcgctatgtggacattgccattccatgcaacaaccagggagctcgctcagtgggtttgatgtggtggacgctggctcgggaagttctgcgcatgcgtggcaccatttctcgtgaacacctatgggaggtcatgcctgatctctacttctacagagatcctgaagagattgaaaaagaagagcaggctgctactgaaaaggcagtgaccaaggaggaatttcagggtgaatggactgctccagctcctgagttcactgctactaagcctgaggttgcagactggtctgaaggtgtacaggtgccctctgtgcctattcagtagttccctactgaagacaggagtgctcagcctgccatggaagactggtctgcagctcccactgctcaggccactgaatgggtaggagcaaccactgactggtcttaagctgttcttgcataggctcttaagcaacacggaaaaatgattggcggaaaataaacatcagtttcttaaaaaaaaaaaaaaaagaaaagaaaagataacaatgtccttctttgcaaggcttctgtgaattcagtcctttctcccagtttcacaggcaaataaggacagggactcagttgaggtgactaatcctcggagccacagccccccaattccaggggcttggaaatgctgggatcacaattaaaggctttgaacttccaccagacaccaccaccagagctcactccatccgcaaatgctatgtacattcttggccacaaaaacacttccaggacaaaaaaatgtttcagagttcagaactattcaatcccacatttgttctctatgaacaaacgatgcaggaagaaatggaagaagctgaatctctctgagggcacactttattttgccctgatgagaacttagtagcacctaagtgcttcccaa

SEQ ID NO: 1822 - DNA, 1347 bp, Homo sapiens
aggctggtctcgaactcctggcttcaagggatcctcctgcctcggcctcttaaagtgctgggattacaggcgtgagccaccgcccccggccgcctctgagtttccagcctcgttggccctccagccttttaacctgttgggcctaggatcaggaaaggtttgttgaatggggaactaagaagtgaattcgttcgttcgacaaacgtttcctgagcagccgctgggtgctaggcgcagtgccagcgcggaatgtccagggagacctggtgcccaaagcttggacccatcgtgagaaatgagaagcagatacaaagcagtgtgggagtgcagaggagacaaagcaagcctcatcaggcccattgcttgctctgctctcccttgtacttaccagtgcttgacaatatacagttatttactagcttggttattgacttcctacccagcactcagttttattcactgctgtatcctcagtgcctaggacgatgcttggaacgtggtaagtgctcctattggcgggaagaataaatccggaagagcaggaccagtggacttgctacataatctgtagtcttggagccgcacagggttggtggtaccctcgagcacaccagacttgcagaaaaagcatactccagaggaagctgaggcatgcctgctcgagagccagctgttccatgtgcaattttcctctgatagtttctggtcactgttgccacggtgataatgactgggctatgtcattatctatccgccaacagtaagagaagctttgcagtcgagatattgtttagcagatggagtgttttctgttgaacactaagtactgccacaagttacttttttttttttaaactttgagtatttttttacaatgttgctggaggtgatctgtttatgctttgagagtgttcgaatttaaaatcagaaaatcatgtcagtgagtgagtctttcaaataatccttcggcatgaaacctgagcctagtaaactatgaaagtaaactcggcacattacccgaaagtctcaatgtcatattttcacccccatcaatattattgatgattgctcattttctaatgtgggacctgaaatttaccaggtgcttaaagaatctttttgtttttcagattcattgattccaggtaaatcagaggaacaagcaacatgaacagaaatatgtagaaaaagctattatgcagaagcataattgttgtttcagaagtccagcatctggtgcacttaacaatagagaatatattaaactctttccaaaataacctgttgttcctacctgtgttgtaagtgttttgtttgtttttaagtaaatattggtgatttgttgcc

SEQ ID NO: 1823 - DNA, 1347 bp, Homo sapiens; identical to SEQ ID NO: 1822

SEQ ID NO: 1824 - DNA, 1187 bp, Homo sapiens
ctcctagcataaagcctctttaagttctgggggccacatcttgaaagagaaaagtgtttgtaagggaaacacttcagactgtcccttcacaagtttacagggtcaaaattatcacagttccttttacttctctgtgaaagttgcttcttaagcttcgtcctctcactgtagagctgccatatcaaactcatcagctcccagaggcgcaggggataccaaggatctagtggaaatgggagggctccaggatctctttcctgtctgcaggtgagtaacagtgagccccagagatgctccttgaggctgggctgcaggaaggcaggtgaagagcccccctaggcttacccaggaccttcctggctttggcactgaaactcctgcatcccaggaaccccctcagtctcgagcagaccaggatggacagtcaccctctctgctagtcctccactcaacttttcttcaatagctgtcaccctggtggaggccaaccgtggggtcaaatagcccatttcctggtgtgtggcttgcctgccctgtcaaggcagcagtgccgaatagaagcagtagccagaagctgtcttccctttttctgaggattctcctgccaggtcctgaaacttcagcacgcacagggtatcctgggggctgttcgatatgccagcacccaggtcccacccacagagagtctgagtcagaaggccagggccagtgcttgaatttgtgcctcctggccggtgtcaggaggttctgatgcagagggtctacagaccaggttttgggaaacactgtcccaaagtgtaggagcccatgctaaaggctgcttgttccggatggctttgtcatgtcgggctagtttcaaagttcccatgaggagcttgtaataatgaacaagcaattcacagctaacacactggcattcagaagtgtttaacgcagcatactatttaatcctcagaaagtgttcatccattccacaaaccctggatgagaagctacattaagtaaggagtgaacaatgagaccctgggtttgctagcctcacaaagcttagacagcaggggggacatgggcatggggcagacagcctgtgggctggatgctggtctggtgacatgacagccacccccctctaatgtctgcatcacagaaaggaagccaggagcaaggatctcttccctgtagcgctc

SEQ ID NO: 1825 - DNA, 1193 bp, Homo sapiens
taactagaatccttaggtaaagtttgctgacttttaatgaaatttaaaaataacctttttgcccccttcagttacccaagtataaaatgtttatgtctttctgttacttacttgtttcagttccacacttgtaagtttacaacatgttcataagtgggttaccttagacataattagactttgtagagaagtttaattctatcattaagatttaaccagtggtgtgtgtattaatttgcacaaaagttaaagttttgctgtttacacttagatcttggtctttttaaaattgtctttgctatcagaattgtactgaaaataaatccaccagccatgcattccattttggagagaattgcagctgaagaagaagaggagaatgatggtcactaccaggaggaagaggaaggaggtgctcattccttgaaagatgtttgtgatctaagaagaccagccccatctcctttttcttctcgtagagtaatgtttgaaaatgaacaggtaaaagtgtgagcaagctacaaaggaataatactattattctctgtcatagagcaatgcttttgattttttatttttaaaaaaatgccttgtgtactgtttttgctaggtcttaaacttcaaaattgaataatacctattttttcttggtgtatattttctctagttaaatgtttcatgcttatttatttctcacataccaagtcctatggataggctaagaagatgctactactattttaaacatggatgcctttttttttgcactgaactattatgttttagatggtgatgccaggagaccctgtagaaatgacagaatttcaggataaagcaatcagcaattctcactatgtgctggaacttacgttaccaaatatttatgtaacactacctaataagagcttttatgagaagctttataataggtgagtttatacacatttagttgaatctttggaatcagattttctaattgcctccctgattttcctcttccccctttcctttccttgcctgaatattatatgccatctctgtgtactttgtgtggtgttgatggtgactattgccgttatgatgtgctattgtcatagcagagtttcctaactagcgtggtgccgggtgtgtgagatatttatttcctcagccctgaggttggctgattgccctctgtcagcttactgcaggtt

SEQ ID NO: 1826 - DNA, 1227 bp, Homo sapiens
atctgaaccatatgtaaaacctgacatgtagtaggtgctcaaatatttgtttgtttttcagtctgattcagttaacatttattgagcaactatcctgtgtcagcaattgaaaatcaaaccatgcataagacatgatccctgtccaccaggaagatcacagtctagcagagataagaggaagaaggcaaactgaactgtactccactgtagagagtgcagtaatagagcatggatctgaagaggtgtgattcattttccttaggtgtctgcctctgcttttcatttaaaaaaaaaaaaactcagcttctatttctaacacaaactttcacctcctatggcttaaatagatgtcataaaaatttaggatttatatagggaatgtacacacttaagtcagcaaaaactaaattaattttgccctatattgtgctggtgaaccatgatataccttataatcttgtcaaaaagaaaagttgtagctgtgttcacaggaaaaaaaaaaaaagaaaaacacatggcctgtcagccttttgcctaagatcaattggagtatcttttcttatcagtttaatatctgttatgtcctctatctaaggacaatatattaaatggatttttggagcagggagatagaataggctcttgctccattaacttcacacatcgacctggtattgcaaatacctccagaaatagtgtacccctaccaagaaaaaaaaaacacattaacatgttcttttatctcacagaattgagcatttattccctgtcaggtaagaaatatattaggtgaaagtggcctttcagattactaataataaagctaaacagttattaaaactaataaactattaaaccaattattaataaacaattattaaaattaacaactaattattaaaactaaattattaggaataatttttagaattgtttataaaagaagtgaaaaataatgaaaaaaatatgaactaatgatatattacctattatagtacttaatatagtggaccctcaatatatgtggaattaaatggggtaaataatagatgcatgttttagaatatgaaaatgaaataccatttttgtgtagcttttcaaattctttctctgcatttccttgagcttctaagtaaaaccttttaaatgttgaaaattctatagggagcattttagtggtgtttctgtgttatacattataagttgctgaagtattaaaggttgtat

SEQ ID NO: 1827 - DNA, 1235 bp, Homo sapiens
tagaataattgtactttaccagaaacctggttctcaaaaaatcttccagctttttaaaaaaaaaatgtgtatatatataagagtatgctctaaaatcataagctaaaactatatatgttaaaattctggttttaggattatagtgagtgcatgtagtatgattaagattatttaaaattctagattgtagactgaagtatgcaaacattttaatatgtttttaatttaggtcttgctatcacagatgaaattttgctgagtaaggcagagtggtccaaactttttgaagctccaaacttctttcaaaagtacaagtatgtattttaaggcatgtcggacatgttgctctcttaagtaatggtttaatggtagcacattatgacatttcttcttgctggactaatgttattggaagaattttctttcctgtcacaaggacatactgttttagtgaactccttagttttttttggttgaggtaatgaatgtgaagcccctttgatttttctgcccgatctaactgaactcctgctacatttgtagcaacataagttctgtaggcatacatcagtcatgacaaaaacagtacatctgtatacagtggcaagtggatgcaccctgaaaaatctgtagttaataattctctgctaagaaacagtatttttatctaattctggaaactcattaattgctaggaatctttaaaacaaagacaaagctaataaaatgtcaatatatagccaattaaatgttttcaatagttacagcacattattggcctgccattttcccccaatgttatagccccttcaaatatttctacagctagctttcatgaatctaagtgggtgttaatcattttaattaatggtttaaatataatggtttaataccttagtacaggttaaaagcttcattaattgtgttagttttgatgaaaaatgtaagttataatcttatttaaaaaacagacaaaccacagacttgcacttttatttgccctgggctgaaaatgtgccaaagtcccacttaaaattttttttttaatgcttgaagcttttctgaccatttgatcttgtgttggattgtgttttgtaataatctaagcaagattgctttatgctcttccccaattaaaaacaagaatgatgaccttcatgatgtctctgtgttttgtttctgtatcttttgcatgagaaagcaataacggagccagtaattgtgttctcgaagca

SEQ ID NO: 1828 - DNA, 1192 bp, Homo sapiens
actagcatgtcccgggaacctttgccccttccccttgtgctcagttgccttatgttttcaatctctgcactgtgttctatcatatcggtattgaccttaataaactcttcattttgttcctataaaatgtgcattctaattggatgcacctttccctctcagcttcatagagcaattctttgttgttattaaatagcatttttagttgtagttgatcattatgccattggacttaaacctaattatttccttgaaaatagttgcatatatgattttattgtttcttctccaaagttaagagataatcaaataggatttgagccattataagtcagaattaacaggtatcctttaagttttggagtaagtaggaatttgaacagcatctccgtacggaagttttccttagggaaaaatgttttaaacacttctaagattagaattctgaccatttctttgttttatgttatagtgaaaatgcctcgtgtaaaagcagctcaagctggaagacagagctctgcaaagagacatcttgcagaacaatttgcagttggagagataataactgacatggcaaaaaaggaatggaaagtaggattacccattggccaaggaggctttggctgtatatatcttggtaagtgtgtgactgcttctaatgatcaatccaaagatttatatgttttcttatgaaaatggtttctcatttatgagctgttatgggatgttcctaataatctgcagtcaacttaatagtttctgattaagcaaaaatgcatctctgacgtaggagtggaaattgttaatgcagtcacaacagaaaaggaggataaaatagctgtaatactatcattagtgagcactaggactttagatttttaagatactttatataatcttaatctcttttgagacccaaagaaacccatttacgtatctttcccctcccacctccacctatgtgggatttattccctccgtgtttgtctgatttagaggtttgcaaatcttttacaagtgtgagtttcttttttctttcagtgcaaccctcttagccatcatactggaactaggagaattacctagaaactgcatattaggcctgattaaatgtgcagataactagcatacttattctgaaatttttggggacccgttgtggaatcctgaaattatgttaggttaactaaat

SEQ ID NO: 1829 - DNA, 1213 bp, Homo sapiens
atgaaatgtactgtaatgatatcctgaaacacatacttgggaactgaagtgtattctatcaagggttacagatatacaaacctaaatattaatatatttataatattacttgttctgatatcaaatattttacttttttaaacagctgatatgaattcttcagagtcagttggcagtgatgcaccttgtgttgtaaaagtggtaagaaatattttagctaatttgtttcttttctgttgatttggtgtagtattttgtaaaatgccttttttgattaactagaattaattaaaccataagatactacatttttaataacttaaaaaatatttaataagacacaaaagtagctttatagttttaaatcacttgagtgtgaaaagttcctctcttgaaataaagtggcactggtattcgggggtaaatgaaggaaagcataaaggcatgcagatgtggaataaaaatattcagctcatttaagaaatttcagctacttttatggatactttttatatttatatcctataagactatactaatttaatataattttattgtattttattttgcatttgcttctggacttctacttggtcaattttttctgttcccaattttcttccattttagtaaattaaattatttattttattgtgattattgggccttttttgctataataatgttgaaattagtttgtaatgagtaaagattggcaacatcctatctgacataagcatacttctaatagccagatccatttatatgttggcgaactagaagacattttaccgttttttaagtcaattatgtgcctttttgcttaccaacatttgttactccccttcttcaaaattacttgatacatgtgaagaatatgttttggttaaatagaagaaccaacaggatgtattatctgggcaaattaacatataactcctcccttactttttctctacgggatacatgtattagggttctctagagggacagaactaatgggatagatgtacatatgaaggggatgcccccatgacttaattacctcccaccagctcccgcccacgacacatggggattatgggagctactatccaagatgagatttgggtggggacacagccaaaccatatcaaccagaactcaggaattacaattactctgaaggttttcattttgtttcgttttactctcttttatattttatctctta

SEQ ID NO: 1830 - DNA, 1220 bp, Homo sapiens
caataaacacatagctcctttgtgtttgtatatgtgtgtgtgtgtgtgtgtgtgtttgtgtaatgttttaaaaagttcttttatgggcctcattcattcattcattcattcactcttatttattcatttactcacttatggcatttccactcttaaacccttgagtggctttctactgcccttagaataaagccaagctctgttccaagacctgcagagctcagcctcacctgaacccatctccagtcttgctttcccttccctctccgttcccagtgtgccacctgcacagctttctgccttggtcatgcctgctcagtctgccgtgggggcagtggcacctgctcttccctctgcctgaagtgctcatccctgggtctctgcctggccagactcctctcttccttcaggtctgtactcagcaaggacttctgtgccgcccctcttgaaagaagtgtctccccagctccattactccttttgggggtcatcctatttgatgttcttcacaatgcttcttccaatctgacagtgtctgcttcagttgtctgttgacttgcctatggtctggaccctcccagtaacatgagccctgatgaggagggaactctggagaaggaaatggactctctggagctccttgaggacatgagctggctgtctttgtgacaccagtcctagcagagcctgtgctcatcatctggtgcatgcatttatggtgcaaggattcagtgttattggcctcagtgtacagcagagaaaagggaatctcagagaggtcaagcaacacacccaagcccacacagctgatgaacaatggaggtgggagtgagcgacagggcactcggagcacgcacttaagcacgtgctgctctgtcctcctcacctccccatcgacctgcatgcattgacatgctttacacctgaaaaaatgacttacactagaaaaatggaagtttcaagagtctaatcttttctgatccccccaatgacattagcttaggaaaatctcgcctgggcctcatgtaacttgatggagaaaggtaatgagacagcacagggtcccttgtcaagagaagcggcgaagagacttcatttgttcgagtcttgggtgtaatgattgagctagagaatccatttcagctgggaaaggtgggtgctgatgaagttatgggccggctgcaccttttaaaatgaaatatttaaataagtggaacctc

SEQ ID NO: 1831 - DNA, 1308 bp, Homo sapiens
tgcaaaaagaagaaaatatctgtacaaaaatcatactgtccagaaatgaccactattttaaatttttgcttatatatctgatatgatttggatctttgtccctgtccaaatctcatgttgaattgtaatccccgatgttggaggtggggcctggtaggaggtgattggatcatgggagcagagttctcatgatgggttataaccatcccctccatgctgtccttgtgatagtgagtgggtgagttattgtgagttctggttgtttagaagtgtgtagtcatgccagccttgtatcccaggaaggctgtgaggtggaccggcttggacgggtcatccttagggaagctcttcaccttcccacgatgcctgctgctgcgcttccgaggcaggaagccgagggacccatgtctgggagcggagaactttctgtgagacatcacgccatcaaattctctgtggcacgcgctgggcagaaaggctaccatcaccgcactgagatcaacaagaagatctataagattggccagggctaccttatcaaggatggcaagctgatcaagaacaatgcctccactgactatgacctatctgacaagagcatcaaccctctgggtggctttgtccactatggtgaagtgaccaatgactttgtcatgctgaaaggctgtgtggtgggaaccaagaagcgggtgctcaccctccgcaagtccttgctggtgcagacgaagcggcgggctctggagaagattgaccttaagttcattgacaccacctccaagtttggccatggccgcttccagaccatggaggagaagaaagcattcatgggaccactgaagaaagaccgaattgcaaaggaagaaggagcttaatgccaggaacagattttgcagttggtggggtctcaataaaagttattttccactgaaaaaaaaaaaaaaaaaaaaaaaaaagaagtgtgtagcaactccctcctctctctctgttctttctgctctggccatatgaagatgcctctgctctggttttgccttgtgccatgagtaaaactccctgaggcctccccagaagcagatgctggcactatgcttcctgtatgcctgtggaactgtgagccaattaaacttcttttcttataaattacccagtctcaggcatttttttatggcaatgcaagaaaggattagtacaatatccttccagtctttcttctctatatatccttatgcatacatttctatttttcctttataaaatggtattatacaggataactggctttgtaatttttttcatttaacattttct

SEQ ID NO: 1832 - DNA, 1145 bp, Homo sapiens
taagtttctgacagatactgctttacagttccagaagagaccctgctgtattaaaaggacaggaagaacttggtgaattttaaaatacagtcttatagtaatagccttgctgtcctttggaaggagaagaggtttataatagaggcctggtgaccccaggtcacctggggtcctttgagtactagtaaggcctttggtggtactttctcctggcctcccctctcctctccacacggtggtggaagtgggtgcttggtctcagacagtttggaaagttgggaaaattgcacagcttcacccttgcaacctataccaaacaggtgtatcaatactttcagctatttagtgtctaaatgtaaagtagcactaagcctctgccctgccctgtgttaagaatacatgccaagtttgtctaatgcccttttcttttttctttactgcatctcagatttacattttttatggcactcgatccaacgcagagtttgtgatccacagtggttttttctttgacaataactcacacgacagagtgaaaataaagcttggagtgagtaaaagtgacagactctacgccatgaaggccgaggtcttggctcgtgccggcatccccacgtacgtagaaaaacatcggttggccctttcttgcagtacttgaactatttccagttgcatagtgtttaattggtgtgttaataaaacttctctccagtagtttgtcttaatccgtttatccccgtggcacagcaaatttaagccatggcgacgcttggtggcttaccagcgttttcaggtaaacataattgtgtcgttgggcgcattcacagtcagttctgggggatatggcctgaaatcctcattaagttaaataactactttcgtatcattcatgtctttcaccttgaaaaggttaatggcctggatcaatttgtttcatttaattcgttgctaccattagtttctgtaatgaagtcatgatcctcagtgatttcaagaatttctagttaagttctttaagattttcttgcatttgaggcataaaatgataaagaagacaggaattaggattcattagttctccagggaatagaggaaccattcttaatgaaaatggattatgcagaccttttttttattgaacttgt

SEQ ID NO: 1833 - DNA, 1193 bp, Homo sapiens
agctcatttaaattgccttacagccttctggcttacagctctacagttttgtgttcttagaatcagggctgtggggctcatcctttcccatgtctccttgtgcacatacgcgagctactcatttttgttttaatggaaattttgttaaagcaaatgtgaacatgagaggtggcatgtttgacttttaaggagaaaactgctctgtaaatcatagtagtggtaatagaagctctctgccctttgccatcgtattacctaatagtacctaatagtcaatatttatattacctagtgtcagtatatatttcactgtaactgacagggagtttaggattttaattcttcttccctgtcaccagttaaggtatgtactgtgaccatctggtgattagttttgatttcaagattggcgtgttaagactatttccagtgttagttatggcctgtttttattttctgagagacgtgtgaatgatatgtgtcctaaaagtagctcttgttttctaaaacgtggattaatataggtctgtccgttacttttgatggaaaaagagaagattactttcctgatctaatgaaatgggcctctgaaaatggggcttctgtcgagggttttgaaatggttaacttcaaagaagagggctttggtttgagagcaacaagagatatcaaggtgagtttataaaatgttggtctcaaggggtctatgtgtttgaactgtggtgtgctgtagagggcgcagggtgaagaggtagacgtgtggtgggggagttctagttctgagcctgtgggcagataggcagcctggaagggccttgggctcatgttctaagcagctcctcccaccttatcctcctggggagccaagttgctaatcagtgactggggcaagtcagttcacatttctgagcctctgttaggagaccatagaacatgcctcacaggattttgagatttacctaaagataaggaggtggactcatggtttggattttgtaacttactggaggtgagtgggtggaggactggcggtgtgggtatgcctactagtgtctgaaatggatgactatgaggctgaaggtactaggagctcactgaaatggcaataccagtggcaatagggagaggagagagaaacagccacctactaaggaagaagggctttttctcccctcttggttcttggttcttct

SEQ ID NO: 1834 - DNA, 1152 bp, Homo sapiens
aatagctgattttaaaagccagcagcagcgacgccatgtacctgagtacaggtggcagttgcagagccgtgggctgtagaaggtcagatggggcttcccacaggggaaatctgggcatgctgtagctcagggtgactcccagctccgtcactagcagggcgacccccttccttctggagccttagctctgaaagcccccagtgggggtgccctttcagatgccccctttccatttcaaaggctctgactcttgatcttgaagccggacgcggcactggcactcggcttcagtttccactgtgacagatggaggtctcctttcgccccagcccaggtggccaagcccatcctggcctcagaacatgctgagcacattttgtagggtggcacctttttatccaagttactagctacacatcagtgtttaaagagaaaaaagtgacctttcattttttttttcttgaaacttgaggaaacaagatacatactactgattttttttttttcttaaaactaaatgcatgactgcagagcggtagaggtgtatatttttcatactgtggggcaaagtatttgtgctgctttttggagatggactggaacgtctggtttctgtccccgggcccggcagctacgtctattttctgtagaaggtgccacagtgagacctggagccaccccttcctgccctggcgccgtttagagctgggagcccgtggactcccggcctgtttctaccttctattcaaccactctgacgtggggagacaagaagaaatagaactttttgatagtgtggtaaaaacattgatttgaactattttagtaaaaggagtaacaaacaagattgtgatagtgtctactttgagctagataaataaaggcctctttgtgagcctcctggctgggtgctcagtgcttgtttctgtcgtgggtggcagggtcagcaggcagagacagggccaaggcccctcaagcaccgcagatgggggctcagtcggggccccttccacagacagagccgtggcccctcaaggtggacagtgaggccgctgctcctccagctgcctctgtctcatcacaggccagaagtggaaagggtttcaaatccaagcccccgggttcctgtgtgcgttctacgcagcaaggctt

SEQ ID NO: 1835 - DNA, 1207 bp, Homo sapiens
gggcaggacctccagcccagcccctgtcttcttcctctgtggtgaactgtacataggacgctgcccgccctggcccagctgccatgggtccgatgcactggcccaagccgccatctcccgcctcatacaccagcaacctgggaagacgagacgctgcgactgttcctgcagcagagcggcccggacgcctcattccccctctgggccctgggctccatgagcaagaggctgcaggctgcttctgagatccagcctgggaactgtccaggctcctctgtcctgcctgggatggaggggccactcatcaaaccctctactccccggctgccacccacactggacagagaccaccactacctgggtcttgacgcaggtggcaccacttcttgcccaaatgccgtggcctggccccaggccccccaagcactgggtccccggcatgtggacaaggccactcaccacatctgtggctggctggaggctgccctgggcccttcctgtgaccctcagccttggaggtcagggtgccctcacacctggggatctgtgctcagccacccgatgcccgctgctccttgcttttggaggtcatccccctcccccccagtctctgcaatgtccccctgccaccctgtccaggctatgcccttcttgggctcctcctgccccatgcctgaggcacgtcccttttcgtggtttacatgacaggccagtaacaggaagggcctggggagagtttctgggctgagccacatgtgattttcctgatgggcagcactgggccacagctggggctctggttggctgtgacctcccccagggcctggctgcatcttgggtccctgtggacagagctgtgtaggctgcagatgagagttctgttctttttgggaaggagcgtgtctggccaggttctgcctttagtttgtggtgtgacctttagcagttcactcagcctgtctgggctcttggtggaaacaggtctctgaggttccttttcggccatgcttatggctccaggtcatccagcgccacagggcaggggtcctcactgagggggcgtgagccaacagccgacggctgagggcgggccgggtggagctgagttctgctgccttgcagtcgctgcgggtggagagttgcctccccactctgagcccgtgtcctcagtagtaaaatgggcagcataaggccctcctcacaggat

SEQ ID NO: 1836 - DNA, 1182 bp, Homo sapiens
ggctgttgcaccgcgaagggcggcagccgcgcgacaccgggaagcgggaggcggtggcggcggcggcggcgcgctgacgtcacgcgccgcgggccagccagggcgcgtgcgagccgccccgcccccggtcccatcggccccaatccgggaggagcccggcgagtgggcggggccgcggaggccagcggacagatcgattggccgagaggagaatcgagagggcgaacgggcgagtggcagcgaggcggggcgggctgaggccagcgcggaagtctcgcgaggccgggcccgagcagagtgtggcggcggcggcgagatctgggctcgggttgaggagttggtatttgtgtggaaggaggcggaggcgcaggaggaagggggaagcggagcgccggcccggagggcgggaggaggcgcggccagggcgggcggttgcggcgaggcgaggcgaggcggggagccgagacgagcagcggccgagcgagcgcgggcgcgggcgcaccgaggcgagggaggcggggaagccccgccgccgccgcggcgcccgccccttcccccgccgcccgccccctctccccccgcccgctcgccgccttcctccctctgccttccttccccacggccggccgcctcctcgcccgcccgcccgcagccgaggagccgaggccgccgcggccgtggcggcggagccctcagccatggcctcgggcgacaccctctacatcgccacggacggctcggagatgccggccgagatcgtggagctgcacgagatcgaggtggagaccatcccggtggagaccatcgagaccacagtggtgggcgaggaggaggaggaggacgacgacgacgaggacggcggcggtggcgaccacggcggcgggggcggccacgggcacgccggccaccaccaccaccaccatcaccaccaccaccacccgcccatgatcgctctgcagccgctggtcaccgacgacccgacccaggtgcaccaccaccaggaggtgatcctggtgcagacgcgcgaggaggtggtgggcggcgacgactcggacgggctgcgcgccgaggacggcttcgaggatcagattctcatcccggtgcccgcgccggccggcggcgacgacgactacattgaacaaacgctggtcaccgtggcggcggccggcaagagcggcggcg

SEQ ID NO: 1837 - DNA, 1245 bp, Homo sapiens
agtctctttttcagagagtccttctctgtaaaacatggatagtaattacatatgcctgagatttataaaacaattaaatgactaatttctttatatatatttttttctcttctgaatttatctttcattcttcttttttgttttttgagatggagtcttgctgtgtcgcccaggctggagtgcagtggcgtgatcttggctcactgcaacctctgcctcccgggttcaagcgattctcctgtctcaacttcccaagtagctgggaatacaggcatgcaccaccatgcctggcaaattgtttgtatttttagtagagactgggtttcaccatgttggccaggctggtctcgaactcctgacctcatgatccgcctgccttggcctcccaaagtgctgggattacaggtgtgagccactgcacccggcttaaaataaattttaaagccttcgtttggtcagcatttcttgattacatatctttctcctttaggtcacggcagttgcacaacagaatcaaggagaggtccctgaaccccaagatatgaaagtggctgaggttctctttgatgctgcagatgcaaatgccattgaggaagtaaaccttgcttatgagaacgtcaaggaagtggatggactggatgtttccaaagagggcacggaagcctgggaggctgctatgaagaggtacgatgagaggatcgacagagtggagacccggatcaccgctcgccttcgggatcagcttggcacagccaagaatgccaacgagatgtttaggattttctccaggtttaatgcactgtttgtcaggcctcacatccgtggggccattcgcgaataccagacccagctgatccagcgcgtgaaagatgacattgagtctcttcacgacaagttcaaggtccagtacccacagagtcaggcttgtaagatgagtcacgttcgtgacttgccccctgtgtcagggtctatcatctgggctaaacagatcgacaggcagctgacggcctacatgaagcgggtggaagatgtccttggcaagggctgggagaatcacgtggaggggcagaagctgaagcaggatggagacagcttccgcatgaagctcaacacgcaggagatctttgatgactgggcaaggaaggtgcagcagcgcaacctcggtgtctcggggcgcattttcaccatcgaaagtactcgggttcggggccgaactggaaatgtgcttaagctgaaagttaactt

SEQ ID NO: 1838 - DNA, 1138 bp, Homo sapiens
agatgctttttcccagtatttaatttgcttttaagtattttcagaaggattttttgtagtttcattgtttaaatatttaaatcgttaaatataatgtatttcagcataaagtgagcagcttgaatctaactttgttctggacagttatttatccaattgttccaacattgtttactcatttggagacggagtctcactctgtcgccaaggctggaatgcagtggcgcagtctcggctcactgcaacctccgcctcctgggttcaagcgattcttctgcctcagcctccctagtagctgggactacaggcacccaccaccatgtccagctatcttcttaaatatttcagggtctaggttctttaatgtaaacatgttttgccacattttaccttttgaccacttctctgtgtcttaagatatttacgtgtaccttccatttttctcattgccataggagagattcacccaggatacacaacctcactatatctattcaccccgtgaaatgactaggtgggtgagaggcatctttgaagcgctgagacctctggagaccctgcctgttgaaggcctcattcggatttgggcacatgaagctctgcgtctcttccaagataggtaagggaagccgaggatccagttggtcccattctcccctgctctgagttcttacagctgtcgaagctggggtctttgcaggggtggtctgcctaagttagagccaggtggtgccagtggtggaaggagcagagtcagccagggcagcctcccgtctggacactggtcacagttgccccagggtaacaaagtcacagtgcgctgaatgcaccggctggcccaccactgtctgcttacacaaggcactttcataaaccttgtggctgtgaacagggtacttttttttttaaagatacatcatagaagtcaaaaaacggggcactttaataaaccttttaaactgtcaggtgggaccacaaaaggtagcagctgcctgtgataaccttaccagagcacgggttcactgctgagttaaaaggtctcccaacaactgcccagtgtgcgtgttccgtaaccaccacccctcttcctgtttctcagtctgtgttctcatcaaaggctttgcagctgcagctctgg

SEQ ID NO: 1839 - DNA, 1197 bp, Homo sapiens
taaaaacatacatgactggccaggcatggtggctcatgcctgtaatcccagcactttgggaggccaaggcgagcagatcacctgaggtcaggagttcaagaccagcctggccagcatggtgaaaccctgtctctactaaaaatacaagaaaaaattagccaggcgcggtgccacatgcctgtaatcccagctacttgggagcctgagtcaggagaatcacttgaacccaggaggcagaggttgcagtgagccaaggtcacgccactgcactccagtctgggtgacagagcgagactccatctcaaaaatatatatatacacacacacacacatatatatatacatacacatacgtatatatatatacacatatatgtatatatacacgtgtgtgtgtgtgtgtgtgtgtatatatatatatatatatatatgtacacacggctgagcaccttccagattttgctgcagttcccagtgtggactcactcaccatgtggcctttacgttcaagtcccttttccctctgtgatttcttgcccgtcccctccctccttcctgctgcgactgtgggactgtggcccaggtgtggacatgatcagtaaaatgctgaagatgcagatgttggaggatgaggacgacctggcctacgcagagactgagaagaagacgaggacagactccacgtccgacgggcgccctgcctggatgcggacactgcacaccaccgcgtccaactggctgcacctcatcccccagacgctgagccacctcaagcgcaccgtggagaatatcaaggtagctgggagggtggcgggccggccaggtctcaaggtcccaggtgctgggtatggtcatggaccattgttccatggaccattggttccactgtgccggacggaacgtactcacaccggtgtcacctcagagcaggtgtccagctgagcccaggcattgggcaagatgagttggcccttttgaaatggactgaaaacaccctagaagattgtgagataggcagacagcgccacagcgagcagccgcagcccttcctccctagagagccccgagagctgcgactcgggcaggggcctcagcgggtttctgagcagcctcagcttcacacaagctcggttccaagtcacgctctgccaaagctgtccgtgaccctggacagttcggaagctctggggctctccc

SEQ ID NO: 1840 - DNA, 1064 bp, Homo sapiens
tctggaccagcctgagctagagcagatgtggtgagggcggcgccaggggcataaagtgcagcctgggaaaggcagtaggtggagccgccagccgcctgtgtgggcagccaggatgcctagcacttgcacatttgttccatctgtgctgggggagttgtgagagctgacaccctgggctctgtgtgccttggctgcagggatcttgcctcggagctggtcccactacacggtgcctgccggcatgaccgtcatccagtgggtgtccgacttcagcgagaggatcaaacagctgcagaacatctcactggcagctgcatctggtggcgccaaggagctaaaggtgaaggcgctcctgacgagtctcgggtggtcagcagctgtcctgggctggggtgggagtggctctggggaaaaacacagggcccaggtctgacctgagctccttcccctgggggctgctgctttccacagaacatccacgtgtgcctgggtggcctgttcgtgcctgaggcgtacatcactgccaccaggcagtatgtggcccaggccaacagctggtccctggaggagctctgcctggaagtcaacgtcaccacctcacagggcgccacccttgacgcttgcagcttcggagtcacgggtgagtggagtctcacagaaaatactggctctttgcaggtgacctcggtggcctgagaccattgttcccagatacatgcacttagggtgaccggctggcagttgggtggagcctctgggcgccctgtgactggggtttgtgtagctgttgtgttcacctcagcctgggttttggcttccgcctcacaggtttgaaacttcaaggggccacgtgcaacaacaacaagctgtcactgtccaatgccatctcaaccgcccttcccctgacgcagctgcgctgggtcaagcagacaaacaccgagaagaaggccagtgtggtaaggaggcactgcctttcccaggcattctgcagggacccctgcggtaacaagggcagaggcggctcctcttctatgcctgggttccacttggaacgggaaatgagg

SEQ ID NO: 1841 - DNA, 1553 bp, Homo sapiens
gatctggtcatcttgctttatgaaactgcgctcctgtcttctggcttcagtctggaagatccccagacacatgctaacaggatctacaggatgatcaaacttggtctgggtaagccttatactatgtaatgttaaaaagaaaataaacacacgtgacattgaagaaaatggtgaactttcagttatccaaacttggagcaccttgtcctgcttgctgcttggaggtattaaagtatgttttttttagggataagtaaggtcttacaagagcaaagaaatgaaattgagactcatatgtcctgtaatactgtcttgaaagcagatagaaaccaagagtattaccctaatagctggctttaagaaatctttgtaatatgaggattttattttggaaacaggtattgatgaagatgaccctactgctgatgataccagtgctgctgtaactgaagaaatgccaccccttgaaggagatgacgacacatcacgcatggaagaagtagactaatctctggctgagggatgacttacctgttcagtactctacaattcctctgataatatattttcaaggatgtttttctttatttttgttaatattaaaaagtctgtatggcatgacaactactttaaggggaagataagatttctgtctactaagtgatgctgtgataccttaggcactaaagcagagctagtaatgctttttgagtttcatgttggtttattttcacagattggggtaacgtgcactgtaagacgtatgtaacatgatgttaactttgtggtctaaagtgtttagctgtcaagccggatgcctaagtagaccaaatcttgttattgaagtgttctgagctgtatcttgatgtttagaaaagtattcgttacatcttgtaggatctactttttgaacttttcattccctgtagttgacaattctgcatgtactagtcctctagaaataggttaaactgaagcaacttgatggaaggatctctccacagggcttgttttccaaagaaaagtattgtttggaggagcaaagttaaaagcctacctaagcatatcgtaaagctgttcaaaaataactcagacccagtcttgtggatggaaatgtagtgctcgagtcacattctgcttaaagttgtaacaaatacagatgagttaaaagatattgtgtgacagtgtcttatttagggggaaaggggagtatctggatgacagttagtgccaaaatgtaaaacatgaggcgctagcaggagatggttaaacactagctgctccaagggttgacatggtcttcccagcatgtactcagcaggtgtggggtggagcacacgtaggcacagaaaacaggaatgcagacaacatgcatcccctgcgtccatgagttacatgtgttctcttagtgtccacgttgttttgatgttattcatggaataccttctgtgttaaatacagtcacttaattccttggccttacagtgtctcaaagttctttacaaatctacttaaagccatcctggctgaggcaggagaatcgcttgaacctg

SEQ ID NO: 1842 - DNA, 1176 bp, Homo sapiens
ggtgttcgttggggaccgcggcgggggactgggcccgggcctgcggcggcctcccggaagcgcgcacacgctcgtggtagttgccgcgctccgaaatgaggtcatcctttgtcagccgcccttctattttcggtttacttaaacttcgcaaatctccaattcggctttaaaaatatttggagaacgcgatggaatttcgtgttgcctctgtagacgtcctgcaaggttttaaaccggcgcggtgtcgttccagatgcctgaggaaacccagacccaagaccaaccgatggaggaggaggaggttgagacgttcgcctttcaggcagaaattgcccagttgatgtcattgatcatcaatactttctactcgaacaaagagatctttctgagagagctcatttcaaattcatcagatgtaagtcacttattaacccagaatcggattttggtttcagtgtgaacttcttgggggtgctgtatgcttaaattaatattttttgttaacaggcattggacaaaatccggtatgaaagcttgacagatcccagtaaattagactctgggaaagagctgcatattaaccttataccgaacaaacaagatcgaactctcactattgtggatactggaattggaatgaccaaggctgacttgatcaataaccttggtactatcgccaagtctgggaccaaagcgttcatggaagctttgcaggctggtgcagatatctctatgattggccagttcggtgttggtttttattctgcttatttggttgctgagaaagtaactgtgatcaccaaacataacgatgatgagcagtacgcttgggagtcctcagcagggggatcattcacagtgaggacagacacaggtaggcacctgaacattcactggttaagtgagcggtggaagggtggggtgctgcaacccttggacccctggggatgcggtgaagcttacagaatttgtgtttgcccaacgatcaggaacaagctagagcacttaattagtgtaatggcatgacttggtgggcggttcttttgggcgaggcaccttgcccaaaaggttctgctgtggtggcctttgcatctgtagtaacggcaaaccttgctttatagacacgttataagggtgttaggcatggcgttgagcactaaattgaatgtattaagt

SEQ ID NO: 1843 - DNA, 1141 bp, Homo sapiens
ggaaaataccaccttagtacaaacacattacatcaacttttatatgtaagatgtaatttagaaaaaatgtcaataatggttttatgacgagactgaaattgcagacatgttcataagcacaatgcttcttttctctttcttgtctttctgtacgtaagcaactagaagccatttgtgtcaaggtaacgtctggagaaacaaaaggtcaggaaaggccaatgctcctaccgaccacaatccagccccaaactgcaagaaagagccagctgccccgggggaattcctgcctggtggggctccatatcgccagccctcagctgctcagggtacagccgcttgtgagaaccgagccacagtcctgcttcctaagtgacttatgccaacctcctgctcaggggtttgtacagagaccactgccagccctccaggtggtccctgcaaagagagtcccagcccccaaggctccagatgaacagggctccatgttgacccctttgtctgcctctgacccgctggcagtaacatctctttcatccagttcagcacatccatttatttccaacttgcatacaagacatactgagaaactaaaaaaatcgttaaaagtaaagacacgttctggacgggtatctcgacctcccaaatataaagctaaagattataagttcataaaaacagaggatctggcggatggtcatctgtcagattctgatgattactcagaactctgtgtggaagaagatgaagatcagagggagaggcacgcactctttgacttatcgagctgctccctgaggcccaaaagctttaagtgtcagacttgtgaaaagtcatatatagggaaggggggactggcccgacattttaaacttaacccaggccacggccagttggaccccgagatggtgctgtctgagaaagccagtggaagcaccctccgggggtgcacggaggaaaggacgctcagcctgacctccctggggctgtccatgccagcggatccatgtgagggaggggcccgctcctgcttggtgacagagtcagcacgcggtggcctgcaggtaatgtttctgtctgggtatgtgtctttttatttggccgttctcggattgctataaagaaatacctgagaccaggtatt

SEQ ID NO: 1844 - DNA, 1137 bp, Homo sapiens
attatgtactttcaaaggatgaattttatggtattttaaatctatccagtaaaataatttaaaagtttaaaaagtcatggatacgtaatgaattaggaacaaaattcaggtcaggttttaaaatgacagtcacatcagagaaatctttttttttcttttttttgagacagagtttccctcttgtcacccaggctggagtgcagtggcaccatcttggctcactgcaacctctgcctcccaggttcaggtgattctcctgcttcaacctcccgagtagccaggactacaggcgcgcgccaccgcgcctggctaattttttgtattcttagtagagatggggtttcaccatgctggccaggtcggtctcaaactcctaacctcaaatgatccacccgccttgggctcccaaagtgctgggatttcaggtgtgagccacggcgcccggccactaaaaggtttttatggggtatataaagcatgattgttttattttacttttgggtgtgcaacactgtctagaatggtcagtctgtagacgttgaagagacattgccatctgaaccagaaaatggagctcttttgcgatcagagagataccaaggacctagaagacgcgcatgctcagagacccttgcagagtcccgcacagctgtcctccagcagagaagagctgctcagctacctggtggccctgctgcggcaggggagcagagggcgtcgccaagcaaagccaggctcaaggaggtacctcactcttaaaccctgtgcttgaaacccgtgtctttagcatggatgtggcaatcactatcagtttctgaatcacctaagcagttcacctgaaatgtcattgcattaagtgtgtgatgatgccaaggacagtaatatctgaactaattcgtactcttacctgtttaaagtgactgtacagcctttggtgcagctccaaaagctgcttgacttgataagttttggaataattataacctgtgtttatatggaagcagtttagaaaacaacggaagtggttttcaaaaccattctttttttttagacggagtctcacactgtcatccaggctggagtgcagtggtgccatcccggctcactgtgcttctccacctcccaggttcaagcgat

SEQ ID NO: 1845 - DNA, 1151 bp, Homo sapiens
cgttggacctcactggcaaaggctaggcccggagcaccctaggcgctggattttgggacaaaactatttttcagagcgttgtaccggcactttatatatattgatctctgtacggcacaatctctgcctcatctgtcgcatgcactgggggctgggcttggatggtcaggtgagttccaagtggcaggttttctgggtgcagctgggctcgggccttcagctcgctgtccagcccctgaagggagtgaggactaacctcccaccttgatctagagcctcggacaggtgtgcgtcccagatgggtgacagctgagtgccgcaggagctcggtaggtgcaggggtggggactggcatgtccaagcagcaggacagcgtataaaaaggcctggaagccaagagaacgagctctgcagcgtagggttctcacgggaggtcctgtgcggtcagccttttgcaccctgtggactccgggccagggagggcacacagggctggcaggcccgcggtggctggtgttgaggcatgaacaaattgtaccgggtatcccccaccccactctgaccaccagttcctccttggatatcactccccctgacaggcagcccacccaggcctggatttgtccctgtctcccccttttgcttttcccccatgactaatgggcaccaggtcttgctgctcctgcttctcacctctgcagtggcagcaggcccctggccccaggtgcatgccggtcagtggggttggatgtgccttcctccaggcctgccctctgtccaagcccggagtgggcttggtgggctccctggtggcccccagtgggtgccaggtggtgcccggggttattgaggggtggttgtatcactgtagggacaggcttcttgccccagcctggagagctgttttcttcaggaaggttctggagatggagacttgtttgcgaattcaccacaactccaggctgggaggctgggtctccgctctcagagccgagacaccagggaggatagccaggctgccctgcctgggaattctgctgggccgtcaaattcaacccgcaccaacgtgggcaggagggccacagtgtcctgccaggagcagagggctgaaggtctgcaggaggaagaaccactatcctggtggggggcac

SEQ ID NO: 1846 - DNA, 1178 bp, Homo sapiens
aatcaaatcctaactctctaactgaaactttgtaccatttgaccagtacctctcctttccccattcccccgctcccagcctccgtaaccactgttctactctacgcttcttcaccttctactttcttagattccacatataaataagaccatgtggtatccgtcacatatttcacttagcataatgccctccaggctcttctgtggccatggatgataatcatgtattgtatatttcaaaattgctaaagagtagatcttaaatgttttcatcacaagaaaaggaacttggtgaggtgatggatagattaactagtttgatttaatcatttcacaatgtatacatagatcaaaacatcccattgtatcttataaataaatacaattttttttgtcaattaaattttttaaaaattacaagaggctgaggtgaggttacagtgagctgtgatcatgccactgcactccagcctgggtgacggagcaagactctgtctctaaaaaaaaaaaaagtgaagttaaaaattaattaatttaaaaaaatcccaactcttccatcaccccagccctgcatccttctcccttcccccaagaccccctcccctgccactatgctctgattcctagagcggtgtgtccctgtcctgccactcttgctgtgcctgtggctgtccctgttccttgggtagcttccctgttactcctcaggggcttccctggccaccctctgctcgggcccttcctgagtgttacatcagcacctttcttgcccgcacccaccaccagccacagcttgtgtttgccgtgtgagccggagcacttgtttgtcacctcacggtcttcccctccatgagggcaggcacggcagtcttgctttcattcttgctttcatgcagtctacccagctgtgggcgagatgtgtgcacatcgctcagcatgtttgtagaatgaacacatgtataaactagacttgaatggagattattgttctctcctggccattaaaggtgcttcttcctgctgctcatttacatctcaggtgttaccatctctggccagtgcctgccctgttgttgtcatctaacagtcatgggaccacacctttgtgactctcagggccagaggtgtttgggaatgtggaatttttgagatttttagaacagaaatagtgaaagtacc

SEQ ID NO: 1847 - DNA, 1107 bp, Homo sapiens
aactgagtcgtttgtgcatgaattaagccggtctgcttccccgtcaccttcgtaacaaaacaacgtcccctctcccctcgcctcgagcagtttcttcaggacaccgtggctcgggctgctccctgctgccaggcacgctggttggctggcctgggcccggctcacgtgaagggcactggctcttgtgaccacactgagccacgtgcaagccgcagccgggcctggaagcctgaccctctggttctagggcttgtcccgcggagcctgcagagctagacgttggggtgtgtccgtgatgatatgggggccaggctgggagtagggcctttctagcagggttgggtggctcagtgagggtgtggaagtgggggacccacggggcctggctttgggactagacatgccagccccagctgggctggagggagcctgagtgagccccgacatacgctgggcctttcagctcgccgtgctctggtgacacacaggcggccaggttgggatttgtgtcaattctaggagccatcaagcatgaatgtggttctgtctcctgagcgcaagcctcgccggacccctgggcgaaggcctggacttgcagatgtgtgttccctgtgcgggtggacagagggggcccttatgacccacattgcagccccattccaccaccccttcctccccagagcagtctctgccgagggacagcacctgtgtcccttcgatgccacaacagccagttgaacaggggagccctttgctcaggcagcttctcctgcctctccctcctttctccttccctgccccatccccgtgcccttcttggcctgtggcgctggggagccatggtgtggcatactggggctcctgctccttgggccacttcctcagcccgggccccacaggcccaccacctgccagggctcccactgcactggctgtggcaggaggcttccccatgaccccgtgtggcccagctcggtgaggatgcagttctaggcacagcccctgggacagccagctgcctcccagaccacgtcagcctgctccagggtcctcagtcaccctgggccaggggccacgtgtcccatggatgtcgaccatgccaacgtc

SEQ ID NO: 1848 - DNA, 1191 bp, Homo sapiens
gggtgacaggctgggctgacaggatgctctctttgccagcaaaggccacctgagcgctatcctggccatcaaggggaacctatccaacagtgaggtcaagcgcatccggagcatcttggacgtcagcatgggggcgcaggagccctcccggcccctattttcccttataaaggttggttagcttttcctgtggcctgacctgcctgtgagtgcccagcaagccttgggcacaccccgctgggagctgttaagagcagcgctggttctcggttcctcccgggtctcctgtgctctgatgctacttctgcctagccctggcggaggtgcaggccctgtcagctggaactggacagaccttggtttgtttacatgtccgatgggggcaggagctcccatcctgggcagccaaccaggcaacaccaaggactctttgtaaacgatagctgatcgtgtgcacgcaaggaaagaaccaggagggagagtgcagccaggctcagggatccccggacacctctgtccagagcccctccacagtcggcctcatgactgtcctcctcgtgggtggggccgagggccctcttcagctctctggagacaggggccgagcctcacccatctgccctctgcagcccagggccgccgtgagcgggattcagcaatggtggaatggaagacagaactggaagagaaagaaggaaaagatgagctctcgtctggcaggggcttttagggtcctgtggcgagctgtgagcaccgccagcattagacgtcacatccaggtggccccacggcccctacaggctggccctgcaatggggccctgagccctccctcttcatcccccaaggcctcaactagagggtggtcccccgagggcttggtgtctactaccgaagggcccaagacctcctgggtcctctcaggctcccccttccccaaggcagggacaggccctgggggtgccaccgtgggccctgccacccagaagtctggctgaggtctgggcaggggcagggcaagcttgacctctcactgttgaccctttggcctctgtatttgtttcctattgccgtgacaggtttccacaaacttcgtggatcaaaacgaggtcttccagttctgcgggtcagaaggctgacccggggctcaaatctgggtgtcggcagtcctgcactccttctggaggctcta

SEQ ID NO: 1849 - DNA, 1231 bp, Homo sapiens
tgtaagggagactgggcacggtggctcatgcttgtattccccgcattttgggaggccagggcgggcacatcacttgaggccaggagttcaagaccagcctggccaacatagtgaaacccgtctactaaaaacacaaaaactagcttagcatggtggtgtgctcctgtaatcccagctactccggtagctgaggcatgagcgtcgcttgaaccttggaggcagaggttgcactgagctgagatcgtgccactgcactccagcttgggcaacagcgactctgtctcaaaaaaacaatataaggaaccttttagtccttgtactatattttatcaaatctaagacatctttcaaaagtgtattgttaattaccattaaaggtgaaaaataggctgccaattaaactgtgccatatcaattaagacattatctgagggtagatgaagtaatgactaaaattctgctggaaacccagcaaagtttcttttactggcattgtttggtaaagagggcccccttcattaaacttgaatattgcaagcaacactctgtggcagatgatcaaaactgtctgacacaatttgagcttgctatagcaagaaagtctaacctattccggtgttctctctcccatgagacaagccgttatatagacttaaacagtgttccacctgttggctaaagctgggttgagttaatgactttgttcatgagggatgacagggatccttagggccacctctccctagtggaggcatcatcacttcatcttactctttcttagcagttacaatacccctaatattttgtgtcactccattcttagactaacattcttacgtatgaaatacatgatgaatttgatctgtgaagcctcttaggtagcattgtgtgtgctgtgtggtttttctgaggggatccataggaaaataagggcagggttttaaacgttaatgatgggcaatgaggtaatgtaagttatggggttaaatttttatttccctttttttctgtagagaatagtgacagtggtacaggaaagaaagaaaaagaaaagaaaaacagaaagggcaaagacaaggaaaatggctccgtatccagcagtgagacaccaccaccaccaccaccaccaaatgaaattaatcctcctccacatacaatggtgagtgcagggttgatggcctagtgggcactaaagttgtgtaaagtatatggcatttggttgaggtgggtg

SEQ ID NO: 1850 - DNA, 1231 bp, Homo sapiens; identical to SEQ ID NO: 1849

SEQ ID NO: 1851 - DNA, 1911 bp, Homo sapiens
gttaagggactgggccccggcccgtgggggctcaggactcagcaacacctccccaccccgagacgtgaggtgggggcggggctctctggcgcctctccccgacggccctgggagctggagctctttgttttcttttctcactcctccgccgctgggattctaccaggggctggtgacgccaaagcttctccaggggcagggctcctacccccactgtggggggcgggtcgggctgtcctggcggtccctggccccgccccacctcaggccacagcgcatgatggcagctggggttctcctgctgtgaggcgtcccggttcccccgcccgccccgtgttggcgggtggagtcttggcagcagcctccactcctgggcatggcagggagcagcacctcagggacttgggaagttcctttggtctgggggcggcctggggcttttttctgggtatgccctgagaccagccctcccgcaggcacaatgacaataagaccttcctggtgtgggtcaacgaggaggaccacctgcgggtcatctccatgcagaaggggggcaacatgaaggaggtgttcacccgcttctgcaccggcctcacccaggtgccagggacggggcaggcccagaccccagggccccagcagggatgtgggtgccccagcatcagtccccccgggggatttccggcactggggagtctcagggcctgtaggggtttcaggcaggccttctccctcataccctcttctccgtctgcagattgaaactctcttcaagtctaaggactatgagttcatgtggaaccctcacctgggctacatcctcacctgcccatccaacctgggcaccgggctgcgggcaggtgtgcatatcaagctgcccaacctgggcaagcatgagaagttctcggaggtgcttaagcggctgcgacttcagaagcgaggcacaggtgagcagggcaggtgctgcggcttcccgtggcctttgggcagccctgtttcctccgccctgacttgctgtctccccaggcggtgtggacacggctgcggtgggcggggtcttcgacgtctccaacgctgaccgcctgggcttctcagaggtggagctggtgcagatggtggtggacggagtgaagctgctcatcgagatggagcagcggctggagcagggccaggccatcgacgacctcatgcctgcccagaaatgaagcccggcccacacccgacaccagccctgctgcttcctaacttattgcctgggcagtgcccaccatgcacccctgatgttcgccgtctggcgagcccttagccttgctgtagagacttccgtcacccttggtagagtttatttttttgatggctaagatactgctgatgctgaaataaactagggttttggcctgcctgcgtctgagtggtgcctctcctttcccaggggggagggggaagggcagcagccaggccccaggagtcttgagtcctgggcctgctgtgggcctcgccttctgtgagatgggacaagagccaggaggtggccactctgttctgcctgccctacctagtccatgggccccttccctcgtgtctatcgggctgtgcaggcaggaacatgggagagagcgagggaggagctccaggcctgagcatctgagggcattcaggcctgggtgtggagcctggcacgttcctcaggcccatcctgcagggtgggggaggtagggatagtggaggtggggggttgacctcagaaacttgagagctttccggtccctccaactggcttcctcctccagtcttccaagctgcaacactatcagatgcaggcatctccctgcctccttcctaccccgccaacacctactctctatcttctcttccctgcttccttccctcccagcctcggccttcaggctg

SEQ ID NO: 1852 - DNA, 1219 bp, Homo sapiens
gctccaaatgatcctccaccttgacgtcccaaagtgctgggattataggtgtgagctgcgaggtaccacgcctggccaggatggattgattgatttcttttctttctttctgtctgtctgtctgtctttctgtcttgtcttgtcttgtcctgtcctgtcctgtcttgtgtcttgatggagttttgctcttgtcgcccaggctagagtgcagtggagtgatctcagctcactgcaacctcagcctctggagttcaaccatttctcctgcctcagcctcccaagtagctgggattacagacacctgccaccaagccccgctaattttttgtattttttagtagagacagtgttttgtcatgttggccaggctggtctcaaaactcctgacctcaggtgatccaccctccttggcctcccaaagtgctaggattacaggtgtgagccactgtgcccagccatgtatttctttttttaggataaattcctaagacgggttagagtataaacattttatagtccttggtacctgctgccaaactgccactcagaaaggctgtgtctgcccatgcttctgccgcacaggcgccaccctggaggtggggggctctattccgttggtggagatagagtatgcattgtgttttaatttgtatttctttgattatgtatttttagtcatttgtatccttctgtgaatttcctgttaccttgcacatttttctgttaggattttaatgctttagtattctatgtttgttttcttttgaatttgagttcttggtgggcttctttttgttttttttgagacggagtctcgctgtcacccaggctggagtgcagtggcgttgtctgggctcactgcaagctccgcctcccgggttcacgccattctcctgcctcagcctcccgagtagctgggactacaggcgcctgccaccgcgcccggctaattttttgtatttttagtagagacggagtttcaccatgttagccaggatggtcttgatctcctgaccttgtgatccacccgccttggcctcccaaagtgctgggattacaggcatgagccaccgtgcccggcccttggtgggcttcttaaacccacttgatttaacaaatcacagtgtgctagtcccactcccagagtttctgattcagcagggctagggtagtctgggtttctaataagttccagttgaggctgactgctgttggtttg

SEQ ID NO: 1853 - DNA, 1192 bp, Homo sapiens
ccaccatacccggctaattttttgtatttttagtagagatggggttggccggctggtttcaaactcctacctcaggtgatccacctgccttggcctcccaaagtgttgggattacaggcgtgagccactgcgcctggcctttaatgtattttgaaagaaagcgccttataaatttatgccagagtgacaatgaaactgtagccatttgaatgttacacaaacccaggactggctacatgagtttgaggaggaggtgtttccctgcctctctctttgcgctgtgggtgaccactgcctgtctgctgtcattacatgaacccttaagcactctgggtgtttcatatagaaataatcctacttttcaatagtattgaaaggtgtcatttatctttttggactgttgatcaacttcttttgatacttgtttaataaattacatccaacttgttccttccttcttaaatcatatttatatatgcatctctttcaaaagcttcagcgcctgctcctggtcatcactaaccagatttacttggagtacatgtgaaagaaaacgtcagtctgcctgtaaatttcagcaagccgtgttagatggggagcgtggaacgtcactgtacacttgtataagtaccgtttacttcatggcatgaataaatggatctgtgagatgcactgctacctggtactgctttcagtgtgttccccctcagcccctccggcgtgtcaggcatactctgagtagataatttgtcatgcagcgcatgcaatcagaatctcactgagccacccatcattgtgaaataattacctcagttgtacaggacttggtgatcaggatccaggcactcacttgtattctactgctcaataaacgtttattaaacttgatcctgctacttatcttgtggcctctctgagcctcttgttttcttatttggaaaatggagatgttaattatgtaagctctaacttacagttattatgaggataaataagagaaagatttaaactatgaagtcctttagaaataaggtagcattcaatgacatagtagttgaaattataagctgtaggagaatattgcatcaggaaataatcacaaggcaaagtacataataagccaattgaaaaaaaaagccaattgattctagttaggctagtatcaaatgcatactgcataatatttgtctcc

SEQ ID NO: 1854 - DNA, 1178 bp, Homo sapiens
attctttttagttgttattccccccagttatgttcacacttgtgactgtattctttttgtaattgagatacttttgtggtgacttaatttatgatcagttcataggtatttggagttgtgtattttcatgtgtgtacattaaagtttgacattttgtgtgaaacagtttttattacaactggatattgattttattttcctgttcggagggactatttggccataggtcacttactttgtttttaatcacaaaagccgtacatgttcatggcagaggctgggacgtgtttcaaggatctaaagcaaggctgtggtcatggctctctgctattctgacctctgggtgggcacagttatgcgtttgcattggttcccatctcaggggtgtgtgtttataaacagatcagggagcatatatgattttgtattctggtattttctctaagtgttatattgttcatccttaacattacttattaattaatttctaagaagatgattcttgccaggcatggtggcacacgcctgtattgccggttgtttgggaggctgaggctggaggatcacttgagcgtaggagttctgggctgtagtgcgccatgctgattgggtgttgcattaaacgcaacactgatgtggtaacctcttgggagccagggaccactgtgttgcctaaggaggggtgaaccagccaagttggagcaggtcaaaactcctgtgttgatccgtgtgggattgtgcctgtgaatagccactgcactgtctagcctgggcaatatagcaagatcttgcctctaaaaataaattttaggccaggcatggtggctcacgcctgtcatcccagcaccttggggggccgaggcaggcggatcatgaggtcaggagattgagaccatcctggctaacacggtgaaaccctgtctctactaaaaatacaaaaaattagctgggcgtggtggtgggtacctgtaggcccagctactcgggaagctgaagcaggagaatggcgtgaacctcggaggcagagcttgcagtgaaccaagctgtgatcgcgccactgcactccagcctggacaacagagcgagactgtctcaaaaaaaaaaaaaaaaaaagataataataataaaaatttttaagagattatttctttttttttttggagacagaatcttactct

SEQ ID NO: 1855 - DNA, 1290 bp, Homo sapiens
cttggagggatggagaggcggcctcgtgccatgatctgtatttaatggtttttatttctcgggtgcatttgagagaagccacgctgtcctctcgagcccagatggaaagacgtttttgtgctgtgggcagcaccctcccccgcagcggggtagggaagaaaactatcctgcgggttttaatttatttcatccagtttgttctccgggtgtggcctcagccctcagaacaatccgattcacgtagggaaatgttaaggacttctgcagctatgcgcaatgtggcattggggggccgggcaggtcctgcccatgtgtcccctcactctgtcagccagccgccctgggctgtctgtcaccagctatctgtcatctctctggggccctgggcctcagttcaacctggtggcaccagatgcaacctcactatggtatgctggccagcaccctctcctgggggtggcaggcacacagcagccccccagcactaaggccgtgtctctgaggacgtcatcggaggctgggcccctgggatgggaccagggatgggggatgggccagggtttacccagtgggacagaggagcaaggtttaaatttgttattgtgtattatgttgttcaaatgcattttgggggtttttaatctttgtgacaggaaagccctcccccttccccttctgtgtcacagttcttggtgactgtcccaccgggagcctccccctcagatgatctctccacggtagcacttgaccttttcgacgcttaacctttccgctgtcgccccaggccctccctgactccctgtgggggtggccatccctgggcccctccacgcctcctggccagacgctgccgctgccgctgcaccacggcgtttttttacaacattcaactttagtatttttactattataatataatatggaaccttccctccaaattcttcaataaaagttgcttttcaaatttttggctcactttgctgggtggaagagtgggtggccagggagggagtggggagtcctgggagggaagcagcatcctcagagcagctggtcctccccagctcctcctggtgggcaccgccaccccaacaggtttggggacaggctgtgtggtgggccgaggcgggagtatacaggcctgttcccaggggcagcctcccatggaaggtgttccacccccatctccagaggcctggcctgaggggagatgggaggccctggctggccctgcccccgttgggatccacctcttcttcccttgaccccacccagcttcaccccagccat

SEQ ID NO: 1856 - DNA, 1164 bp, Homo sapiens
gcttcagctgactacatgtcaaagagagacaaagttaagagcagcctttcatggtgtcaagaagcagttagcatcttgacttcccctccactcactcgctgacctgctgcagcctccccgggcacctcaggcatagaaaatgagctcagggatctgcccaccctggaccccagtcccgttggtgctgtccgaggagcactggaactggaaggccacctttccacactgcacttccgtcatcccctcctgcccaaagtagctgagttcgctgccgtccaggacggcactggccgtgtagaaggtgtcttgttcaacctggaccgggtgttcaaaccagaccgggaaggtgttactggatccgtctgacatgaacttggtcaagttctgagccagaaccaccccgagccgcttgagctcaatcttcacgctgtactcagccttcccagagctggagccatacaggcccagccctgcaataaatacccttctgtccactgcaaactggatgctgtcgcagcgcccgcggtaccgccactggttgctgcggtaggcagaagactggaatcggtggcacctctgcggggcgaggcccttcctcttggtcaggggaaagtccaggcggggcttgttggtggccgtgtaccacaggaagatgctgtgggtctcctccagagtcaggatgtctgactgggcagcgccgttggcaaactcctctagggtcatggttggaattcggaccagatagagggctcgccccagaacatgcctcttgtttcgtggggtgattggcagcccctgcctcttgcactccgcctcggcccagttcaggacggcctcgaagaccaccgcctctttggtgttgagggcctcccgagtgacaatgatctccagcgtctgccggtctatctcacagaagccttcggaccgtagggccatctcggcctgtgcgtcaatgacctcccagcagcgctgcgtcagctcgggctcctcaaacagccggctctgggacagcaggacgcaggcgttcttggcttccaaacttgtctccagaaagttgacacaggcttttgccaatgctgggacgatgtacttcttagcagcgtacagagtggccagcaccgtgtcggcttccagatcgatctcatcactgtacatgtacctagg

SEQ ID NO: 1857 - DNA, 1102 bp, Homo sapiens
cgtgaagattgagctcaagcggctcggggtggttctggctcagaacttgaccaagttcatgtcagacggatccagtaacaccttcccggtctggtttgaacacccggtccaggttgaacaagacaccttctacacggccagtgccgtcctggacggcagcgaactcagctactttgggcaggaggggatgacggaagtgcagtgtggaaaggtggccttccagttccagtgctcctcggacagcaccaacgggactggggtccagggtgggcagatccctgagctcattttctatgcctgaggtgcccggggaggctgcagcaggtcagcgagtgagtggaggggaagtcaagatgctaactgcttcttgacaccatgaaaggctgctcttaactttgtctctctttgacatgtagtcagctgaagcttgactgtgtagagacattttccacacagccagaacccagggattggagtcttaggcatctctggtacagtggggtgcacgtctcaggtggaggaagatttacggctcaagacaggccccagatcccctcccagtggcacccatgccacctgctttgaggggttggatcttcctgctaccctcttggattctaagtggttccaagcttaacttgagaccttcccttcaaatctaaaattggcaaaaagtcacttaaaatagtggacttctgtaataaaggttgcctaaaataacacccacgtgtcagtaaatgactacagcagttgtacagtggggtattctctttctcatgcaacagaacagctccctcccatcccgaggagaaaacctgtcatgctgaacatgctatgtggttaggagcaaactgcgccccagtgaagcccatctgtcccctgggttgctggctggcttctgggccaccctaggaaacaccaggtgcctggttgtctctatgtcctaatgcatcactagcacctcagagtcctaccctatgaacagactgtcgggggagcattctgctgggcccagcgttctggaccctggggactgtcactagctgtgacactgctgcgggacagcctgttgcaggagtggactatagggtgaaacaggctc

SEQ ID NO: 1858 - DNA, 1128 bp, Homo sapiens
tgtttgggattcagttacattcattgtgaagccagaggccgtgcctgttctgccttgtctgtgctggtggctgcccctggatgacgctgaggtccctgcctcatggtttccctggagggcctggccccaggctccagcgattggctttctgcttctgcatcctatccttccagtgtcctccgacaggccctacacacttgccttcccccaagtggccaaggttgtctgcgcgtcccgattgcagcagcctccagtcctgtgtctgtgctttgtcacaaatgcactggcccctgtgccaaccactgagggccgacgctgcggggcggggggcactttccagctctccccatctttgggcatgcctggggcctcaccttactgttctcgttggaagatcaggccgcagcgtttgggttggtgaacctggtgaacaatccacatgtccaccatgctcattgggagatcaggctgcagcgatcgggctggtgaacctggtgaacaatccaaatgtccacctgatgtttccagaggtaccagggccaggtcttaaccccgaagccctgcagggcagaatgtggtggacgtcgtaggcatgctgtcagttggcagagcttcggagtagagtgtccagcaggttcagctgcagcctccccatgggtgggtggactgaggcgtgggggccttctgcagactggctggttgcagtgccttggggcacatgggatggtacctgcgtcccctgcagtccagcagggaggtggatgtgttcacatgtggtcaccatgcaggagtgatatctgagtgggctggcctggggcaagggggacggccagcccatgctgtgtgtgcaccacttgcagaggtttggaggtacatctgtgttctcgcccggcagccatttgacagcgtccactctggacttgcagtgtgttagggacatggttagaaaatgcagaaagtgcctgtaatcccagccgggcgtggtggcgggcacctatagtcccagctacttggaaggctgaggcaggagaatggcgtgaacccaggaggcggagcttgcagtgagtggagatgggaccactgcactccagcctgggcaacagagggagactccgtctcaaaaaaaaa

SEQ ID NO: 1859 - DNA, 1099 bp, Homo sapiens
ggattgcagctgcaactgcaattcccagcccccgacccccgtgaagatcgccgtggcgggagcgcagcattacctcagtgccatcctgcggctctttgtggagcagctgtcccacaagacacccgactggctcggctacatgcgcttcctggtcatcccactgggtgagcaccacgccgtccacctgggcctgggcacagatgccacgggcagtgtggcgtggcatggagtggtgtggcgtggcgtggcgtgttgtgtggcgtggcgtggcgcggtgtgtcgtggtgtggcgcggtgtggcatggcgtggtgtccctgcttgctacacatttgttgtttttaaatgtttgtttgatacagtaacactttgttaattttaattatatgcaagataacttgattgccctaaaacagccatttgggtcaagataaagccatcgccctctgaaggggcctgagctgggtgtctcctccatcagtcgctgtgataactctatgccagtttcgatttccaaagtcagaagtgcaaagcagggctcgttattaatcctctcaaatcgtccaggtcctgtgtcgtcgaactccattacttctttaggtccatacgatgtgtcttaccacgaaacaaacccacccagccttaatctgttgaccagcagcaaggcctggaggcgacacctctcccgtgtggccctcacgatgccgacgtcagagccctgagccagccgaggcctctgcacggtcacatgtgccctgctgggccttcctcagtggcactcagggctctgggacctcagctcagggctggagctccttcagcggggccacaggcatccaccagggaggggcagtggtggctttctctttcggtggcaggaaagtgggcttgtctggaaggcagcagcacaggcctggggtcgggtggcccagcttttgtgccgcggtgggagccttgcagctccgagtcccccgtggtgacaccagccccacccctggcatgcaggctcccaccccgtggccaggtacctaggctccgtggactaccgctacaacaacttcttccaggacctggcctggagagacctgttcaacaagctgg

SEQ ID NO: 1860 - DNA, 1196 bp, Homo sapiens
ggagtccgtgctgcccgtggcccctggtccctggtccctggggagctgtgtgcctggggggagtccgtgctgcccatggcccctggtccctggcgcctggggagctgtgtgcctggggggagtccgtgctgcccgtggcccctggtccctggcgcctggggagctgtgtgcctgggggaagtccgtgctgcccatggcccctggtccctggcacctggggagctgtgtgcctgggggaagtccgtgctgcccatggcccctggtccctggcacctggggagcggtgtgcgtgggggaagtccgtgctgcccatggcccctggtccctggcacctggggagctgtgtgcctgggggaagtccgtgctgcccatggcccctggtccctggcacctggggagtggtgtgcctgggggaagtccgtgctgcccatggcccctggtccctggcacctggggagtggtgtgccttgggggagtccgtgctgcccgtggccgctggtccctggcgcctggggagcggtgtgcctgtggggagtccctgcttggccgacactgtggtcagcgcatctcctttccccagctctgtgggcaccttcgcacgggccctggactgcagcagctccgtccgacagcccagcctgcacatgagcgccgcagctgcctcccgagacatcaccctggtaagtgggcccagggcgggacaggtgagacctggggtggcccatggcccagagtggctgcgcccttcttcctaccagggcccagcacctgccccaggtattcaggacccctgcagaggtgctgtcccacctggactggcctttcctatccaccccaaactcggccagactgtgctgagggtgcagggagggttgtgctgctgggcctgcagtaggggatccttgaggtactgagggagggggtaccgtgccacaggtgcaggaaaagccaccttggcccgggtgaccctgctgtctcctgccgcagttccacgccatggatactctccacaagaacatctacgacatctccaaggccatctcggcgctggtgccgcagggcgggcccgtgctctgcagggacgagatggaggagtggtctgcatcagaggccaaccttttcgaggaagccctggaaaaatatgggaaggatttcacggacattcagcaagattttgtgagtaccgtgggtggcga

SEQ ID NO: 1861 - DNA, 1146 bp, Homo sapiens
ggaggcaactgcaggtggggaggggctggacaggctgcttctgttccttaagggatgggcctcagctaagcagcgtttctggagctggcaggttgctccgatgcccctgggccctggcacctgactgagttgagtatgacatcctgtcctctctgagctggtcctgctgggagccgagccatcctgggaccagctcccacatgcacacgcccacacctacacacagggcagtggggaagggcagtgagtgggggagggcagcggcggtcctgggcccagctgggggtgaccaggagcatggaccccgcttcttggcccaactcccgcagtgccccttgggctcctcaccctgcactgtgggaagtcagaggcctctggcaccccatccccaagcacatgccagggtggctggggcccagccagggcagtgggtggtgacctgtttctggccggggctggcggctctctcagagccttaggaaaaagcccggcctcctggtggggcagtgccggccacagcgtggctgccctgcagaggggcttgtgccgctgctggactgacagccttgcgaggctttgcttgtctcggcacggcaggcaagtgggtggacagccccggcccctgtgcagggaggtgactgtcgggtccaaggctcctggcctcctgcctggagcccaagccaatgtgtctcttgctggccagagagctgtggggccaccaggcggcccaggacccggggatgcgaggccccacgtcccccaggcccatcctgggtgtgggctgtggcttggttggcagatggccccggcccattgtcccaaggtggctgaggccgtggtgggcggtgggagtgcaggacgcgctctctcggggcctcatttctctcctccatttctcatcaggtctggcaaaccacggacaggccaggcacatggtaagaggaacaacccatgatggggtacggtgcgctcacccatgagctctctggggtgttgggaagaggcctggccagccctgccaggtgccacgtggaagcttccaggaggcctggcaagaccagaggggctgcagcatgtgggggccatggcccctgtgccaggcccagcggtgtgcggccgaccagccctcagggctgccctgggcca

SEQ ID NO: 1862 - DNA, 1169 bp, Homo sapiens
aaaggaacggccagaaatttctcctccatctgattttgaacacaccatccatgttggctttgatgctgttactggagaattcactggcatgccagaacactgggctcgattactacagacctcaaatatcaccaaactagagcaaaagaagaatcctcaggctgtgctggatgtctacgactccaacacagtgaagcagaagtatctgagttttactcctcctgagaaagatggcttcccttctggaacaccagcactgaatgccgagggaacagaagcacctgcagtagtgacagaggaggaggacgatgatgaagagactgcccctcccattattgccccaccaccggatcatatgaaatcaatttacacacggtctgtaattgaccctgttcctgcaccagttggtgattcaaatgttgatggtggtgccaagtctttagacaaacagaaaaagaagactaagatgacagatgaagagattatggagaaactaagaactattgtgagcataggtgaccctaagaaaaaaatatacaagatatgaaaaaattggacaaggggcttctggtacagttttcactgctactgacgttgcactgggacagaaggttgctatcaaacaaattaatttacagaaacagccaaagaaggaattgatcattaatgagattctggtaatgaaagaattaaaaaatcccaacatagttaacttcttggacagttacctggtaggagatgaattgtttgtggtcgtggaataccttgctagggggtcactcactgatgtggtaacagaaacctgcatggatgaagcacagattgccgctgtatgcagagagagtttacaggcattggagtttttacatgctaatcaagtgatccacagagacatcaaaagtgacagtgtacttttgggaatggaaggatcggttaagctcactgactttggtttctgtgcccagatcacccctgagcagagcaaacgcagtaccgtggtcagaacgccatactggatggcaccagaagtggttacacggaaggcttatggccctaaagtcaatgtatggtctctgggtatcatggctactgagatggtagaaggagagcctccatacctcaatgaaaatcccttgagggccttgtgcctaatagcaactaatggaatc

SEQ ID NO: 1863 - DNA, 1177 bp, Homo sapiens
cacagacagagagagagagagtgtgtgtgtttgtgtgtgtgtgtgtgtgtttattggtgagtgtggagcagatgagcccagtcagaaccgcactgtattttagtggtcttctgcactgtggagggtagaggaaacctggcttgactgttaacttggctgaccctacctctgggccagttctctctagtcatggacagaaaggcaaaattcccgactttgtggaccctatattctagttgaaggggagaaaagaagcaaaaacatggaaattatctggtaaattagccagtaacgaatgctatgaaaaataaagaagtacatggaggattgagattgtagatagaagcaggtgtttcagtttacactgtgaacaagcctcactgggaaggtaaatttaaacgaagcctagagagaagcagttgagccagatatatgagcaaagacctttccagataataggagtggtcattgcagaggctcaaaggaaggatccctggtgtcctcatggagcagttagtaaggaaatgtggctggaatggagtcagcaagtgggagggagggatagagaagaggacagaggagagatgtgagtggaattccttcctccactttttactaattgtgtaataacagttgactcaaacttcaaaagtctcaatgaaatcagtacttttactatggcctgtttatctcataagatttttgaaaggataaaatgaaataatatggagaaatgacttataagcttttgttgtaatttgttatatacatagggatggatagacggatggatagattagatgatagatagatagatagatagatgataacgttatggactgaatgtttgtgtacccccaaaaattgatattttgaagcctaacttccagtgtgatggtattaggaggtgaggctttggggaggtgattaggtttagatgaagtcatgaaaatgaaacccccatgatgggatttgcgcctttatgagaagaaataccagtgctttctctaattgccatgtgaaggtataccaacaaggtaacagtctgtaagccaggaaaagagtcctcacaagaaacagaatttgtctttatcttggacttcctaacctttagaattgtagaaaataattgaatgttgtttaagctaccagtctgtggcattttttgtagcaatca

SEQ ID NO: 1864 - DNA, 1199 bp, Homo sapiens
aacggcaggcacctgccccgcctcggggctggggggctattccagcggcttcagctaactttcagagccattcgtttcccaacaaagtctgaggcgttcctctgctgggtacaccaaggggctctgcaaccctcctgggggggggggtgcccagagggcttccggaagtcccaggtttattctttcgggtcacagacagcagaaactaaaaagagggattaccctttctgtccagtcgcaagatggcgaccgagcctggtgggactccgaggggccgcaggccacctcctcttcccaatggcccgtgcgccggcggcgacggcaagcgggagggaggcggggccggcgaaggaaggaggggcggagcgcggcgccctcccgcgcgtcttggccccgccccacgtccccgcgtcccggcctggagccctcgcccggccgggcggcgcgcgctgcctgccgggatactcggcccgcccagccagtcctcccgtcttgcgccgcggccgcgagatccgtgtgtctcccaagatggtggcgctgggctcggggtgactacaggagacgacggggccttttcccttcgccaggacccgacacaccaggcttcgctcgctcgcgcacccctccgccgcgtagccatccgccagcgcgggcgcccgccatccgccgcctacttacgcttcacctctgccgacccggcgcgctcggctgcgggcggcggcgcctccttcggctcctcctcggaatagctcgcggcctgtagcccctggcaggagggcccctcagccccccggtgtggacaggcagcggcggctggcgacgaacgccgggatttcggcggccccggcgctccctttcccggcctcgttttccggataaggaagcgcgggtcccgcatgagccccggcggtggcggcagcgaaagagaacgaggcggtggcgggcggaggcggcgggcgagggcgactacgaccagtgaggcggccgccgcagcccaggcgcgggggcgacgacaggtcagtgttgccgcggcctgcgccaggcggcgctggctcccctccgtcactcggccggccttcggggcccgctgtggcgaggtcgacaccccccttccccgccccccgccgccgaggcgagtgtttgggggcgcgtggtccgaaggggctggtgccagaagtaggcccctggtggccgcggct

SEQ ID NO: 1865 - DNA, 1198 bp, Homo sapiens
agatactccattaacctcatctcctacagagaatatttaattaaaaaagaaaaggcaacattccagatcttctcattcggtagttatttgctagagtttcttcagtgaggcacccaaaagcttgtcttgtgttagacagatttgtgcttctttcacttaattctgaagcatcaatagaactggcgacttcctgaccgaccatcatgactagacccgggggcagtgaacatattgtgggtgcctctgagtaacttgtgtttttttcttgttaagtaggtttttaaaatgcgtgtgtgtgtgcgtgtgtgcatgtgcactgtgacacacagaaaagcacacaaaaaataaatataccttatgagatgtttgttgaaatatctcataaagaacacgtgtaacatgatcatgtagattcatgaatagaatatttccaggaaccccagagctccctccttttgaaagatggctaaatgagttttctcattgctcctgtagaagacgagaatatgccatcccaaaatatgtctctttagcataaggattattttgacctggttattttgtgaaactgcagacacaggagaaactctgaaaataaaagtcgaagtgacccttttgtaaggggaaatttacatttgtagagaaaatctccatttgcttggatgtctccttttctgtaccaggaagagaaagaggactctaaatcaccagactcttatcaatgaagaggcagccgctgaaatctgcatagcaaacctgactcttgggtaccctgcttttcctaggcacttggccatgactggccttccccacacccttctttctctgtttttagcttaagatggtatttaagaccaaatactaagacatctctttgagatttactcatttttccctaggtatctcccatgtatatttgatgtatttatgttgatacagtcagtgctgcataactagatttcagacaataccatattgcctagggtgaagtaggctgtaccatctagacttgcgtaagtccactctatgatgttcatgcaaggaggaaatcacctaatgatgcatttctcagcatgtaaccttattgttgcatgacacgtggctgtatagtcgtttgtttttctctggttagtctatcttttgttacaatggatcccagctaagaactatttagagctaagttattttcctccccgac

SEQ ID NO: 1866 - DNA, 1198 bp, Homo sapiens; identical to SEQ ID NO: 1865

SEQ ID NO: 1867 - DNA, 1113 bp, Homo sapiens
gaataatttacaagcttttaggaaacatttgtgtactagatataaaattttaaaaatttagagctgggtgtggtagtgcatgcctgtagatctaactactcaggaggctgaggcaggaggatcacttgagcccaggggttcgagtccaatctgggcaacatggtgagacccccgtctgttaaaaaaaaaaatctttaaattaaattatgactttagtgttcatacacccaaaatttctaggtactctgtagtgcagggtataaaacttgacataaaaaccctgtccctccagtcacatgatacagaaagagcgcaaggacaagggttaacaggcttctgtttgagaaaattattatgggtaaaagatgtgtagatgagaatagcatcatggagcagttagtttgtttacaaagaaaaattttagtagtgaaaatgaaaatttctcaatccttcttcaaggtccagagctaatgggtgttggttccttgctgaagaagtacacagccctcctgtgcacgcacattggagatatactgcctgtggccgccagcattgcttctaccagctggcggcacttcgcggaggtggcttacattgtggaaggggactttactggtaccttttgtttcctgcttgtgtacatgtttattttaggagatagatgaaagctaaagtgtcttctttgctgatcagcatgcctgcatttactctctaaattttctgggcctcctgccctttcacctttgttttttttttttagttactgacagttctgttgttaagccagctggtatgggactcatatcactttaaatgtaattggtaatttagatttatacttccattattgacatttcaataatgaggtcaaaggtaattgtctaattttattttgacagcataataaaaattaggtacctatttaaggatcttaaaaattctgatattacctggtatgttttaactttttgaggttagagcattattttttagtgttttttccctgatgataaacatatcaataaacatttaattttctgaatagaagactcttagttcatagttctgtgattgaaatacagtgttttggaaaatatttttgtaatttaaagg

SEQ ID NO: 1868 - DNA, 1143 bp, Homo sapiens
aatagaatattttgctaagtgtttaaatagaaacaatgttttaaatatcagttatatctaactgagagaacaatagatttcttcttaggaaaccttcctcactgaagagtgtgctatgcattgttaaatctcggatgggagaatatgatctaatagttaattaaaagcaccttgtttctttctgactgaaaatctgaatgaggaggagaaaaaaaaacagatcctttttgtatcctagtattatgatctttgtagactgtgggtcctaacgaattgtagctgacaaaatacagcagttttaataacacacccaaagcaaatgaattgtgcttaatattaaagcaaagcagattatcctcaagaagttaatgttaaaagctgtctgacctgaatggcctaggaaatatctttcttgcagcggaagtcataggcttgaagctgcatctgcatccctcttcccttgtagggaagaaggtgattgatgtggctgcaggctccacccactgcctggctctgactgaggacagcgaggtccacagctgggggagcaacgaccagtgccagcactttgacaccttgcgcgtgaccaagccagaacctgcagcattgccaggactggacaccaaacacatagtgggaattgcctgtgggcctgcccaggtactgaatatagagcttgatttggtattttggaggattttggtttccagttgttcattaccagtatgtagaaaataccactgagttttgtttgttgttcttgtgtcctgcagttgtgctaaactcatttattatgagcttcactgtagtttccttgggttttcttcatggacaattaaatgctatctgtatagaggggcagtttcatttcttcctttccagtctgctcgccttttatgtcttttcccggcctgattgccctggccaggacttgcagtgtgaagctgaataggagaggtgacagtgggcaccctgccttgatcctgactgtaggggaaggcagttcagtctttcaccatcaactgtgatgttagctgtgggtatttatgtagatgccttattatcagattaagggagtgtctttaattccccgttttagaagcttctaaaaaatcctgactggatgttaaaatttgttaaatg

SEQ ID NO: 1869 - DNA, 1237 bp, Homo sapiens
gtccatttcactgccgttttccaaagagaacacatccctttgtgaccctaagctaggttagagagccttgcttgacagtgttggatatcagtattgtttttggaagattaatttattagtgtcctttcagagcttgcggttgcctgtgatcttgaagtgaaatacttattcggtgacttttgtctggaatgcttgggctgattatacaagcattctccaggactgttcaaacccacatcatgtatagtgtatagtgaaagcaactaaattatatttgaaaggaacaaaataatattatctttacaacatgtgagaccaaatgggggacaagattggtgtcaggaacaatttggctgagtctgtttctcatttgtatgatacgttttcacccagcctgtattgtggtcactgaatagctatttttcatctggtctgctatattactagctcttctaagcaccagctaatgctattttcccgtgcaaaagaaaaacatggtttagaataaggacactggagctctttattgttgacaatgagcctttatttctcacatctaattagaatgtttcaggaggcgagtggtgagcacggtgtcgggggccgcattagctattgatttatgtgctgttatagaattaattgagtctggacatggagactcattttcttggacatgtagcaggtaatcatgcttctcctgtacatttgaattgctttccagatggtgtgttgtacaggatttatctttaatatgattgactagaagcaaaggacctgagtgtgtttgcatacatgctctgcaatgcaaagcccccagcccccactgtagagatggttaactctctcctggccacaccccccctgggctcatatggggacctgggccttggattgacactgtatgcagcaaagacagcgtcaaagggtcctggataaaggctctgggaggggagaaaaggcctatagtatattctgagggaaacagaataaacagcattacttattatgcaaaaccaggacataatgtgggttcagcaggggaatagttagtgtcttagtcagctcaggctgctatatcaaaaaacaccatagacttggtggctccaacagcagacatttatttctcacagctctggaggctgggaagtctgtgatcaaggtatgggcagattcagtgtctgctgaggtctgtctgctttctggttcataggtggccatcttctttctgtgtcca

SEQ ID NO: 1870 - DNA, 1200 bp, Homo sapiens
gtcctcattatgtcttcttaatgaaagctgctcattttcttcgtgagagcaaacaacctgatcttctgaccatttgtcttggtcacctgggctacccaaactgagtgagaagtcaggaatgagccggtaggttcctggggagaggcgtgtgtcctcgtgagttgccggtgcctcccttgactgcttttcccggagctctgtgtgccctcgttctccttggtgtggatgcgtgttgttctgatgatgagttagcgggggtggggatggcgcactgtttgaacagatgtgccctcacatggctgcgggaggacgtggtgggaggtgctgtggtgaagtggccccacacatggctgggctttgtggggttttgactctgtccttcccaatgttcctccccacagtggctgcctccgggtgatgatggctgtgtgaacgactgccatggcccaccggaagcttgagagcgtggggagcggcatgttggaccatagggtgagaccaggtcctgtccctcacagccaggagcccgagagcgaggacatggagctgcccttggagggctatgtgcccgagggcctggagctggctgccctgcggccagagagccccgcgccagaggaacaggagtgccacaaccacagccccgatggggactccagctctgactacgtgaacaacacctctgaggaggaggactatgacgagggcctccctgaggaggaggagggcatcacctactacatccgctactgccctgaggacgacagctacctagagggcatggactgcaacggggaggagtacctggcccacagtgcacaccctgtggacactgatgagtgccaggaggcggtggaggagtggacggactcggcgggcccgcacccccacggccacgaggctgaaggcagccaggactacccagacggccaactgcccattccggaggatgagccctccgtccttgaggcccatgaccaggaagaagatggtcactactgtgccagcaaagagggctaccaggactactaccccgaggaggccaacgggaacaccggcgcctccccctaccgcctgaggcgtggggatggggacctggaggaccaggaggaggacattgaccagatcgtggcagagatcaagatgagtctgagcatgaccagcatcaccagcgccagtgaggccagccccgagcatggg

SEQ ID NO: 1871 - DNA, 1149 bp, Homo sapiens
gaagccaggaagcggccctggtgctgtggtgcgacctccaaaggcaccagaagacttttctcaaaactggaaggtgctgcaagagtggctgctgaaacaaaaatctcaggccccagaaaagccttttgtcatctctcagatgggttccaaaaagaagcccaaaattatccagcaaaacaaaaaagagatctcgcctcaagtgaagggagaggaaatgctggcgggaaaagaccaagaggccagcaggggctctgttccttcaggctccaagatggacaggaaggcgccagtacctcgcaccaaggccggcggagcagagcacaataagaaaggaaccaaggaaaggacaaatggtgatattgttccagaatgaggggacatcaagcataagaagcagaaagctaaggaggcagaccctgccccacccaccgaggaagacatgtggtttgacgacgtggacccggcggatatcgaagctgccataggtccagaggtggccaagatagcgaggaaacagttgagtcacagtgagggcagcgtcagcctcagactcgtggaagagccggccttcggcggcctgacaagagccttagccttggactgtgagatggtgggcgtgagtcctaaaggggaggagagcgtggccgcccgtgtatccatcatgaaccagtaggggaagtgcgtttatgacaagtagtcaaaccaaccgagcccgtgacggactataggacagcggtcagtgggattcagcctgagaacctcaagcagggagaagagcttgaagttgttcagaaggaacaactgtcagaaggaacaacggtactgtcaccgcttatcttcagtgacaccctggggtgaggggctcagcaccttcctctcggggagccacattttcctcctttgtcttaggggacataacaagctctgctgggcttgagggacccagaccaggtgtctgcagtcagctcctgagacacggctggccggcacaacaggtgttacatcaggggtttcctgtggccgtttggactttgagcgtttatctaaattaaattggcccagggttggctggtgggtcacccagcagaggcttctccccatagcacgaggatgtgtcgtctgggcacggtgaccgcggttattcctgga

SEQ ID NO: 1872 - DNA, 1177 bp, Homo sapiens
cccttgccttgccttttcacccttaggcaagtcatccgacacgaatccagtagttatacactactgcacagatgttggagttcagtggcatcttctgcttagtgatgtttttgatttttggttaaatctcaccatgacatgcctttcatttttttgcatatgtgtctctttgtgtatttgatatatatcctttctgctgtaataggattcattctgttgtcacattccatgttgtagaaattggtttatatgtctttctgatctccactaaacgtttctccagggtagacaccatgctttactccttataatgtctccagcatttgctgagaaggaccagctctgcctcctcttcttcctcgttctcattccagttcacctggtgtctgacctttcttgttgcttattcttagtgcttgaacctaatgacctgtctttagaggggttggggagtgggcactggtgtggagagaggagggggcctccctctgcccctaggtagagtctgggggttcaagagtgtggtgctcggagggctatggctatgactgaagtgtagggagtagtgagagaggttaaagaggcattaaggggcctgaaggtagacttggattggacttcctgctgaggaatctgaactttgtttagtagacaagagggacctattgaaaggtcataagcagggaagtgatatgaagagattacctaaaactgctgcacattcaggtccttgaagactgaaattcgtatttaaaaaagtatggcataaacaggtaattattctatctagtaggaaaatgtaaggtcagagaggagagtaattaattctgccttgggtttgatgacaggaagctttcacaaatgaggtgatgtttcaactggatactaaagggtagctaggattgcaccatgcagggaagttgggaagatggaattttagacgtgagaagcagcttgagtgaagaatcagaggcaagcatatgcttggcatattgggaaaatcttgaccctgctgatgttgatgtggtgccaggtctgaggagaccaatggcttgagaggagactggataggatgggctgaaagcaggtcaccaaaggtttttggtgccccactatggagtgaagattttatgctctagatagaggggagctgtgagctttaaaaaagcagctaaaa

SEQ ID NO: 1873 - DNA, 1435 bp, Homo sapiens
cattctgggcaacactgtgaaactccgtttctactaaaatacaaaaaattagccgggcatggcggtgtgcgcctgttatcccagctactcgggaggctgagacaggagaatcgcttaaacccgggaggcagaggttgcagtgagccgggatagcgccattgcactcacttttcctttttttttttttttttttttttaaagacagggactcgctttgttgcctaggctgtagtgcggtggtgcggtctcggctcactgcaacctccgcctcctgggctcaaacaatccttctgcctcagcctcccgagtagttgggactacaggcgtgcgccaccatacccggctaatttttggttttggggttttttgtttggttggttggttttgtttgtttgtttgttgtagagacgaggtttcgccatattgcccaggctggtctcaaaccatcctcccgcctcgacctcccaaagtgccaggattacaggcgtgagccaccgcgctcggcctttttaaattttatatttctctatttatttgtacaactttttgagttgaccattgcatcttctattttcatgtttgccctttttcgcgctggccccaccccatttcatcactcctgtactgacatacattctgtgttcctggagcagaaatttgacccgatgggacaacagacctgctcagcccatcctgctcggttctccccagatgacaaatactctcgacaccgaatcaccatcaagaaacgcttcaaggtgctcatgacccagcaaccgcgccctgtcctctgagggtcccttaaactgatgtcttttctgccacctgttacccctcggagactccgtaaccaaactcttcggactgtgagccctgatgcctttttgccagccatactctttggcatccagtctctcgtggcgattgattatgcttgtgtgaggcaatcatggtggcatcacccataaagggaacacatttgacttttttttctcatattttaaattactacaagattattaaagataaaatgatttgaaaaactcttattttgtgagttgttggaggaaaggattggcagtatttttttaaagggagggagatgataaaggagagtaccccagagagttgcaacaataccacttggaagaaaaacttcagtcctgctgttgcaagagtggtcatgtgctgttcatgataggagggtattggggaagaaagattaagactttcacagctgtcagcattcactgaaaaatacctctgttgtcacttaacgtaatttcttgtcccttgaaataagattttgattaaaaatggaagagtacttgtaaaagtaataggcatattacagacagaggtcagtgaattgaaagtcagaagaccagtatttgctttttgtataactttgagaaagttacttaacctgtttagt

SEQ ID NO: 1874 - DNA, 1162 bp, Homo sapiens
caacgccggcgaccagcacggaggcggcggcggcggcggtggcggtggaggaggcggggcggcgggggcggcggcggggagaactaccatgacctgcacaaaacccctgcctccccagttgtccacagcaggggcctgattgacgatgtggtggaagctgaccttgtggaggccttgcaggagtttggacccatcagctatgcggtggtaatgcctaaaaagagacaagcactggtggagtttgaagatgtgttgggggcttgcaacgccgtgagctacgcagccgacaaccaaatatacattgccggtcacccagcttttgtcaactactctaccagccagaagatctccctccccggggactcggatgactcccggagcgtgaacagtgtgcttctctttaccatcctgaaccccatttattcgatcaccacggatgttctttacactatctgtaatccttgtggccctgtccagagaattatcattttcaggaagaatggagttcaggcgatggtggaatttgactctgttcaaagtgcccagcgggccaaggcctctctcaatggggctggtatctattctggctgttgcactctgaagatggaatacgcaaagcctacacgcttgaatgtgttcaagaatgatcaggatacttgggactacacaaaccccaatctcagtggacaaggtgaccctggcagcaaccccaacaaacgccagaggcagccccctctcctgggagatcaccccgcagaatatggagggccccacggtgggtaccacagccattaccatgatgagggccacgggcccccccgacctcactacgaagggagaaggatgggtccaccagtcgggggtcactgtcggggcccaagtcgctacggccccccagtatgggcaccccccaccccctcccccaccacccgagtatggccctcacgccgacagccctgtgctcgtggtctaaggcttgcatcaatctaagatgaactgtgacctagtcttcaatgtcttctgcttgtatggcaatgtggagaaggtgaaattcctgaaaagcaagccgggggcgccatggtggagatggctgatggctacgctgtggaccgggtcattacccacctcaacaacaacttcatgtttgggcagaagctgaatg

SEQ ID NO: 1875 - DNA, 1231 bp, Homo sapiens
caaggattataataagcatacggttgttagaaagcagctttctttggttatctactggtagcactcagggcttcttatgcctcttggattaaaataaagcaggccatattttggtgagacagagccctgttcacagcagctatgctttttcatttcctctgcctttaaggagcatatgttcccatttccaagcatcttctgatgttttgtatcattcaggtatctcctggaatggataatgtataagtgatgaggctacattgccctggtttgcctgtgctcattctcttctcacatatgtggaatatggaaaatgagtcatgaatgcaattcgcatgtctcgtactcttctcataaaacagaaatcttcatggatacgtaatggcaatggtgaacattctttcattctaatttctaattgactctggaagtcaaattcttataaaaattaaatttctcctatgaattccctttattcattaacacaagtcaattacattcacttgtgtgtgtgtgtgtgtgtgtgtgtgtgtgtttctctctcccttacattcttccaatctactcttaagatctgtgtgaattctattctcttaattttcttccttttctatctgaatccctgacattgagatatttcttgtgttttggtcaccttttctcacacaggattgtactagcaaattgtcttgttaaccctttcttgcttctctttatatattcccttttgctgtttccttcccatttgttgctggcagcttgctaaccattaccaccattttaaatttaatcttatagctggtatttcattccaagtgatcataagttaaaaactaaagccaattttttttatttagtaaagaggatttttttttaggattcatcaactcatataaataggaggctattttagtcatctttgataaccagctgcagtattttaagagtactccatattgattaagaaggtattaaaagtgaagtcattggttgtgtgctaatggcaggtatataaagccatattgaactcaacactagattaaaatatttgatgagccctaattacctttcattggtttaatgtgaagtattttttactacttcatatttcttttatttattttttattttagagacaaggcttcactttgtcagccaggctagaatgaagtgggcactcgtagctcactgcaaccttgaactcctggtctcaggcgatcttcccacctct

SEQ ID NO: 1876 - DNA, 1127 bp, Homo sapiens
caagaaagttatttatcttacaaaaggactcactttagcgaacagcaaattcccttcatgattcaacttaggatatttcaatttgcatttacttcagtaaagcacagtctatgttgaattcccttgctgacaggttttatgcttacaataacttagggctaatagtcctaaatgtccaaaagaaagtaatgtctccagagagtgtagttctaggttcttctataacatctttagcattccattcacttaaaatgaaaacagacaatgtgttcaggaacttatgggagagaattaaaagaaagcataaccagtcaaatgccaaaatgctaatttcaatctctgtttctacattgctccagtcacctgacttgttaaagatctcgcctgggatgaggcagctatccatcaatgttcgtagaattgtacaaataccacaacaataaaatgaagataggtttattcattccttgtagtagtatgttcccaggccatttcaaaattggctagttaggttggaaagaagatgaagactttataaaatagtggcttatgcatttcttccttaatttcctgtttgtgctctacactgtatgaaaattttacacctacaaatacctgaactgacaaagtctttcctttagtttctgctaggtcagacttggtgctaaatggaggagagtttgtcagtatagtttcctcagtatccaggtcaaatccaagtttcactcttttttttttttttttgagatggagtctcgcactgtcacccgggctggagtgcagtggcgcaatcgcggctcactgcaaactctgcgtcccaggttcaagcgattctcctgcctcagcctccctggtagctaggattacaggtgcctgccaccatgcccggctaaatttttttttgtatttttagtagacttggggtttcaccatgttggccaggctggtctcgaactcctggcctcaggtgatctgcccacctcagcctcccaaagtgttgggattacaggcgtgagccacagcacctggccaagtttcactcttatatggggagccagagtcctgagttgaatggtgatttctatccacacttttgatctctttgagataattttcattcctcctat

SEQ ID NO: 1877 - DNA, 1165 bp, Homo sapiens
tggcagggagtttcaggaagaccaattaccattcagtgttaagaactttctaatagctgttcaacaatagggtggccttgtagaagatagtaattccctgtcactggaggtgtgtcagcagatgtcagaaaggttgtaaaggggattcctgcattgtgtagaaagttggatcaggtcacccctaaggtcctttccaattatgaaaatctgtggttggctactggagacctatgggggcttgctgctgttaagtcagccctggtctccccagcatttgggagggagagctggtgagttcttctttctcctccctagataataatgacaaacacctgatcacctaccagtcagtggtcagaggcagagccctccaacagttcttatcttagctcaaccctgagggacagactcttgggttggaagatcacaaaaaggtcgctcttgtgctgttttatgttctctgaacgtgtaccttgagacaaggacctgtatgtaggtggctgattttagggggtgagcaggagtgagggagggaggagaatgagacagctccctgtgttgagtaggtccactgtgggtagttagggctgtcgccctgggatcactctgaggagacataaagattatggcttaggctaagcgcggtggcctgtaatcccaacactgtgggaggctgaggcgggtggatcacctgaggtcaggagttcgagaccagcctggccaacatggcaaaaccatgtctctactaaaaatacaaaaattagccgggttggtggtgtgtgcccatagtcccagctacttgggaggatgagacaggagaattgcttgaacccgggaggcggaggttgcagtgagccgagatggagccactgcactccagcctgggtgacagagcgagactccgtctcaaaaaaaaaaaaaaaaatattacagctcagaattttgccactgactgacggggcacatctgggctgcagttccaccagtgcccatccttcattggttgaggtttgctctttggaggtattaagcccctgccactttcaggcagccctgcaggggctaagaaaagcctcacgcagaggagagaggagggaaactgagcatgtaccagaagcatccgctgcagctgcggctggtcacagaaatgggctggagggatgtg

SEQ ID NO: 1878 - DNA, 1223 bp, Homo sapiens
gtggcaagtgtctctgactgataaggcaaaaacgagcagggacttctcacatttgccttaactgtcacagggcctcagctggttgtctgctctttccttcctggatcattttcccagcccttagttcccataggaaactttctctcaaataatgatttctgctgggcatggtggctcatgcctgtaatcccagcactttgggaggccgaggtgggcggatcacttgaggccaggggtttgagaccagtctgggcaacatggcaaaaccccgtctctactaaaaatacaaaaaaattaggtgggagaattgcttgaccccaggaggtggaggtttgagtgagccaagatcgaaccactgcactccagtctgggtgacagagcgggaccctgtctcaaaaaaaaaaaaaaaaaagaaaaaaagtctgcccttaagaggtatgaatgattgtgatttggtgctttggacaatgccatgtagagtgcttctttgggggtgagggatagacagaccctaggggctctgagctgaataatcctcttgttgtcccttacatttctctgccagttacacaacagccaatgcggagtctgacaatgagcgggactctgacaaagaaagtgaggacggggaagatgaagtgagctgtgagactgtgaagatggggagaaaggattctcttgacttggaggaagaggcagcttcaggtgcctccagtgccctggaggctggaggttcctcaggcttggaggatgtgctgcccctcctgcagcaggccgacgagctgcacaggggtgatgagcaaggcaagcgggagggcttccagctgctgctcaacaacaagctggtggtgaggctccagctgcctgtctccttctccttccctccctccctccatctctctgttcctgacccctggggaatgaaggcccgtgtggttactgcccctacaaggtgacatgggacgagaaatggtgagacagctggttttgcatctgtcccccaggtcacatatcctcttccaaggaggcccagcgtggatcctagggccagtgtactgcttgccccagagctgcctcccctcttgggagggggagtgtagttctctgctttctgtagagctactgcagaaagagctctacctctcacctctagggggaaatgtggaaagaactgtattttttttttctcctcatttcccttgaggcagagtccaagctgccag

SEQ ID NO: 1879 - DNA, 1177 bp, Homo sapiens
gggctagtaagggagattgtatacctgttgtccacagtcttcaggcagctccccaggtctctgaaccccagagtgtcatcattggagagagcagtgactgcgagagatggtggaggccgctaagcatggtagaggctagaggaagtctatccacaggcagttgtgttcccagcaattcctcccatcctgcatggttcacaccaagagaaccttcagatcctaccagcaaccgtagcaccttccacccaggggactcccagaagccagtagagagaccaggagccacctcaatcagcaggacagcctcactgcccctcttgcagagtcccctttgcccatcctgaatgcacagtctccctgctcatgcccttcagtcccctgcttggctgtatgcactgtctatattgcactgagagaggaagggacagcaggagtgaggtgaagagggcggagagagggggcaggctcggcaccggccctcccagcccggccagcctgagcttgctgccctccagtagagacagaggggcagtgtttgcatgggaggtgtttctgcctgtccctgcctgatgtccctggtggagcaggtacctccgggcgggcaagcctctgatttgcacacctgaaaatcgcggaattgagtttcgatagattgatttttaaaacttttttggagtagggggtataggggaatcatttaatttaaatcattaagattcccctgctcaaacccagattcctgtgtacagatgctatttagagggaatcagaaaaatgccaagccttttctctttgaatgtgctatttttataactgaacttgtacatatgtataaagagagacacatcttccttttactaactggataaaaaaatcttaaataaaatggagtgagataattttatgtaaattgaggtgtctgtggtctttgcagctgcccctccttggaggcaaactagagcccttggtggatgtggcaggatacagggaaagcagagccctcgcctgtgatcagagaggacaggggttggtgggacaaggagtggactgtgggtgtttccttagtagcagaattgattgggcttatgaatttgcctctggccatcagaaaggaagcttgaccaactgtctgacatgcagtggtcaacgcccttgtctccatggtgggctctttatg

SEQ ID NO: 1880 - DNA, 1148 bp, Homo sapiens
gaggctgtctgggatacagctgacttagaaagcaggatttactctaagtatattggacatttttgccctcttttggacctcataagtacattgcttacatacttacaacatgacattgtatgattctgaatatattaatatcttgatcctgggctcctggccaaagaagcctctcaaaacactgaaaaatatttcactaagaacagtgtcttgcaaacctcttaagcattcaatcctagacctggaagggtatcatcaaaatgaaaattgaaaaatagatgaaagtttataactggaaaaagttgttttgtttttaaactataagagtgcctagaaatgaatcccaggcagaaaaaccatttttcctgtttctctgttctttcatgctgagattctagcttttggcttttcatctcgagactatgagcccagagtctttatgtataattccaatataagttctgcttttttacaaaataaataaataaataaaaatttttaaatcaaaacggttatctgtgagtataaaaattggtctgtatgaggtttttttgttgtttttttttgtttctttttttcgttttgttttgtttttttttttttttgagacagagtctcactctgtcacccaggctggagtgcagtggtgcaatctcagctcactgtaacctccacctcttggattcaagtgattctcccacctcagcctccagagtagcagagattacaggcaggcaccaccatgcccagctaatttttgtatttttagtagagacggggtttcaccatgttggccaggccagtctcgaactcctgacctcaggtgattcacccacctcggcctcccaaactgctgggattacaggtgtgagccaccgcgctttagtcttactagagaagactaaatatgctttacttatctaagagtatgcatgctgttcaagacatatagaactggtcatatttctatagtctagacttactttttaaactttttatagaagtatagctgctattaattttgcaggtctgcgacacacatcctacatgggagatgtttgctctgacccacgatctgctgggatactgccatgtcaagtcatagaagggagagagacccaattttcatccacctgctttgtattcct

SEQ ID NO: 1881 - DNA, 1262 bp, Homo sapiens
ttaattgactcacagttctgcagggctggggaggccttaggtaacttataaaatcatggcagaaggggaagtaaacacatcctccttcacatggtggcaggaaagagaatgagagccgaatgaaggggtaatctccttataaaaccatcagatcttgtgagaactcactgtcactagaacagtatgggggaaaccacacccatggttcagttaacttcacctggtccctcccttgacacatggggattactacaattcaagatgagattttgggtggggagacagccaaaccatatcaggacccttcagtggtttcccattacaattcgaataaagtccaggctgggctaggtggctcatgcttttaatcccagcactttgggaggctgagatgggcagatcacttgaggtcaggagtttgagaccagcctggtctacatggtgaaatcttgtgtctactaaaaatacaaaaaattagcagcaggtggtggcacacgcctgtagtcccagctcctcaggaggctgaggcaggagaatcgcttgaacctgagaagtggaagttgcagtgagccaagatcgcgccactgtactccaccctgggtgacagagtaagactccatctcaagaaaaaaaaaaaaaaaaaaaaagaataaagtccaaactcctgcacatggcctatgggcctacaatatcggacccctgtcttcatcttccatctctcctcctgtcttcatcttccatctctcctcctacctccttcctccacaccagccccttttctgtcagatttaacaacctcatttccatctcagagctttgcacttagtgttgctctgctgtaatgctctgcccccatgtcttcacctgctttctctttcctgtcattcacctctcggctcaaaagttgcctcagagaggcctttcctgattcctgtaactaaagttggaccctctaatccagttatttcaacaccaccatcctataactttcttcatagaacttatcactaactaaaattactttgttcattcattcatctgtttattgtcactctactgccttccctggaacataaattatataaattctttttttttttttttttaagatggagtctcactcttactgcccaggctggagtgcagtggtgtgattccagcttacggcaacctttgccttccaggttcaagagatcctcctgctgggactacaggcgtgtaccacaacgcccggctaatttttgtatttttaggagagatgg

SEQ ID NO: 1882 - DNA, 1380 bp, Homo sapiens
tatcttttattttggaagaattagtggtgaattctttatattgaaagtgagtttttcaattttaaagttggaaaatcatctggcaacatcatgactatactaaaaaccaatgaattgtatactctaaaattgctgcaatattatgttttatgttatgtgaatttaatctcaaaacatacaggaaaatatcagctggcagtttaatggccctttccggtttgtgttgcaattcttagttgtgatggatgtgtgttcgctttacagggttgttaatcaccgtgtggatttttagagtttttgagtgtttttgaggaatggctcaggaaatctgatgtgttacttggattcctaacatctttttttttttttctcttcaagtcttgttaatggatcattttgtacttttaaaatccctttctcctctctctctccagtcttattgccagcagttttgaagatgactcccgtgtagcctcaccgttagaccagaacggaagcttcaatgttgttattaaagaggaacctctagatgattatgactacgaacttggtgagtgcccagaaggggtcactgtgaaacaggaagagacagatgaagagacggatgtatactcaaacagtgatgatgatcctatactagagaaacagctaaagaggcacaataaagttgacaacccagaagctgaccatctatcttctaaatggcttccaagcagcccatcaggtgttgctaaagctaaaatgttcaaattagacactggaaagatgccagtagtctatctggagccctgtgctgtcaccagaagcacagttaagatttctgaactccccgataacatgctttccacatctcgaaaggataaatcttctatgttggcagaattggaatatttgcctacatacattgaaaattccaatgagactgccttctgcttaggcaaggaatcagaaaatggtcttagaaaacattcaccagatctcagagtggtacaaaaatatcccttactgaaagagcctcagtggaaatatcctgatatatctgacagcattagcacagaaagaatactcgacgattcaaaggattcagttggagactcactttcaggaaaagaggacttgggcagaaagagaacaactatgcttaagattgcaacagccgcaaaggtagtgaatgctaatcagaatgcctctccaaatgtccctggaaaaagaggaaggccacgaaaattgaaactctgtaaggcaggacgaccacctaagaacacaggaaagtctttaatttctacaaagaatacacctgtaagccctgggagtacctttccagatgtgaagcctgatctggaagatgtggatggtgttctctttgtttcctttgaatca

SEQ ID NO: 1883 - DNA, 1270 bp, Homo sapiens
agtttagaagattcactatcttgtagctcaatattcttggccatttttagtgtttttatggagattcataaatctgtcctagatttctttaagcattttatgttttcttatttctaggtggaaattcagaaagttcactgaaaaatcgttctgctttctgtagtgataagctagatgaatacttggaaaatgaaggcaagctgatggaaacaagcatgggtttttcttctaatgctcccacatctcctgtggtgtaccagcttcccactaagagtaccagttatgtacgaacacttgatagtgtactaaagaagcaatctactatttccccttctacctcttattctttgaaacctcattctgtaccccctgtctctcgaaaggcaaagtctcaaaacagacaggcaactttcagtggccgaactaaatcatcttataaatccattttaccataccctgtttcaccaaagcagaaatactctcatgtgattctaggagataaggttaccaagaattcttcaggcatcatctcagaaaatcaggcgaataactttgttgtgccaactttggatgaaaatatatttccaaagcagattagtttgcggcaggcacagcagcagcagcaacagcaacagggaagtcgccctccaggcttgtctaaatctcaggtgaagctaatggacctggaagactgtgcactttgggaaggaaaaccaaggacatacatcacagaagagcgagcagatgtatccttaacaactctacttacagctcaagtaagtagctgctgttttctggaggtatattagtgcttggctagaaagagcgaggttagtgaggggaaatgggaatggtactttttggcagggtgatcagctagtttttagcatttagaaccttcatgggaactaaggctatgtcttccccatttgttctttaccaactagatactcaggtgtagatttctcctgccatcagagagagagagtacaattgcacttttgaataacctctctctcctgtataaaggcaactgaccattctgaaaatctctgatttcattttccaacatatgggcaagtacattggctgatcttgttaaaacaactttgaaaattgtgcttttattttttattttttgagatggagtctcgctctgttgcccaggctggagtgcagtggcaggatctcagctcactgcaacctccgcctcctgggttcaagctattctcctgcctcagcctttcgagtagctgggactataggcaca

SEQ ID NO: 1884 - DNA, 1198 bp, Homo sapiens
ggcatcaagtattagggcactaataaacaacttagtacagggatagacaagcgttgggccaaatctggccatgcctattcatttccctatttgtggctgcttttgtactactatggcagagttgaataattgaaaaagagacctcatggcctgcaaagttgaaaatatttactatctggacctttaccaaaaatgtttgccaatccctgctttagatggttctaaaggaaagatatggtagttaaatatttggaaatcatttacccccttatacatagaagaacacacatgtttagaaataaagattcaaaaaaaaaaaaaaacaagccacctccaggaatttgaaagactttcttgtgggcgaggtgacagatgtattctgtggggtctcagaaggtaagctaggtaggctctgcgaggggaatgttatatacaaggagcaggatttttgaaaaataatagaatgagctgcctgagggactccctgtctttttagctattcagtcaaacgccaaaagataagtgattctagaaaagaccagggattctacaataccatgttagctagatgactcaactgtcccttcccactctaaactgaacagttctgtgtaggatacaaactatagatcatgttaacaaacaggtatattggctgtcaagtctttcaaagtattagagagaaggtagaatcttgtcatgttcagctatagttgcccttagttaagagttgtagcatctgatgaatgagaaggagcccaattgtgaacattcacaacctttcccataggagtcctgcagggaggtcttggaatgaatttgccaggcaatatatatttcacagacaacacagggcagcattcttttattcagcagcaaatatttattgagatctgtctatgggccaggtactattctagatgtttgggatttattaatgaacaaaacagacaaaatgttgttccctgtggaacttatactctagcagtggagcagaggacagagcatagataataaacataatttttaaaatgaggtagcaatggtgacagctattatatagacatcatcaatgtaggagtgtcatgaccaaggtttacttcctagggatctacggacatcctcttcctttggaatgacatgaatgagccttctgtctttagagggccagagcaaaccatgcagaagaatgccattc

SEQ ID NO: 1885 - DNA, 1307 bp, Homo sapiens
attagctgggtgtggtggtatgtgcctgtagtctcagctactcaggaggctgagacaggagaatcacttgaaccctggaggtagaagttgcagtgagccaagatcatactactgcactccagcctgggcgacaagagtgaaactccacctcaaaaaaaaaaaaaaaagagttaatctaggagataatgaatggcctagtactagataatatatggccccacaagctcttgacttctgtccttggggaaagccattttgttaaccacactagtgagatttacatgatgcttaatggagaacagagaagatcttgttgcaaaaggtgtattaaatatttgtgctgtttctgtatgagattgagaagcttttcccacctctcacccctatttcctataaggatatccagagaagccaaactgttctgtgggtttgggaatggtcatttcccgggaaaatgcatctggatcgatgactaaacctggcccttttctctgggctgtagtgaagccgcattttcacgctggctggcagtgtgctgagagcctcgaatgctctgcggcgtagtgcccttctgccctgcctgacgatgtatcgaaaagatgagagtgaaggagactttgtgcagcaggaaacgggtaggtgaggtgttgggcagttgtgggaacttctgagagtattacagagtggtagaatcggtaagaactctgatttggacttcgctttggtggaactgtgtgcctatacctgcctgtgtgtgtgcaagtgtgcaggttcctttgtatgtatgtgtacgtgtgggaacctgtgtttgtcatatttttcttcatttcacaaaggctttttttgaagcagtggcagtatgcctttgtttcaagaacacatgaaattcttttaacaccagattagtgtgttaccccaaatgaacggttctagccctctattaagaaataaagggaccataagcattttggctgcttatggctgtgtgttactacttacaagagtcttgaaaattatacagaactttgccttctttttttaatgtcttccacaatgttgtgactgattataaccctgtttcccctcagagaagagctatggctcagggatctgtgttgactctggcatttagtggctttgtgaaggaaagaaaccattaaatgacctgacaaaaactgactcatgtctttaaagtagttgaagccacttttagaatgttactctcggttgcttttgtctaattctaatggcttaaagccaagaaaaccatagtataaatctttttgtgtacctatgctagtgtttaa

SEQ ID NO: 1886 - DNA, 1196 bp, Homo sapiens
tctagttttcattctcataattatccccagctgacgtttaaaaagaacaaagagtttctggggagtatgtaatgctgctgttatccctggagaaattggactccttcttagtgctgcagggcatatggaagtgagatgttagcaaagctcatcggtgttcttaggataagccctttgggaagttgtcagagactgagctgctcagacagaaaatttaaagtagcttattttctggtatacagggtataaattttcttagtgaaagtgcctgaggcagaagtggctggcaacttttaccttagcaagaaaactaaacaccaaatggctgtatagatcctcccattagtcagaagcacagagagaggttggaggtcaggaagagaccagattgattaaaatggtcactatttgagtagaactgatctgatatatggattggatgtagagtgaatagatgaagctagaaatcaagtagtagagcttagggtcgcagcagagggttaaaggacatgactattagattgaatcgtagacatggagatgaatgatgaactcatctgaagataggattgctgattttttttttttttttttttttttgagacggagtcttgctgtgtcacccaggctggagtgcagtggcgcgatcttagctcactgcaacctcaacctcctgggctcaagtgattctcctgcctaagcctcctgcatagctgggattacaggcatgcaccactgttgggaataatgcttaaaattttaaggaaattgaacacttaaaggatttttagtaaagcaattttacttttgtgcagaggggtgcttctccttggccagttgccatgagaacacatctgaacaaaggggcatgagagcctttatttctgacacaagtcctgctcctgtaccctttctccttccccattggctggggttgggtcgtacattctaaactaatcctggttggctaaacatctgaacctttttggataaggtgggcacataagggagaggggggaaggggtgtctgcaatgagctagagagctagtttttttttaaataaggaaaggaatgtgagctggtactgataacgctggtactgtggcatgtctgggcatgtaataaaggcagaaaggaagaaaaaagagaaaaaggaaaaaaaggggtggggggttactatgaattgaagaataaa

SEQ ID NO: 1887 - DNA, 1206 bp, Homo sapiens
actggggtgggaaatccccaagaggagagaactatagaaggggactctcatatttttgaggtccacacaagtcctgggctcacctccaagctgcacatgtgcagaataggctcaaagaggcatagccaaagttttgagaagtaagcttcatttaaaccatcactcaagtcccaggctaaccccccgaggagtacatgtgctgggcagatcaaaacaccacagcacaggctctgaaaactaacattggaatcaccatccacagaggatgagacagaactggttgaacctgagtttattgccttctaaaacactttaaaactgttcatgtttccagaggtttttaacaggaccagaacctcccaatgtaatattccaaatatacaagataatatccagaattacttgacatacaaagaaccagaaaaatctgaccgattctcaagggaaaaacaaccaaatgccaatcctgagatgttttaaatgttaaacttatcgaagagttttaaagcagctagttagccttaaacataaggtgaaggtaaacactcttgaaagagttgaaagatagaagttatcagaaaaataggaactaaaaaaaccaaccgtatggagataatagaattgaaaaaatactggatgaaacaaaaattaactggatgtgctcaatagtaaactagaaggctgagcacagtggctcaggcctataataacagcactgtgggaggttcaggcaggaagatcacttgaggccaggaattcaagaccagcctgggcaatataataagaccccatctctaaaaaaataaaaaataataataataaaaattagctctgtttggtggtgtgtgcctatagtcctaggtacttgggaggctgaggagaggatcgcttgagcccaggagtttgaagttacagtgagctataatcatgccactgcagtccagcctgggcaacacagcaaggctatgttgtttcaaaaatacatatactagactggagatgaggtaaagtgtccatgaatgtgaaattaggtcagtggaaattattcagtctggagaacagacagaaaagagatgggggacaaaaaaatatatccttaggggtctatgggacaattttttttttcaacctgacatttgtgtcattgaagtcccaaaaggaagggaaaaataatgcagaaaaaatatttgaagaaataattgtttg

SEQ ID NO: 1888 - DNA, 1185 bp, Homo sapiens
gggggctagctccttctctcctccattctcgcttctgggcctcacctcagcccaggttctcttcgcccactcagtcctgacttcacgcttccacctccagctcaggcgccccctgagcccggctacccctacgcaggacgagctcagggccggctcccagcctcactgcgccccatttcccgccccgcccgacccccaggtttcggctcaccccgggacccggccctagcccctgcccccagcccaggaccgggcccagccacgctcgcccagacactcgccgcctcggccccgccccgcgctccggccactcggcggtaacgagttggtcccgcccgcccgacgaaggcgacgcgcagccaatcagcggctgccacacagcggcccaagccgggtttgggggttgggacctccggctgcaggtccgcctgggccagacgcgcgagcgcaagcagcgggttagtggtcgcgcgcccgacctccgcagtcccagccgagccgcgacccttccggccgtccccaccccacctcgccgccatgcgcctccgccgcctagcgctgttcccgggtgtggcgctgcttcttgccgcggcccgcctcgccgctgcctccgacgtgctagaactcacggacgacaacttcgagagtcgcatctccgacacgggctctgcgggcctcatgctcgtcgagttcttcgccccctggtgagtccattctgccgaggcgggggaagaaaggcggggctgggccgggggcgagagcgcggggaactgttgggcctacgcagcgccggggcccttcattcctgtgggcccctgctgcggcgggcacatttctcattcccgggagctggaggcgcctcgccgagagcgggggagtcggtgctgatcggcccaaggaaaacccgaaggctgcgctcacgcagggcctcatccttatctcggtgctcttgtggcacttcctatttgcagagggttttgccaccccttcccccagtccaatatgtagctatatcttttctgcgtgagtcagtattaatgctcctccagtctacagactaggcatcccaaagccttgtagtggaagcggacgtttcaccaaatgcagaagtcctggatccctagggtatttcctttcatcttacctcacgccgcacagccattggtttctagccaaggtcactga

SEQ ID NO: 1889 - DNA, 1196 bp, Homo sapiens
acatagtccttgctacctggtaacacttgtcatcgtgaatccatgcatgaaccgcttgttttgttggccttttagattattgggaattgtgggtagcggtgcagtaactagacctgcctttcccataggccatgtctgtgattggagacagaaggtcccgggagcagaaagccaaacaggagcggtaagtcttcaggggcagccaactttaacagttcttccctccccggtccccagacaaaaataaaaaccattattaagcctttataccgttcttcaaatttatcaccaattcctgcagatctaggcgccacaactttactcttgttagcagaaggcctcctggcaacacctgctgccaagactccaggggaaaggagtattagtgggagtttttattttcaatcaagggtttatcaagatttatttacagggcacttctgggaatgacccttcctgggagtttatggtgttggttgagaatgaggactaatatatttaaatatttttgcagggagaaagaactggcaaaagtcactatcaagaaggaagatctggagctaatagtgagtggtagtgcctaactagtgtatgcggaggggaggctattctgcttaatttgggttgtttcctgaaacaagcggagtcagtatatttggtggcacattaatgcctgggaacctatgtaacatgatttttttctgcagatgactgagatggagatatctcgagcagcagcagaacgcagtttgcgggaacacatgggcaacgtggtagaggcgcttattgccctaaccaactgatgcgtgctttctcaaatatacctactggattaatttatggcaataaaatttttttttgtctttttcagttttatcatcttgggtcaagtagagtgtatactatatcctatgttgtggagaatttatatgttggagactaactgaatttaagtgacccattaaaatctagcacacctgtatgaaaaatcagtgtagaagaatacctcatgtgcagatgctaggtggcaggccagtctcattcatctgactagctctcaacagtattcaaggtacatctggagtctcagcagagttactgtactcaaatggcatgtgtctccaagacagcttatgaatatctaaaaggccagctacctgcctaggagccactatatatatagatagatgtaggtt

SEQ ID NO: 1890 - DNA, 1196 bp, Homo sapiens; identical to SEQ ID NO: 1889

SEQ ID NO: 1891 - DNA, 1219 bp, Homo sapiens
agtgctgaagccttggtcacccaagcgttccctctgcatgatggccgtgctcccagactatccaaaatgcagcagcgcatggaaagagactggctgctgaggtgttattggtttgcaataccctgataaggagatttcattcccttcttgctggcagagttatatagagtaattacataagtactgctgtgacactgggcggaatctcattaaaaactgtataaagaacaattgggttgtgctagagaatattcattttatttcagttgagtataatccctgtaatagaacattagcctgagcataaatactggtgttgctccagctccctgatagaatgtatttgggatgtatatttagtgcagcatttgcttatgtggggcatgacagaaaatcattatgaggcaggtccagattttcccacctggtgaggaagttgctcgctgtgctgagcagatcgttgtttgttttttacccctcctaggagagctacttgttcagcttggatgggacagtctatggcagtttgaccacatggcaactctgaaacacacacacacacacacacacacacacacacacacacacagacacacacacacacacacaacacacacacacacacacatgcacatacagactcgggcccaaaaaaatgtgtccccttagcaggtttagccttccacccaagatgtaagagaggcctggtcaggggagaatttgtcttgtgttgttgttcgttcattttcagaaaagtagcaggcaagtccttgtttaatgtaaggttgtttttggttgatggcatgtgaattgtcccttcagccttgctgagcatcactcatcacaacaaacaagagctatcctaagtagtttgctaatacagcagtttaaggctcaaaagcattaaaggacaataacatctaatacagttataccactgtactgtgcatgacttactttcacacatattatctggtgtgtggggaattcagtaatccattcttaattatccagagcataatctgtttggtatttgaagtctaagagcactatgaattattttctttataaaatatttttcattatagttctagtgttctatagcattatagggcaactacaatcaacagcaatttattatatattttcttttcttttttttttttttgagatggagtctcaccctgtggcccaggctggagtgcagtggcgcgatctt

SEQ ID NO: 1892 - DNA, 1185 bp, Homo sapiens
ggttttgatcacaaggggaaatttaagattgttaaccctgtttttcagaagggctactgttaattgcacataaacatgaaatgtgttttcccctgtgtactaacacattctaggcaaaattcaaacttatagtggtaaagaaacaggttgttcacttgctgaggtgcaaaaattcttaagacttctgtttgaaattgctcaatgactaggaaaagatgtagtagtttactaaaattgtttttctaccatatcaaattaaacaattcatgcctttatagggtcaggcctacaatgaataggtatggtggtttcacagaattttaaaatagagttaaagggaagtgatgtacatttcgggggcattagggtagggagatgaatcaaaaaatacccctagtaatgctttatattttaatactgcaaaagctttacaaatggaaaccatgcaattacctgccttagttcttttgtcataaaaacaatcacttggttggttgtattgtagctattacttatacagcaacatttcttcaattagcagtctagacattttataaacagaaatcttggaccaattgataatatttctgactgtattaatattttagtgctataaaatactatgtgaatctcttaaaaatctgacattttacagtctgtattagacatactgtttttataatgttttacttctgccttaagatttaggttttttaaatgtatttttgccctgaattaagtgttaatttgatggaaactctgcttttaaaatcatcatttactgggttctaataaattaaaaattaaacttgtttcactgttttgctgattctaatacatacacaaacatcacacccatgatgtaaatacattttaacactaaaatctgagtaagtttagcactcattttaagttaagctaaactaaaaaaccaaatttttttttttgaaacggagtctcactctgttgcccaggctggagtgcagtggcgcatctcagctcactgcaacttctgtctcccggattcaagcaattctcctgcctcagcctcccaagtagctgggattacaggcacgtgccaccacacctggctaatttttgtatttttggtagagacagggtttcaccatgttggccaggctggtctcaaactcctgacctcaggtgatccacctgccttgacct

SEQ ID NO: 1893 - DNA, 1211 bp, Homo sapiens
gccaaaaagaagaagaaaggtgtggttcctggagggggattaaaagccaccatgaaagatgatctggcagattatggtggttatgatggaggatatgtacaagactatgaagacttcatgtgacattttatcttttcttggtgtcatctttatgttgcccacaatcccttgaacatgtagcacaacttcctttcctttcagttctgccaaatgctacaatcagaagtgcagtatcttttgtgctggttatttaaccccttgacacttaggtgctaatgtgcaaatgagggaacttggatcttgctgccaaggggttaaaattgggaacctaagttgctactaaatcatagttcaaaacctaataatgttgtcgttgttgctatctgatttcatagcagcagtcactaaattggaaacaaaaggttgcaacgtgacaaaaaaaattgtgtagtatttaccagcaccattcagtaatacagccttaaccatacctccttgaactacttcataacttgtcaagaaaagcagtttgcagcaagggcatgtggtgtgcacctagtattaaaattgctttgtcttaaaattgaacatgaggatattaaaaatacattgtgaagaagactgcttatctcagagtgaagatactgcggctgaaaagcactagtttgatataaaattaaaatgaccaaaaccctccaactttgaagctaaagaaggtaaacctttccattattgcattacatgttgtggaatctctcgagtgcaaagactgtctagttatttatcaggctatttctactgatgaactgcttcaggtgggggagggaaacttatttttatttgcctgatttaagtgtctgagaaacaaatctttgttctcttaggctgcaatggaacaactttaccagggttttggcatttcctttcctttcctttataaaacatgctcagcaaactgcaccagttaactacagtttggtaaattgttatgttaacaattatgacatctgcaatgttttataaagcaactaatttaataaaatcactgttgtgaggacttaaattttgtgttacctcccaagagatactttttgagagtatagaacacagctcttgggagtacagttctctacgttctctactaaatcttaataaatgcttgacatagttacagctttaaaacatgagtgatttgccaggtccttatgttg

SEQ ID NO: 1894 - DNA, 1175 bp, Homo sapiens
gtacaagaaaacagacacctatgaaatcatctaacctgctagcatgtcctttagacagcaacctgtctgagggtccttcagaagcacatttacaatttcataaaacttgtgttcgtatgccaacttgtaatacaggtaaacatcttcacaatatgtgagtaatttcttcaggttttccatgaccatgtcagtaggctgatgttgtttatatctagataaagaaacataatgtacaggttaagatactgttttttgttttgttttgtttgagacagtcttactctgttgcccaggctggagtgcagaggagcagtcttggctcactgcaacctccacctgctgggttcaagtgattcttgtgcctcagcctcccgagtaggtgggattacatgagtgtgtcaccaccctggctaatttttctaattttagtagagacagcgttctgctatgttggctaggctggtgttgaactccgggcctcaagttacctgcctgccttggcctcccaaagtgctgggattacaggcgtgagtcactgtggctgcccttttttttctctcttaaataaaagatggaggtctcactgtgttgcccaggctggagtacagtggtttttcagagtgtgaactcctgggctcagctgcttctcttgcagcctcccgagtaactaggactacaagtgtgcaccactgtgcccaccttaggatactgtattttgagtgagggctgtcagctctgaagtaccacttactattacctatagaggagagggtgctggagtctgggttatctcagactagtattaggggtgcttgataaaatatttctttaaaaatgagtatgttaatgcttaccttatagagtaagtttagtactccaaaaggcacctctgatgttttagtgtttttcgtttctttttttgagacaagagtcacactctgttgccaggctggagtatagtggcacgatctcagcttactgcagcctctgtccccaggttcaagtgattctcctgcctcagcctcccgagtagctgggactacaggtgccagctaccacacccagctaatttttgtatttttagtagagacagggtttcaccatgttggcaaggctggtctcaaactcctgacctcaagtgatcctcccgcctcggcctcccatagtgctgggat

SEQ ID NO: 1895 - DNA, 1200 bp, Homo sapiens
tacagatttgagatatgggaaaggtgaagttgaacaaggacaaatatgccatattttcagaaagcagtctgttgctgaggtagaatggaggagagagactctgcattgcaaacaaccctgcagtgttgatcatggggaaaaaagaacccatgcaaacattgttttataaagaaaatagcctcaaatataaccctgcctccatcctcatacaagtctcttgcaaatagctgattcaggaagaactcacctcattcaaaggtgtttaaagaaatacaaaataaatagcatctataaaacaacaaaatgggagaaaatgtccaaagcaaagcacagaaagttatggagttagaagatatgaaaaagaaattaatagaaataaagactggagtgagaagcgtcaacatctgtctgataggaatttcagaaaaagaggctacagagaatggttgaaaggcaacattcaaagagaagatggccgtattaggtccagacaggcaagacccaggtttggggagatcaggcatcagcaatagggaacacaggctatgtgagaaactatggagcaaagggctacagactcaatcaaaagcattttcacaacaaaagtgagaatgtagacatggaatgagggcaatataaatagttattaatgagaatggaatttgatcatgaggcaaagaatgtttagccatgttcccctggctagaataaatctgaatataagggaaactaagcccataaggagaggtaaatgtaaacttctaacgaggaatgggcagggttaggaatgaggaacagagcagttctggatactccaattctcaagtggatatatagcagatggaaattgctctggccttcaggatagagttctttgaattccctgatttcaccagtgacttgagtgtcagagcaagttcgtactcctctgagctccagttttcctctcaagaacagaagagtaacctctggacaaactctcagggattttgcctcagaatacatcttctgtctatatttaagttttttatccttcagaggaagatgatatgcaagttgaaaagtagaagctagggacttctagttgcactttgtcctggtcccataaatgtagtggaggtccagatgtgagcagctcttgggcagagcctctatgttattcatttctatgacccaggaagtatgggcatagaaacaaag

SEQ ID NO: 1896 - DNA, 1199 bp, Homo sapiens
gtatgagaggctggaaggaagtgggtgttgggaacatggggagatgcgtttgctgaatttttttctacgtggaacctggttctagggtgtccacaatctccacagaggcggcattgggtcaccgctggaggatgcagcaggagggaggacccgtgaggagcgccccctgtaggaccggaaccctggagggttcgcggcaagggtctccggggcataggaaacgggcatcccccaagggtagtctgagttccgcccagccccattcctggatgctcacgccgtctcccctaaactcccactgcgctcaccgggagcccatctcatcatcaccacagcccgtggctaatgggccaaaacagaagaagaaaagcaactggcggagtacaacgcgcctgcgcattatcagactcagggacaggctggaacctcgccccgtaagtaggccatttaatgacgcgcaaactgggaaggcctatgactgttgaagaggataatcagaagccaacccctacgggtccccggtagctcgccgtgatcgtatagtggttagtactctgcgttgtggccgcagcaacctcggttcgaatccgagtcacggcattgtgggaacaatggcacggcaaggggctcggtatttttttccccttttttgtaacattttatataaatcgtaattcactttcttgaaacgaaccaacgtttctctcctttgaaaactgaggcactccgaggaccgccacctacagtaactctcatgtaatgctctgatacagcttcaacccagccgttataatccctttcttaccaaatatagttgtctgaataattccacaccagcaaaacagctcccctatgaccctgtgatttttttctcttttcatgtacatttttttattgagtcatttatttttatttttacttatttatttatttttgagacagtctcccctgtcgcccaggctggagtgcaatggcgcgatcttggttcactgcagcctccgcctcccgggttcaagcgattatcctgcctcagccaactgagtagctggtactacaggcgtgcaccaccatgctcggataatttttttttgtttgtttttttaattttaaaaaaaattgtttttgagacggaggctctgggtcatttatttttaaatagggaatacatgcacaaaagtctagtaaaaagtacagctctt

SEQ ID NO: 1897 - DNA, 1166 bp, Homo sapiens
tggctgtacgcacggaccgcaaaagaagggacatgaaagtgctttgcaaccaaaggattcctatgaggccgggcctgcaatgatgtgaagcccctgaggacgcccgaatggtggcccaaagtctctctgacgctcaccatgccctgactatcatgctatctgaacgactttggctgggactggagctcttaaattttacaagaaggaaaatcagttctgacccaccaccatacaacttccttgaggcgcgaggtaaggggaaccccaagagcagcctccacggtggagaaatcggccaccgtgtctggtgcgcaggcaagtgtggaccaaaatcgagaaagcagagattaatgctcttgcgtgccctcagatggctgcgagggtggagataggctagaacaaacaatgacaaatcaatgacattgcaagggggcggggctttcaacagagaagagttcaggcgacaagccgaggtcctgtgtccctagtagctcgccgtgatcgtatagtggttagtactctgcgttgtggccgcagcaacctcggttcgaatccgagtcacggcattgtgaggacaatggcacggcaaggggagtttgttttattgtaccaatccgtttttaatcctgagttcacaacattgtggaaaatggaccccgattcccttgtgacatttgagagcgacgtttacgctggctctggctaaattggactttggaaagatataggcttccgggtcctctgagcctgggcgcgttcttgaagacaaagcacagaccactcgccagtttaaaaagtgttgtagtagacatacgtacaaatttccacagaagcactgggagcggattcctaatgataggaaaagaaggcttagcaaaggaagtgaggatcaaggtagctcttaaaggcacagtgagaatttgtcaggcagccaggatgatttcgtgtacagaggcttgaagggagtcttgaaaaggaaaaatctttttttttttttttttttttttttttttttttttttttttgagatggagcctcgctctgtcacccaggctggagtgcagtggcgcgatcttggctcactgcaacctccgcctcctgggttcaagcgattctcctgcctcagcttcccgagtagctgggactacaggcacccgccaccaggc

SEQ ID NO: 1898 - DNA, 1197 bp, Homo sapiens
agcctatctccaccctcgcagccatctgagggcacgcaagagcattaatctctgctttctcgattttggtccacacttgcctgcgcaccagacacggtggccgatttctccaccgtggaggctgctcttggggttccccttacctcgcgcctcaaggaagttgtatggtggtgggtcagaactgattttccttcttgtaaaatttaagagctccagtcccagccaaagtcgttcagatagcatgatagtcagggcatggtgagcgtcagagagactttgggccaccattcgggcgtcctcaggggcttcacatcattgcaggcccggcctcataggaatcctttggttgcaaagcactttcatgtcccttcttttgcggtccgtgcgtacagccaagaggagacttcgggctagggagtccacagcgctcccggctgctcttgcgggtgaacgtgggtgcgggaggaacctggtagataatggacgcttaggaaagctggaatggccgccatctagacgagaagggcaacactgggtcagctgctcgtcgtggcgtcccggtagctcgccgtgatcgtatagtggttagtactctgcgttgtggccgcagcaacctcggttcgaatccgagtcacggcattgtggaaacaatggtacggcaagggcctctttttagacttagaaagccacacattcttctgggaagctaactctaaaagctgttacctggccagggctgaaattataacggacaatgaagtgtgcacaaaaagttcggtgcacactctggggctttcctttctcatctgctagtgaatcagtcacccccaccttccccaatatgtgattattttatttttgtgtagtttctgtgtggtactctttattttacccttgtgaatgaccgaatcatatattggatcctctaaaaaccttcacactagctaaaacatcaatactttgggacaaaggggtgataggaacaatgtgcaaacattaattaagggttagaagaatgcagattagaccatacgctgaaccgttttgcttcagatcccgtgacaagtgaaatatatgactgcactagaggtgctggttccagtagccactatgaggggtgctaatgagaggtttgtggccttcatctccacagtctcctaggtgagagggggttttctcctggagggttttccccta

SEQ ID NO: 1899 - DNA, 1149 bp, Homo sapiens
tcctttcctcattaaggaaaacatggcatgctgtgttggactgggaaataccgttggtagtggtgcttctctctatgggggaaggactgcaaaactgtccatgtttagacactcaggagtgctttgcaggcaagctaagaccttttccaagagaaagggtggtggtggtcaggggaagtaatatttattgaatgcctactaaatgccaggatcaaggtactattaatagtttttttcatttaactatctcagcgttatacctattatgtttgttatcattatctccattttataaatacggaaaatgaggctaacatttttgttcatggatctactgcaagtgaataagagaatacaaatttgaatccagatgtgctagctttgaaatatattctcctccagagtgttgatcttggctcacagatggaaagaaagctgcagaacaaattgttaaaatctggtaattcaggcacaaagacaaaaaccaattttaaatttctattcaaaataccttagatgaagtaaagaaggcaggaaacataatatttcttaggataatcatgtagctagcaagggtatgtgggctcttctttgatgccaagttgacgtgaattctaaactctttaccaagggaatctattaggatatttagggaagctttttcaaaacacttaagcttggaacctgttcctgaaaatcctgattttcccacccaggagaaataattatgctgttgggcagttaactagacattacagaaaagacaaagctttctttagtacagatcaaggtcctgatggagcttgaaggcataaaggtgcaattccaaatacctcaactgctgtagatgaaggggcagcatttgctctagatcctcatcacagcatttcctggtattctttcaggtaggtgaccaaagctcagcctgcagttcctctgaccaggcttccagctcaggtcctgcccatagaggtggtccacctgatgcagctggccaacttctgtctcctaccacaataagctctagtgaacccctgagcccagtagcctcttcatccaagcaagctctcaccagcttgcttctgtgactcacgaaaaggaggaaggaaagaaatggcccaccaaagagagatggtgatggagtccact

SEQ ID NO: 1900 - DNA, 1201 bp, Homo sapiens
aaacaacaacaacaacaacaaaaaaaacaaaaaaaacaaacaaaaatacttaataaagtgaacaattccaaacaaccagaatgtgtgattttcatcattattttggaggtacttaggctgtcgttgttacaaaaatatttggaaatgttgacttgaagtagatgtagtattgttactgaggagcagagaagttgatgcatttatctgtcaagcccagttcctacccaccttcttggtgcaaaaagctgccaaatacctcatatatgtataaggtgggtagtgtttggaaaggaggattgggaggtgccctttaaaagtggtatacacaaagtgcagacctgcagtttttacattccacaactgtgagttcttatcttttctgagacttaaagatttagcatgattgtcaaggcacattggatggataaccagccagaagctcagatgcttgcagatgctgctgtcagtttgcatcatcctttcgcagggggatggcgccctcaccccttctccctcctttctgcaccttggtggtggtggtggggtgggggtgttgggaatctccatgtgaaaggacgtggtgaagactggcagtctgaggttgggcctcagaaggagggcagtagataggactcttaaccaagttatcaaggacctgcggtttttcatttgcgctgtccaaatcccctttctcagtaaatttcagcgttttctcctcccatccttgtgacctggtgtggaagtggagagaggtggtgggtaagacaactaccttggcatgttctggcatcctcagacaggcctgggattgagccccgtctctgccagctacaacttgtagctgtttgacctggtttaagttatttatccccactgagacttactgcatctgtaaatggggcataataatgtatctactgagtagtgttttcaagacttagattaagtaatatattttaaatatcttatgaaaacatacacagaacaaaaactaacaaaaatatactttccactaccttctttttgatttataacaatttattaacaatgactctgacttccttctatatcacactatccttatctataaaaaagggtaaactaaataacttataatgcttgcacactagtaaaggctgaaaattcttccacttccagtgctataaccaagaaataaatgaggttgctatgtatattctaa

SEQ ID NO: 1901 - DNA, 1178 bp, Homo sapiens
ttaggggacacagaataaaccacaaagtgtgatatcacagtaaatattagaactaagaggattctcttactctagtgtgctcattaaacatgatattgcaagcagagctatcaatgaaggaatcttgtgaatgattccttctgtggactttccaatcctgaagtcactgacagatgtcagttttgaaaactgtcagttttggattttattggattcacatcgggttactttgaaatagtgactaaaatgagaagtaataaatttaagttcatagagttgttcatcagatctcactatacaaaagatacccatgactttaacaatctcagctcagttaccattagaatcacgtaaggagtattgctgtggtcctgagaggagaacatatataacatagtgggttgttctttatttgctatggtgcaatacggactcagtaggaaagcaactgaagggtgtcataaatttatgctgcagatttgcgaatgagctactgttatgcgaagtttgaaggaggaaagtgttcatcacccaaatccagaaatcactccaagcaggaatgctgctgtgccttgaagggagaaggctggggagacccctgcgagctctgccccacggaacctgatggtatgtctgtcatctgcatttctctctgggccatgcagggtgcagactggccatgatgtaagtaagactgtaggccttaaagacagtaacacaatttaatttaattgtaagtctaattagaatgttcattaaaaattattttatctcaggagcttggtagttattttctttttaattatgtcatgaatcacagatgcccaaggagtagacacaacatcttagggagtctcgttaaataacttcctctggtttctgggcttgttttttccatcatttatcaatatgcacagcatgtagcaattttctacctcaaaatacttgtggagaagcttgtaatgaattgctattgttctatctattaatgagtgtctccaccacagaggccttccgccagatatgtccttatggaagtgggatcatcgtgggacctgatgattcagcagttggtcagttgcctgtgctggattctcagcatttctcagtattctcaatctgcttcttctctagttattcttatttttctccatctatcttggaaaattaagtgctac

SEQ ID NO: 1902 - DNA, 1632 bp, Homo sapiens
ggacccaactttccgctatcttttgggttcattccaaatagttttgtgccattgaaaaacttgaccttcaaaaaaatttgtttttcagaatagaacacaataggacagtgactgcacagttgtgaaaaaggaagagaatcattaaagaaaaagaaaaaagattttaagaccgttgaaatcaattatcaagaacgtcctaaaacacctatggctttgactttgttattgatccagattattttccttgcattggggaaaatatctttcatatttgtttgctgtaaagatggttttgcaagaataagtcatgaccaagacaaactgccaatacaaaagcccactgatactaattatataatgagaaaaaaatgtatccaactaggacacatatcttttgagttatttggactgaaagcttaagaaaacttggaaaattctattttgtgatctagtcaagccacagttatcaaaggctacattttcagtgtaagataaatggatgagtaaactcaaatatgtatcacgtgtgctttgtatcttaagatgtgtttccaagagcatctgaaattttgtttgtacatgtatcttgatcatttataaagccactgtgatctataaatcaagaaaatccattgtcataaccatttttaaaagtcaaaaattaagacatccttaattaaaaagtttcaaatctagacactaaatgtgtgtgaatgtacaaagaaaacaaaccattgcttatgctgttatatactagagaaattttgttttgcttgctgttttaacttgacagatgaaggactttagttgaacttcatattgtaagaactgttaataaaagttgtcaagtaaaaagcgctatatctaaaaagactttatgaacagttattctatcaacttttaaaggttttaaacctgcccagaaattaccttggtatctgaagtttccctctgtctcctcctctaattaagcttgttatttgtcatgcaccagcattggagataataaaatttcttgttctgtgtattttgtttggctaatagtattgcatacatactttctctgtatactactttctattgtatgtgttaaccagtattaagggaaaatgatccagcttcagctatctaattcacaaattaatttctggaaattaaactttgtaaattaagtttttgcctataagaatttgctggtctgggaaaacctgccctatcaatgagtatgttgccgtggttaccttactaagatgctgaagttctaggagagtaatgattacatcagaaggctaggttcagcaaaataagtgtatcagcaggttttatcatgatcagtaaaaatgttccaaatgcttctgctccattatagcagtaaagaacgaatatccaatgcaacaggacaattcagagccttatttattttatggtcatcctgtcttttggggagagagatctgtaaaagataggactgtgacaaggctgatcagaattgctcagacactagctgggttaggagggagagatggtggaagtaaaatgttggtgcttagacttaatcctactgcctcttccactgctttctcaattagcgtgcagctacggtcagatgagtgtggataggtaattaattgc

SEQ ID NO: 1903 - DNA, 1244 bp, Homo sapiens
tactaaaaatacaaaaattagttgggcacagtggcgcgcgcctgtaatcctagctactcgggaggctgaggtaggagaatcacttgaacccaggaggtgtaggttgcagtgagccgagattgtgccactgcactccagcctgggtgacaaagcgagactctgtctcaaaaaataataataataaataaataaataaatattttaggctttgtgggccatatgttgttttttgcatctattcgactctgctattacagcatgaaagcagccacagatagaacataaataaacattatggacattaaaacttgaatctcaaatcggcacatcatgaagtattattcttttaattttttttccaactatttcaaactgtaaaatctcttcttagcttgaagccatacaaaaccaggcatttggccagattaggcctgcgggctatagtttgccaacccttgctctggttgggtgtgagtgcttcacctttttaattcatttatctgaattattcttttagccaataacttaaacttctcatgtgtatctttccaactatatatatatatactttcaattttgccattttttttttgtttttgagactaagtcttgctgtgttgcccaggctggagtgtagtggcgcgatctcagctcactgcaacctccacctcccggattcaagagattttcccacctcagtttcccaagtagctgggattacaggcgcacaccaccatgcccggctaatttttgtatttttagtagaaatggatttcaccatgttggccaggctggtctcgagctcctgacctcagatgatctccctgcctcagcctcctaaagtgctgggatgacaggcgtgagccaccgccccggcctcaattttgccctactttttcaaacttagacactttcaaagttctaaggacagtacaaggagttcccttacatcctgcacctagattcatcaatttattttcatttgttctatcattctcattctctgtgtgtgcatgtgtgtatgcatttgcatgtgcacctacatattatttttattttaaaaactatttccgagttgcttgagagcaagccccttgagattttagttcccttgagagcaaggaccttggctagagttcctgatatgtttctgtcttaagaaaatgtttgctaatcagtgttctgattttatgaatattgttcccttttatatagtagggtacctttgtattctaatgttttag

SEQ ID NO: 1904 - DNA, 1120 bp, Homo sapiens
ttttggagaccctagaataaaaggcttcaatactctgcattccatgccctctgccacctgcttttttttcccctttgttctttgactcaaatggtattgagctgtttgttgtatatggaagcataggtgtctatatccttactcttttatataacacaataatggcgttttccttctaatttctcagttgttaacttctttctcttttttttttaggatagggccttgctctgtcacctgagctctagtgcagtagtgcaatcacagctcactgcaaccttactcctaggctcaagttaactattcttgatcctttattattactaatattctacaattgtttaaataaaaggaactttataatgaaacggttcggaatactggctcaagaacctatgtcaagatgagctgaattttggtaaattattttaggaattatgacaagctaattgaattaggcttgtgacaattagagtaatttacatgacaggtaaaactcctattaaaaatgtttagatgtttgcttctgtagatgtcactttagtaaaataccaatttagttttacttgtggcttatctagttagaacttagcagactttactgggacaagtttactgctcttgtaggagctcctctcacaagtagttgtaatgctgtagcatgatactcaggatcagtagcttgagatgctactatttttctcttcatctttgacttgcagagagcctcccgtttttggatccaggcatcttttctgaatcctggttccatcagtatacctgctctcctatgaccccaaatcatagtcaatggtgcctcaaacatagcaccttaagttaaaggctgcctagtgctctgaggaaagcttgctgattatcttcctgatctactcaccccaaaaggcagaaaagcaacacagtcactgctgtggtcatttgtaatgtaaagatcagttatatatatatatttgtaatgagagcaagtatatactcattatagaatcaatttaagaagtttaaaataacccagagtagaatttctatatctagtcttggtttttttcatgaatatttgcaagtaattaccattaaattcacacatgaaagattaatctgaaag

SEQ ID NO: 1905 - DNA, 1099 bp, Homo sapiens
tgtcataaatcaggtctttgcagctaagggaacaaggttagcatcaggtatacacatggaagtttagtcttggagaaaaagagaatggagaaagaaagaaatttagagatgaagaaggaagtcaagggcatttatttcagtgcttttaaccagagttagaaataacatagaagggataaggatgtattttagaatggagtagtacagaaatgtcataaaagttactaaaaatggactttacaagaaaatatagactgtctcgatgggatgaatatagaggatttggattaagattggagaaggagcataatttatgcagtcacaaattgggggttggggaagagcctgtgagagaaagtctgaaggaaaggattttttgtttttgtttttaaaattggtccatgtaagagctaggcagattatcaggaaagtgagtttggttttagacacattgaatgagtatcctcctgggatattccagtgtatacagtggatgtatatggtttggaactgggttgagttcacccagaagtagagctctggaagtcatcagtaaacagataaatactaattaatgccttgggagtgtatgagctcatgcaagagagagtgagaagtaaaaagagaaaagcattgaaaacaccaactttggaaacactaacatttgggagacaaggggggaaaaagacgctgaaaagcagaatgtgaaggagtagtcagagaggtaggagaaaaaccgtgagagagtggtgttacagctaatgaaggaagaatggactaatgaggggtagataaatgaattttgtttttaatgtgtggaataaaatgtttctatccatgagatgtccatgattctttttctaccatattccctctcttggggaacatggccatctttatccatcccctactcccacgcaacactgtcccaaagtcctagaatttctgtctccttaatttttttttttttttttttgagatggagccttgctctgtctcccaggctggagtgcagtggcatgatcttggttcactgcaacctctgcctcccaggttcaagcgattctcctgcctcagcctccagagtagctgggattat

SEQ ID NO: 1906 - DNA, 1200 bp, Homo sapiens
gtccctgttttggaggagctaggagcgttgccggcccctgaagtggagcgagagggaggtgcttcgccgtttctcctgccaggggaggtcccggcttcccgtggaggctccggaccaagccccttcagcttctccctccggatcgatgtgctgctgttaacccgtgaggaggcggcggcggcggcagcggcagcggaagatggtgttgctgagagtgttaattctgctcctctcctgggcggcggggatgggaggtgaggcacgactgcgagcgccgggggcgccgcgaccacggcggagcggcggccgggccgagcggagcccagtcgcgcctcgcggcgtgcgcgtcagtcagcccagccggccagcggcgccactctggcgggccgcgctccccgctccctattgtcccccgcgccccgaccgctttcccttcggtggcgggccgaggaggctcccaagcctccggcgaggccttccccgccccccaccgccctggcggccccgggaggcgggggtcgcctcccagagaagcgaagtcggggcatccgcgtcgcctggtgagagcggtggaacccaggctggtggctgcatccctccagtctgctcggcgggcgccggtgcaggcagccgcagcgaggctggcggtctcgccgtcctcgttcagcgctcatcctgctcaccattcctcccccagcccctgcccggtggcggattccgaagtcctctccgccgccgagacccgccgcgcagactcgtgggaagttgtgttgtttgcagctgggctcgtgtattgttctttacccggcgcgccggtcctgaccgaccccattctgcagaggggccgcccgtggagtggcagcagtcatcacccgcttatctgagactagtggcctcggttcttcctgtgtcctgtgtttggagagagatcacaggagggtgtgttggtgttcttgaaaacattctgtcgcccaggggaaagggtttggtcgggagaagggtaaaccatttggggatgttctttgatttgtaggctggattgggtctcttagagtagaagttcggtccctgggtgacccaacttgaagagtttcgttaaactttcaggtggagtagatgtacagtgtagttagtggattgtcaaaacagtgccccctcccccctgcacatgaaagtcaaatttgctaaaagcatgtcatt

SEQ ID NO: 1907 - DNA, 1101 bp, Homo sapiens
ttgtcaaacttccctcccatccctcattattactctgcagacggccctcctaccccttccttattactctacaggcttttctgccctctcattattactccacagatgtccctcctacccctcattattactctgcagacttccctcctacctcctcattattactcctcagacttccctcccgtccctcattattactcctcacacttccctccgacctgctcattattactctgcagacttccctcataccctcatcattactccacaatcttccctcccaccccctcattattaatccacagacttccctctcattttatcaatcagttattactcctcaggtctccttcccattctttcattattacccctcagagctcccctttgcccctccaaaaatgttgctgtaaatattcttatacaagagtttatccagagcagtttctcaacatctgcactactgacatttgcggctgggaattctctgttgtgtgtgtgtgtgtgtgtgtatgggggtgggtgcgggaggctgtcctatgccctgtaggatccctggcctctacccactggataccagtgacactcccttcaccccactgtcataattattaaaaataactccagtgctctaaccctaatccagatcttctagctttaaagttattcttcctatatactatgctgccttaagtcaccattcatacattctttcaaaggtgtgtaagttcaacttgttcctatttagtgagatctttacacttatacctgaaacatttattaaatatgttcataaaaagcatttagcaaaaacaaaaaggaaaacggaaacatggagaacatttctttttttccacttcgcttaaggacaaaccaaagtaaaggctacattcatttccctacaaaacaaacttaagatttctccctcaagaagttgggctggacctcaacagggtggggctggctgttaggtctgtgcacatcattcacacctacaggagcaaggaggaaaagggagggccttcctggggcctgagttctggaaagaacaaccacacccagttttgagctgtgctctcaggagccacagcctgctggcct

SEQ ID NO: 1908 - DNA, 1208 bp, Homo sapiens
tttggaaggatatctgtttattaagagtaaataagccctgtacagaacacaggcgctaggttgagagactcgtcttttgtaggacatttcttcctgctaaccagttcctggagggcttgttttttttgtaactttacacaaggggcactaatggaaaatatagctttctcaagacatctgatgtcagtttcccattgttttgcttcacaaacatcaacaaagtaaacctgaacatgcttagcaatttcccaatgttctttgctgacattacttttgacatactgtgtcaaaattcttaaggtctcccctcctttggtaaagtaggcaaaaccttacaaggaaaacactataatacgtggaaatatactgagttagatttccagtcacctgctctatggctctgagatgcactatatccataatggttcctaggactgtgtccacctgatggtttggagtacggaaaaccaacccttatggcttaagagtcatctcccatggaagacgatgctggccttctgaacgctggggctcatgggcttgttgatgtggctttctggtgtgccaggatcccctggcagctcctgtatacttcagtcaagcagtccagccggggcttggcactctggaagacgggtactacttgggatatcccatgtggttccactggatccttcaataagatgcagaggtagtaaatcaccttctgcatgtaaatagcctcattgatgacaatatccttgaccttgcccatttctatgaaggtagtgctttcttagcctgaagcataagatgaagtcatctgaatgccaagggaatcaatgattaacagtctcctgatcaatcttcacaaaatggagataaccaagcagacctaagagggtgatgaagatggcagcagagaggatcatgctgttctcgcagagggtgaagagtccgtaggctgccagccacaccgtgcaggtgacagcggtgagcgaacgcagcgagagcccagggcagctgaggcagaattcccggcaggaagggaagtagtagcggcgctgcagggccaggcggccaccgcagatatccgaaaagctccgctcatcctccatgacaccccaactctgccgcccgcaccgcaccgcgcggcactccactgcgctcgcctgccctagccgtttcatgcaatatcagaattctaaatacttttagaaactctgcct

SEQ ID NO: 1909 - DNA, 1174 bp, Homo sapiens
ataaagtacacctagaagagggccaaacaagtgcatggtttgacattttgacttggggttttatatgttggcatacttctggggtcttacatctatctcttttcccctgattcttcccttggtgtgggctgtccgcatgtgcactggcctgccagcacttgggaggtgagcatgtacagtgtgtctactggagttgtatgaatgctcacttgaggcattcttcccttacctgttgaatgtcctgggaggtcatataccagctaaactctgccattttgcctctgaatgtgcatgcttgagccccctagaccaactcctgagatcttatcaggaggctgctgatcaccagattcagatgtttctatctattggaagactgcctttccctggcaccagctgagaccaattattattttagagagacagtatgacaactgcctgaccatcacctgatggtttcttgacattcctggtggggtggaggggagccgtttcctgccctgctcatgcctgacgagtgacctactataacacttcaagataggcagaaagtcagggaaagttctaaaaaggttgactagagtaagggagaggatggggagcctgatacactaaaaatcttagagtgctttagtctgagaagatggagaatgaaaggagaaataaccaaagagagactttttaaaatcataagagtagaggtaacataaacataagttttttcacaaaaagctagaatagggagggtgtagagacatgaatagaggggcaatttcaacattacaaatgaatatgtttagaataagaaactgctttccattgtaaattgatgcaaccaatttactcaatctccccattgcatgtctctgtcactttaggtgtaacccattcttctcccaaaatgtggttaaagttacaagcacagtcataggaaataaaaccatatcaaggattgttgtggtatttttctgttgttcttgtcaacaaaatgactcaaactctgtaaaatatttgaagagatttatctgagccatgtataagtgaccaatggcccgtgacacatccctctggagatccttagaacattgcccaaggtggtcaggctataagttggttttatacaatttaaggggacataaaacatcaatcaatgcatgtaaaatgtacattggtt

SEQ ID NO: 1910 - DNA, 9440 bp, Homo sapiens
actggaaccgcttgcctctcagggcgatatctttgagacattaataccgtgatccacaatgagaaaaacatattaattacattgtgaactagtacacacacacacacacacacacacacacacacaaacatttcatgtaaaatatttacccttcacttgtgatgcgtgattgtgtttgctctattatttaaaatacagattacgagccaccacattggtttcatgatctatttatgagccactcctcactatttgaaaaccttgtcctgggcatgaagtagaagcagcctttctgggggaccatggcccagcagtgggggaggaaggaagtgtttccacagtaactgatgttaagctccaggtgttactcattatgacttcagggaggaggagggggagggaaaataatgtaaatacttattatttataatcatacagtatctttatgccacttttagcacatgctcattaatatgctagtacatttagaggcacatctgcctagactggcttagaatataaattctgggatccctcttttgcttggagctgacatcagtgtgtaagagcccaagggtggcattctttcattcaacatatatttactgagtactttctatgtgctagggcctggggataaagcagcaaacaagagaggcgagctccctgcctttctggatcttatatttgagtggtggcatttctcttaagaagctcactgaaatacctgggtcacctcagaccaggcatttatggtggttctcttctaaatgtgttttgaacttggccttttcatctctctaccttgtatgtgccttcacctttcccctcctcctctgcctcacctagtccccatctctctctctgctcattgaaatcctaccatcattttcactccagataagatccaccttctccctcttgaagctcccagactcctgtttgttacagcagtcagtcatatgggccttgctcatttagtgaacatgtaacctcttcctctgccaggcctcttttacgctgtctgatagttattttccaggtatgagcctagtcttaaggagatcaagaccacagtttatgtttttactccatgcacgataccttgcataaaataggtgcccattaagcatgcagatactctcttccacattgtcctgcagaggtgtttgccttctcagtacaccagctaggcacttcccaactctgcaggcacatctcctgctgtcttatatttccaatggggccttcggtttggactcagctgcacttgtttgtgtgacttctgcctctcttgaatccactgatcccctcaattgcacgatcaggcctactctagtcttgagcaactcagaccaaagctggacgtgttgggagacaatatgtgtatgtggtttttacaagcctgctgggaggagtgagacagacctgggccaagacccaggtgtgtgctgtgctagccgtgtgaccttaggtaaattcattaatccctcagttcagctaccatgggctggatccaattaaaagaggacaaatcactgaaattcagccccatcagccacttgttgagctttcctgacgttacctcccatacctgtctggcttcttccttcccttttccctgtctccctgctcccactattcttgtactgccctctggctgccccatccaggcactgaggctggggttgctaccttattcccaccttgccctggtgctctcagagacttcacttttcaccaacccatcattccttgccctcccttccctttactcactttctcctttctgccaaaaaaaaaaatcacatcggagaagcttgtctgcaagggttccattcaacttgctgtacattaatgctccactatggtgacccactgctgagtctttcacttgtaatgtaatctaataatttacatgcactttgcaagcaatactctaaaagactcgcaacctgtttgaaattgctctgctgttacagtatttgagctgatgagagaacagcgtgagaaagagtagtttttggtaccacagtggtattaggtaaacccaggaaaataatgtcagcacaaggtgagggtgtgctgatggattataatatcctttcttagagaatcaattaaacttgcttagggtcttttatcgattttggcttataactggactaggataggtcaaagtattcaaggagtagaggcatagctggctaaaaatagtgaagcaagtatggaatcctgtctttctgagatggctgtgaaatgttttagttttgatatactgcatgacttttacagaattaattggcattgtgattaggttgttttatttcttcactcaaacatgttggaagccgattctaatatgcggtagtaatgaaaatagagtaatgctgtaataatagtgccattgtaaagtgaattacaccattaagcatctattttgtctaatttgtattgtggtagtgtgagtgatacacacacatgcagacgtagaggagctggtctttaagaaatagactctagctgagaagagaaaccccagtcctataatattgaacagtcagtgaacaaaaataattggttctgtgcaaagtgaatttatttatacatatacatatatatacacagccacatatataaatatacacacacatgcacacatacatattgtgtcaggcagatcaagaagatatatgactttggcataaaaaaatgcttggcttatgttgccttttaacaagttgattatgaatggggacacatattaattatgacaagtcaagtcaatgatggcatcaatgccaggctttgaaaacaaggctttctacgtttgtttcaacctcttcatccttattaccatgtctgagaacccctattaactggtatttctcaagttttggaaagaagtattaagggcccaggaatgatcattttattttgtcatttatctcctaaggaaggacatttgtcaaacaattttctttccacagcagaaagatagaggcacatttctatgccttaagtcacacatgaaccctaagagcagaaataggacctgagaaggcagtgtccaacatggctgctcccagtgggacaggtagatttaaaagtacaagaagggccaggcgcggtggctcacacctgtaatcccagcactttgggaggctgaggcgggcggatcacgaggtcatgagttcgagaccatcctggctaacacggtgaaaccccatatctacctaaaatacaaaaaaaaaaaaaaaaaaaaaaaaattagctgggcgtggtggcgggcgcctgtagtcccagctactcgggaggctgaggcaggagaatggcatgaacccaggaggcggagcttacagtgagccgagatcgtgccactgcactccagcctggggacacagcaagactccgtctcaaaaaaaaaaaaaaaaaaaagtccaagaaggtgttaaactttgatgacattccagtgacattatcccttcgcccacaagaggactggcttcaggggatagtttggcagtaattgtccaggagttttcaaccgttagggtggtatgggcagggaggtcctgaaaacttttacctggtccatctccagtctggattgctgcctccaaggccccctctctgcattctgccaccacagcatctagaaggggttatactgatggcctcccatctctcacctgcccccgcttttggattttgcttctgtggcattgccaacaccaccatctggtaatctagaacctcagaaagacttgtccatagagatgagattgtatgtagtttagaatacctttaactttcgtatatataatgcttgctctgatgatcaatatattgaaagcgaatttgcttcataagccactgttcactccctgtctttgaaatcaacaacgtaagttttaaaccccgcaaggatttaaggagatagtagacagtatcaatgcctggcatctgaattaagaatatatttagtggagaagttttaatacaaacctcaatgaaaaagcatcaatatcatattcagcctaataaaatgttttaatgaaaattgtcatggcgtttgacaacatctctttattaattggtcttttccattattattttcttagtagcaaacacactctggttttagctctcattagttatagtcctcattggattcacattttgcgacttcagctgtgtttatcttctcattggtctcagttccttgggagccaggttatagattgtcttcagtgttctgtcccatatctctctgccttttacatgagcattcggtgaatgccctcaggatgctagtgacgtgcagtttagaatcaatatgtgaaagatgagccagctgagggaggactgggatgaagcaagaaaatctattcctcgaaagtttcaaatgtttaagggcagtataatagaatatatcgcctccttgcattgatccatcaaatattcttgtgcacttactatgtgtcaggtcccatgttagtcaatggaacgacaaagctgaattaagtgaattgatgggcaagaaagacattactttaaaaagatgtagcatgctatagtagagatacttaggaaacctataacatagagaagaaggagaaaatgccccgagaggagttagggaaagctcactgaggtggttatgcctgcccgggttttagaaaaatgaggagattcttttggcaaaaagtgacagggcattccaggctgaggcacccaaggggagagttcatggcacattcaggtaacataagtgagatgtagcttggcctgagagtatgctggtgaggagtaggagataaggttggagaaagtaggcaggggcgagcctaagcatttcggaccttgtcttatagcaaaattttgaacaaatgaaaaatacctgatttctttttggtaaggtacttaaatatacttatgtggagttagggagggagacaaggaaccaagttaggagattctgtaataattctggtgactgatattgaaggccaagactggggtgagggttgggagtggaaggcgaagaagagttgactctgcggtaggattccccaggaagtggagttggaagaacatgatggagggaatggcaggagtcaagtgcagagtgtgggccgggattattggctgggacagtgtagtggagtagagtgtgaagaggagagaaggcatgggttcaatttgggatgggctgagttggaagttccagggacatatctgatgggcagcggggaatgggggtctagcagggagcaggtgacaatatgttacatgtggcattaggcaagaaaacaaaaaaatagcaatagcaagtatctggcacttaggagggccaggctagagagctggagtcctaactctgagcagcactcttgatagaggattagaaggtgaatttttacatctatgaggtgatgttcatggattttgaaatgatatcagcagaaaataaatctaaggtctaagtgggtgtggttgggaaattgaagggcttggattggtacgatgacaaagaaaagtctctcacaaaagtggattgggacttggagaccctacatctacataaggtgtaaaaaagtaagaatgggcctggcatggtggctcacgcctgtaatcccagcactttgggaggctgaggtgggtggatcacctgaggtcaggagttcaagaccaccctggccaatatggtgaaaccctttctctactaaaaatacaaaaattagccaggtgtgcacttgtaatcccagctacttgggaggctgaggcaggagaatcacccgaacctgggaggcagaggttgcagggagctgagattgcgccattgcactccagcctgggcgacagagtgagactccgtcccaaaaaataaataagtaaaaataaagtcagaacgtttgtaagcccagagtcaggttttagaccctttgctgtttcgggttgcatttcacttttctctgctttgatggtgctctcccaacatgcctaactgatgattgaagtgttgcagccttttttttttaaaacaaacaaacaaacaaccctttctacacagacagcattgagttgtcctgtctctaaaggcaatctgccccacacttggcagaaccttaagggtgggagaaatggaatgaatagtagctgtggataggtctccttattgccctgggaggaagacttcgtaggagaggaagttgaaagagggtcttgagaaagggggtgagatcttcaaaggctgggtctagccatgggaaactaagtgaaagaatttttttttaagttgatcaggaagagaaaaagaaatgcaccaagtgtttggccaggcggatgctgaccttggttatgactgggtgggattgccattgctgcaagttgatggcacttaacagttttctagggactttcacatacgcagcagcccctggaagtcctggaaggaggttgatgatgttgcagcccatcgagggaccagaaaaatgttgtgtaattatgaagacctgttgccttaaaacaattcggatccaaataggctgactttatcttcaactcaagtagtgtggcgggagggggctctgccctgttggaaaggcatccctctgccctctgtggccatcactgagctccctgttgttttcggtgagctctgactagatgttttccctgtcaatatttcactaatgtgtcatatgaattatttgtgttatctctgtgctgtgaaattagaggccttcacccacagtgtggtaagtagattaaaaggaaagcctgttttttatggtgtgggcgaaactgggaaaatatcagggaaatattttgtgtgtgtttgatctgacagtgggaaggccttgggatgccagtgtcttctaaaacctgaaagctgagctccggctggagttttcttcaaaggggtttatattttatctgttggcacttctgagcggaaggaaggtttggaatgggagattctgtgatgatcctttttttttttttttttttgctgttgttttcttctctgtctttttaactttgcagaaagcccttccagttatacactcagaccctgttcaggacgttggtggccaaacagtccccttttgttaagcgagcgtcccatttttgtttctcttgaaaggtgccctccaggacagcagagcctttctttgggctgtttataattgagccctgaagaaaaacagaaatcattctaaacccaggccaagtgcctccttggcctagctaggcaaagctaaactcacacaagatgaaatctaaccagctggttacctgagaaccaccttcgggagttctccggcttgactgctttcgccttggccaccatctcgagctccagcgacagctgagggtcagggcctctctgtgcagaagagtaggaagagaatcatagctgttggtgaaggttaggttgcattgtttgaaagggtcctatgtcagcttgcaaaatgctatggatctgtaagaatcctgaaagaaatgggttggagaagaaatttatgaccgtaagtctagttgtctttgagtggtgcaatttagccaggaatttttcctctttgcggctcaaggtttcaaaaagttcccttttaaaaaatgcgtgtgtatctatttttttcttagtttacataaaagggtattcatagctttagcccaccttgacatacttctgtcctttctctttttgcctttttctttacacaaattaggagtcatttgagaaaatgaggcatatataggatttgataagttagaggttgtgcagtttcgaattattttattttattctgttataataggtatgggggtaaccttcaggaatcgaaatggaatcttttttccctgttctcaaattatctagtttaggtcttagactcgccttattgcctataagtacagccttcagttttggaatttttctttccattttaggtatcagctgggtcatttagatggaataggaaacagtactgggcattgtcagagaaagactggctataaaagttctgatccctgtgggcagtttggagtcttcttaagtgtaagatcatcagtatacttcaattctgagcttctgcacatgctggttagtgaagctctgcccttccttgttaactgcacattttaacatctatgtttctagaggagacacctgcctcttgagggaaccctcagcatcccgggagcatctgtccaactggcccctgtacacacagagacctgaaaagtgaagcagtttcgagacaggcatcactttaaggctgaagtacattttagaaagttagggactggttctgtggcggggaagttgagctaaatatgcagttctattttaattttcactttatgccaaggcaaaagcattgggagatagactataaatgtataagtaagtcagtgcaagaatagccccttgcaaaatgcagatttagggaggctaaatattttctcacatactttaatgcacatgaataacccctgatcgagttcctgagaaagggatgttgtgtaaccatttgaccttgatcactgtaatgagttatacagaggtctgcacaactgtacaaaagtaaagtatttggctgtcttagttagctcaggctgctataacaaaacaccatcaactgggtggcttaaacaacagacatttattttctcacatttctagaggccccaccttctaataccatcacactgaggattagcgctttaacatgtaaattttatggggacacaaacattcatttcataacataggttgatgcctaaagcatactaataatttacagggtggttggtttgtctctaaaaagttaaaattttttagctttgtcatttgtttgtttcaacagagttgtattttcctatgtgtattttatcttaggcatggtcacctctcttcctattcctgtactgtttgaaatcacagtagtgaaacccaaggtaattaaggctggggtatcattgttttaaattagagtgtgtgaatttttttttttttttgtaattcaacaacaagttccttcatattgtgcataattggatcacattttaattttgtggcaaataaagatctattttacatttctattagaaagacaagcccctgtggcgagctctgaattaggatgttggccattagaagtactgaagcagtgaggcttttagagctgattcagcttctgaaaaactcatctgtgaatctttagggtaaggaaagaaccttcaatttaaagcttataaacagccatggattttacctaaaaacaaatactgagaagacaagaaaacgaaaaatataagtactaacgcaagcagagaataaccaaatcatgggttatccagtatgatatataccacaaaaacattctggtcattgaatcaggcacatctgtttgtgaggatatttt

SEQ ID NO: 1911 - DNA, 1311 bp, Homo sapiens
gaatcttgaggtgggacgttgactctaagatgtccttgagcagtggagcctccggagggaaaggagtggatgcaaacccggttgagacatacgacagtggggatgaatgggacattggagtagggaatctcatcattgacctggacgccgatctggaaaaggaccagcagaaactggaaatgtcaggctcaaaggaggtggggataccggctcccaatgctgtggccacactaccagacaacatcaagtttgtgaccccagtgccaggtcctcaagggaaggaaggcaaatcaaaatccaaaaggagtaagagtggcaaagacactagcaaacccactccagggacttccctgttcactccaagtgagggggcagctagcaagaaagaggtgcaggggcgctcaggagatggtgccaatgctggaggcctggttgctgctattgctcccaagggctcagagaaggcggctaaggcatcccgcagtgtagccggttccaaaaaggagaaggagaacagctcatctaagagcaagaaggagagaagcgaaggagtggggacttgttcagaaaaggatcctggggtcctccagccagttcccttgggaggacggggtggtcagtatgatggaagtgcaggggtggatacaggagctgtggagccacttgggagtatagctattgagcctggggcagcgctcaatcctttgggaactaaaccggagccagaggaaggggagaatgagtgtcgcctgctaaagaaagtcaagtctgaaaaggtaagaggtggccagatatggctgcccactgactgccagtcagaactgccctggactaactgccaaatactatgtgtactctgtgggaggctcattagtgtgtgggtaatgaccaattacaaggtcagagcagctggtaatgataatgtggttttcttccaaattagaggattcccctacagactcatttacagcaggcctggacattgtggaacaggatatttgttgttgggggcagctactttgtagaatgaactttctgtagtctgagttgagaccttcccaccttgtctttgcccacctcagacacttgttggtagagattggcatcagacctttatttgtttcccagcttgactggcatttcatcatcagactcataatagttgataaacaatacgcctttggtgataatgtagattgagtacggttcttgatgggataaatggtgctgttgggtctctggtagaacaaagggctaaatttcatggcatatctacgaagtgttctattgccggctaccaaagagcgaagg

SEQ ID NO: 1912 - DNA, 1193 bp, Homo sapiens
ctgccttagcctcccgagtagctgggactgcagacaggagccaccacacccggcctaaattttaaattgtgcctcattctgagtagcatgatgaaatcttgcaccatcccaccctgtcccacccaggatgtaaactgttagcctttatctagtatatgcatgttgtatgcgctggctgctacaaagttaggcacttcgtagctgtgttggttatcagatcaaaaaaacagtttatgtaaggttaggtactattcgtggtttcaggtacccaccgggggtcttggaatgtatcctccaaggttaagggtaggggggactactgtaattgcctgaatggctcagaagggagagctgttgtggccagagaagctgcttgttatgtaatccacattagtacaagataatcataagatgagctgtaagtatagtgggtgttagatcactgctgggtcttatttaaggtggcaggggtgttagggtaacatttagaagttgagagcaaagagtaaggtttgttttgactttatacaacacttgaagtaaaaagcagtttgttttgttttcaggcataaagatatccatccatgtgtttgttgtgttgtttttgttttttgtggggttttttttttgtcatattcacaagggaaaccagaatctgtatgttcctctggaaaattaggtgaagagaagtataacctatttcagtgtggcttcagtctatggtctgggttttattaaaccagatacgtataagagcatgtcaaatttaaccacctcccttcatccactagattacagtgaatgatagtaatgtcactgatacattgttatacacattgctcactaactgtttttttttttttttctttttagaaacggagtctcgctctgttgcccaggctggagtgcagtggtgcgatctccgctcactgcaagctccacctcccaggttcacgccattctcctgtctcagcctccctagtagctgggactacaggtgcctgccaccacgcctggctaatttttttgtatttttagtagagacggggttttctttttttttctttttttttttttgagacggagtcttgattctcggtctgtcacccaggctggagtgcagtggcgtgatctctgtttactgcaacctctgcctcctgggttcaagcaattctcctgcctcagcctctcga

SEQ ID NO: 1913 - DNA, 1279 bp, Homo sapiens
attatgtatgcacatagactatatacattatttacgagatatacttaaaaatctttaagatgtttctatattttagagacagggcttaaaagtcctgggcaattagctgggcacagtgtcgtgcgcctgtaatcccacctagttgggaggctgaggcagaagaatctcttgaacccgaggtagaggttgcagtgagccgagatcgcgccactgcactccagcctggatgacagagtgagaccctgtctcaaaaaaaaaaaaaaaaaaagtcctgggcagcaaggcctccacttcaccccctaaaggttgccccaagagcaccgtgtgactgctaaggtatttccggagtctaaagacgattattcaggtctcatttgcatacccataatacactgcaaacagtatttttttcggaaaaacatttatatattgcttgacatttttaagtatgagaattttgcatgcagaatttttttgtataaactttctcaggtagtaacccttgggattagtagacaccatcagtgtactaggaattgcagttacccgaaaattgagttacagaagtaactggtatactctggtttctcttcagatcgcataaatctttcgccttttactaaagatttccgtggagaggaacaactctgagtcttaacccaattttttgaggccttgctttggcaaggctatatgtggtaatccaacaatagaaattatttttaagtttgtgtgttcctttttctgttcaatggtgcttttgatattgttgtaaagcagtgactagcagattctgtgtggtaaaagcactgaaccctgtttagttcttttctccctaccttattggtaattatttctgtgtatatatgttccaaagaaatgcggcttgtatattcatgcttttcaactttttgtgatagacagttgatacacaagtagtacctcctccgggatcttcttagtcaagactgtttggtagatgcatgttttttgttacttgtaatgtacagtattcagttcattttctttttgcagcactgtccggttgaaacacaacgcgaggatcgggcgtggtggctcacgcctgtaatcccagcactttgggaggccgaggcaggacaatcaagaccaatcctggtcatcaaggcaggagaatcaagaccatcgaggtcaggagatcaagaccatcctggctaacacagtgaaaccctgtctctactaaaaatacaaaaaaaattagccgggcgtggtggcaggcgcctgtagtcccagctactcg

SEQ ID NO: 1914 - DNA, 1263 bp, Homo sapiens
gaacgcccctgcgcccaccacacagtttaagaaaacggaaattgtcaaactttttaaacccctgtgcgcccttccccaagtcacatctctcgctcctcaccgaagggaggaaccactattctgaattctgtgttaatcattgacttgccaattttttctctttcaatttaatagcagtctttatttaaaagaaatcaaactcagacgtacaaatacacaaaacagataaaacccgagtctctgaccaggaaagcgttattttccagccagccagtcttcggcttcgccccctaacggtgacataaggcactctgtgaaatgctctgttccggaatcaaaagattgatccgattatttgcatacccataatgcactgctcacagtacaaatttaaaaaggcaaaatcaaacatttttattctaagcatattctgtgaaagttagacttttgtttaaacaatactcttaaaatttttttctaggtatagaaccttggcattcactagtcaccatcactatactaggagtttctgttacccgagaaacgagttatgaaattaacaagcatactctggtttctcttcagatcgtataaatctttcgccttttactaaagatttccgtggagaggaacaactctgagtcttaagctaattttttgaggccttgttccgacaaggctatataaagctgttaaaaaatcagattgacttcatttagggtgtttcttacagatatcgtttaagttttcggttctgcttgtaaacgcttcaatcgctcatgcgtttaaactttgtgtaagtgcaagcgttctttttctagtgaagcttcttccaacaagttagaagtatttacttcagtgtcattaatgtgaaagattcttaaaagtgttctggctgggcgcggtggcttatgccggtaatcccactgcattgggtaaaccaaggtgagcggatcacttgaggtcaggagttcgagaccagcctgggccaacgtggtgaaacccacgttgtacattgttttcttagtcttctgaatcctgtgtatattttgcatttagcgcatctcaattaggactagctgcatttcaagcgctcaatcggcacacatggacaatgactaataattgccctgtgcacctctgctaggtgtaaaacgtttgaacagagcacagtgtgtagatccgttctcccttcctgtaggttttggggttttgccagattttggccattggaactccttgaacctgtgcaaggttatattt

SEQ ID NO: 1915 - DNA, 1215 bp, Homo sapiens
ggtggggagtgaggagtagggcttatccccttttgaggcctatccccagtctctccctagattcctcaaagcacagctgaggcacaatcggctcatttaaagatgatgttaggccaagggatgacaggagggaaatacacacaggatattgtgacctaacatggttcaggaggtctggcatcctcatctgcagcccatctcctgaggtcagagccaaagggaccttcggggccacctagttccttctcagccaggttcaggagagaatcctgccctcaggccctaatgtgaccactgcatgtagcagattgacttttctcttgtgcatctaggatgtaccatccttgggagaactgagaaaattgtccattaatcctcttctgggtgctgtggttcaggtgggagaaaccctggctgacagaggcttcctctcagctaacagaggacaatgaagcaccaagcaggcagcctcctacccaaggtcacacagccagcccaagcttgtcttctgagttccaagccagtcgtcttctcttttctcacaatagcattaacatcctcccctccgctgctccaatctcgtgagcatggaggaagctctgatccaaagagatgagcctatccctgtctctctctctctctctctcacacacacacacacacacacacacacacacacacacacacacacacacacacacacccctgagtctgcaggacagagacatcccagaagcttggcattggacaagccggtagtcctgaatttgtgtctaggtcatccacgtgagcctgcatttcgccacctgcaagaggagatcataatgcctacttgatggagttactggaaggactgaaactggccatgtaccaaggctggcacctggcacagtacaaggtcttgggaaccatccatttttcttttgccctggtgctcagtaaggtgcacagtggctgatgagtgaacagcacactcaatgttcaaccgagtctacatctaggttctaatccaacagggaatattcacagagtattcttagtaagggctcgcaagtccccgaatatggcattagtacccaatacccggctgagctcagacttccaggcccgcttcctgccagctgtgcacacccaggcccacagatgcctgctctcccaagcctgccaggctggcctcccaccggcctcactccccacccctattcctttttcttt

SEQ ID NO: 1916 - DNA, 1186 bp, Homo sapiens
cacctcaccacatggtctccactgacactgcagggggcagtttgttactagctggagaaggtgaaagtttcagctcctttcttggtcttctctgataccaccagcgagtgtgttgaggtgccttgtacaaccttgagaagacagaagtctgggcttccctcttggcctttgcttgtgggcccacagttggtgtttggctggagttgaatggctgttatccccaccacccccaagacaggatctcgttctgtctcccaggctgaattgcagtggtgcaattatagctcattgtaacctcaaattcctgggcttgtgtgatcctcccacctcagccttccaagtatcttggactatccaggtacgtgctaccatgcccggctaagtttttaaattttttatagagacagggtcttgctatattgcccaggctgatcgcaaactcctagcctcaagtgatcctcctgcctcagtctcccaaagagctggaactccaggcatgagccactgtgtctgactgagtggctattatctaaaagtttcttgtcttgctaagctgcccctttcttagtcctctggcaagagagagcaggattttgttggtgttttttgtgtatgctcctattggcatttctgggttcctagtgtctttagctccaaatcagggatatatggagcaaaaaaaaaaaaaaaaaaaattcaacccaaggaacacaccaccatgttgttccttggggcttaaagttcctagttgctttggcctcttccctctacctttcacagtcttcttatgtttgttttacatgtaatgtccaggggttttagttgtgcttagcagaaggaatagggaaaaatatgcttactttatctctctggaagtggaaatccttccttaaattttgagtctcattgtctcttgctagaccggtggtcttcccaagtagggaaatgcagaagaggacaagaatgaatgttgatggaggcccctgggtgctgtgtgcttctgcatgtgcaagtttattgagttctcatgacttggtaaggatggtttcattattccctctttacaggtacgaataacctgaggctcagagagagtaggttcaggcaggtaggcgggcctgtactggccttgaacccagtgcacatgccttttctaccacaggtcactcagcagctaaaatctagg

SEQ ID NO: 1917 - DNA, 1144 bp, Homo sapiens
acttggatttcaggctctatattctatggcagtaaaaaaaaaaaaaaaaaaagataaattaaggccaggcgcagtggctcacgcttgtaatcctagcactttgggaggccaagacgggcggatcacttgaggccaggagttcgagaccagcctggccaacatggtgaaaccccatctctactaaaaatacaaaaaattagcctggcgtagtggcacatgcctgtaatcctagttactcgggaggctaaggcagtagaattgcttgaacccggaaggcggaggttgcagtgatccgagattgcgccattacactccagcctgggcaaaaagagtgaaactctgtctcaaaaaaaaaaaaaggagataaattaacatggaccattcagagaattacaagcatgctgaaatatagggtacaaataagagaactgaatctgagatttttgtttgttgtgtcatatatttaatttgtatcttaatagtctccaaatttttttgatcaggtgccacagaagtaaaaatgttttgaccattttatttgttgattaaatacatttacttctatacggatgtgatttgtaatgtacttttttttttttgagacggagtctcactctgttgcctaggctggagtgcagtggtgcgatctcggctcactgcaacctccacctcagttcaagtgattctcctgcctcagcctcccagtagctgggattacaggtgtgcaccaccacacctggctaatttttgtatttttagtagagacagggtttcatcacgttggccaggcttgtctcaaactcctgatttcagttgatccacctgccttggcctcccaaagtgctagagttacaggcgtgagccagtgagccactgtgcccggcctaaatttagtttttgtagtgacaggatctcactatgttgcccaagctggtctgtatctcctggcctcaaacagtctgccttggcctcccaacgtgccgggattacaggtgtgagccactgtgcttggcctccagctgttccttggacatttcaggcacatttttattctaaggcttttgtattgccgtactctgcctggaacactcttcccttgtacccctcaagtccgcatgactgtcttacactcctcaaactgtgc

SEQ ID NO: 1918 - DNA, 1199 bp, Homo sapiens
taaatagataagttaaaatgccttggtagtgggctgggcgtggtggctcatgcctataatcccagcactttgggaggctgaggtgggcagttcacttgaggtcaggagtttgggaacagcctgaccaacatggggaaaccccatctgtactgaaaatacaaaaattagctgagtggggtggtgcacgcctgtaatcccagctactcaggaggctgaggcaggagaattaacttgaatccaggaggtggaggttgcagtgagccgagattgcgtcgttgcaatccagcctgggtgacagagtgagactcttgtctcaaaaaaaacaaagccttggtacatctagaatgttgtatatcaaatttgttgtagaatatgaacttttgaaaactctggtgacccactgatcctatatagcacttgttaataaaaatatatatcaagataaaagtgttcatatacatatacaccattggataaagtggtactgggaaattaggcaaaataatttatgatgaaagtttgcatttcacttggagcgcagctctcggatataggactttagtgagacctttgtgactgttcctggtattgattgcatttgttagttgtacagtgcaaccatagacagtcacacacattaaaacagatggttcctgccgacagggtctgtatagttatcagattttctgtgcgatggctccatacatgtttgtttttgttttttaacttttaacagatgtggaagaaaatacaggttccatgtagaataccctaaagttatttataaactactttcaaacatgtaaaggaatgtgatttaggccgggcgcggtggctcacgcctgtaatcccagcactttgagaggccgaggcgggtggatcacaaggtcaggagatcgagaccatcctggctaacatggtgaaaccccgtctctactaaaaaataataaaaaaaattagccgggtgtggtggcgggcacctgtagtcccagctattcgggaggctgaggcaggagaatggtgtgaacctaggaggtggagcttgcagtgagccgagatcacgccactgcactccagcctgggcgacagcaagactccgtctcaaaaaaaaaaaggaatgtgatttaaataatccgtgatttaaatttcttggtaaaatatggtatgtatggatggcataggattgggtatatgtaaag

SEQ ID NO: 1919 - DNA, 1420 bp, Homo sapiens
ttgaagataaagttgaaggctacaagaagaccaaggaagctgttttgctccttaagaaacttaaagcctggaatgatatcaaaaaggtccgttcaatgagcacatttacagtttggtactccttgttcacagtttgtcactttgaatttcagaagataagggcagtatagctaatccttaatgtgtgagagaacaagaacctcagagcccgattacttgggtttgaatcctaactgctgtttatggctctgtgtaaccttggcaagttattgtgcccagtttaatcatctgtaaaaaggaattaaaactctgaagatctattgcagagattctatcttaatcagaatactaaaactgctcactttgtaggtctatgcctctcagcgaatgagagctggcaaaggcaaaatgagaaaccgtcgccgtatccagcgcaggggcccgtgcatcatctataatgaggataatggtatcatcaaggccttcagaaacatccctggtaattaaactgcttacatatattgactaggtatactctgcaagtctactcagcttttgttatgatgagattccacttaaggtccgtgtttctgaaacaaatgattttgtggaagttctgatttatggctgaaagagttgcaccattgatggttgaaacttcataattaataagttctcaggtaccttttatagctcttaagccataaagatgatttgtgtttcttttgttggaatacaggctccctaatttttctttccctttaaaaggaattactctgcttaatgtaagcaagctgaacattttgaagcttgctcctggtgggcatgtgggacgtttctgcatttggactgaaagtgctttccggaagttagatgaattgtacggcacttggcgtaaagccgcttccctcaagagtaactacaagtaagtatctttcatatactaagcacagatgtttatattgtggatattaacattcagaattggcttacatgttttctaaatttattcccatttccccttatgtgcagcaacagtatgccaaaatgagactcacctggtctatatttttggttttttgttttgtttttgagacagagttgttctgtctcacccacgctggagtgtagtggtgtgatcgtggcttactgcagcctccgcctcccgggttcaagcagttctcctgtctcagcctcccaagtacctgggactacaggcttgtgccaccacacccggctaattgtagagttggggttttaccatgttggccaggctggtctggaactcctgaccttaggtgatccacccgcctcggcctccccaagtgctgggattataggggtgagccaccacacccggcctggtccatgtttatgagaagtgatagtgtagtagatattttggagagcatagtggcta

SEQ ID NO: 1920 - DNA, 1420 bp, Homo sapiens; identical to SEQ ID NO: 1919

SEQ ID NO: 1921 - DNA, 1813 bp, Homo sapiens
gagggtgagtgggacagggatggaagttgggatgagtagagcccgggtagacaggatttgctgattaattggcattaaacagcatctccaaaccttacaatatggttttgatttagctattgtgctttataaggcttgctttgaaagttttatgataaacaattctttttgaaaataaaattgtgcagtagaggttgagattctaagggttctagtcatttactgctattttggtttaagggttgtttgcctcaccataccagtctcttctgcaattgagtatttaatggtattgttggcgtatgagaagagtttgcttcaaacattacttgtcaataaaaataatccttgtctttttctttaggcgtgtgctcgcccactgatatcggtgtactccgaaaagggggagtcatctggcaaaaatgtcactttgcctgctgtattcaaggctcctattcgaccagatattgtgaactttgttcacaccaacttgcgcaaaaacaacagacagccctatgctgtcagtgaattagcaggtatggatttatatcttctgcagatattttagggactgctttacagtagtgatgaaattccacttcattggtccgtgtttctgaaccacatgattttctcggatgttctgatgctgtttgctaccatgcataatagtcatgggttggtatgtatgatgaagcagctacaacttttatctcttctcaattttaggtcatcagactagtgctgagtcttggggtactggcagagctgtggctcgaattcccagagttcgaggtggtgggactcaccgctctggccagggtgcttttggaaacgtatcctttgtttcactacctaagactggtcatctctgatggaatttagcggcctgggtctggtttattgatgataatacggtgtaaaaatattacttttttttgtcttgaagagaaggggcttcatttatatggggttattttgcttgcaatgatgtcgtaatttgcgtcttactctgttctcagcgacagttgcctgctgtcagtaagctggtacagaaggttgacgaaaattcttactgagcaagaaataaccttgttgtaattactaaaatttgagaaatgtgattcttgactggaaaaatagatgtgtcgtggaggccgaatgtttgcaccaaccaaaacctggcgccgttggcatcgtagagtgaacacaacccaaaaacgatacgccatctgttctgccctggctgcctcagccctaccagcactggtcatgtctaaaggtttgtaatactttatataagagagtttgatagaagaaataagacacctactatttgatcattagggtgatttttattcacagtaacccatttcaagatggctagaagagaataatttgaatgtttttagcataaaatattttagttcatggatattccagttacactgatttgatcttgacaaatgagtgcattcagttatcaaatgtactccagaaatacatgttacataccggtttaaaaattttttaatcaaaaatatttcgtatcagtgatacaaaatgccccactttttctttcacgtgaacctttgttaaaattgcacattcttttcattctgaagtgtctgattaaattttaatcctttactaaatactaggtctgactacttaaatctgacaaatcaatcagggaatactagcgtaactggggaactattcaagtagtagtttagtatatccttagaaaacttccaacttaaacttgcctgttgcgtacccatcgcatttttatttaactgtcaaaatgatg

SEQ ID NO: 1922 - DNA, 1813 bp, Homo sapiens; identical to SEQ ID NO: 1921

SEQ ID NO: 1923 - DNA, 1813 bp, Homo sapiens; identical to SEQ ID NO: 1921

SEQ ID NO: 1924 - DNA, 1813 bp, Homo sapiens; identical to SEQ ID NO: 1921

SEQ ID NO: 1925 - DNA, 1129 bp, Homo sapiens
tctggcttatttcttttaaatagatctttttaaataatttagatcatctggaatgatggagatgctttatcccacggtctttgcacttaacaaagtacagctaaggatagatagttaatttaaaactcgtgcattccttataaatgaaagataatttatatttatttttaattattttccttggagtcacaacaggttattattctcttcggtttgaattttaattcttatttgtaagaatagtaggtgctgttaatgtctttttgttacttaatatcagatttaaggcaaacaggttaaattacagtactataactatagtataggcaaattattattctagaaagagatttttaaattttcctgatagatataacttctatattaacttagaacttagttttatatccttggctccaccagtgtcttgtttcattaagccaaagtgtgcatttaaaaaaatttttatttttattttagaattgggggtacatgtacaggaagtctaattattccattgccccatagatcgtttttcaatccttgcccccctccctcccactttgaagtctcagtgtctactgttccaatctttttgtccatgtgcactcagtgtttagctcccacttgtgagaacatatcgtgtttggttttctgttcctgccttaattcacttaggataatggcctccagctgcacccatgctgctgtaaaggacatgattttgttcttttttatggctgtgtagtattccatggtgtacatgtaccatgttttctttgtctaatccaccgttgataggcacctgggttgattccccatctttgctattgtgaatggtgcaaagcatgcagaagaaacagggacattattgctccaaaggggtgaacattaattcttgaggggcaaaaaatctttactctttttatctataaggcacaaataaatgtgcaatacataaacacatatacagtgtatctgtagtattaatatttcagtgggatggtgtgtcaaaattagggggaaaatgtcttaaaaggttcctggtggggcggctgtactgaaaatggttgagaaacactgagctgaaggatctggttgcatgtgctaagctctaccctagaggaaa

SEQ ID NO: 1926 - DNA, 1194 bp, Homo sapiens
atggcatccccgccgagtcccaggagagagagagaagaccccttcctggagtccagggctcccgggaagaaacactggcatttgtccctttgcttcggcttctggaggcagagactctgagcccagggagagccttctgcagccccatttcctcaaaaatccaacctgcccaggtggcgggtcatgagctgtgctcaggaagctggaatctgaccctggtggcgtcgggcccagtctccatggcagccgagcatttattacccgggcctccacccagcttggcagactttagacttgaggctggaggaaagggaactgaacgcggttctgggagcagcaagcccacgggtagcagccgaggccccagaatggtgagtgtgagggtctgtgtcggcctggccagggctgggggcgtgaacctcaggtggagccctcccctgactgttttcctttctctgctgcaggccaagtttctttcccaagaccaaattaatggtaggttgggtttgttctttgattagcaactcagcaaaatatgggtctcattaggcaatttgctctgctcatgttttcttggtgggaaggaaggtggctgtgggagagctgggcccacccagggccaagagctgcggggaggctgctgttggcggggtgggggttgggggtaagcctccaaaatagacatgtggctttatacttgtcagtgtgacttacaagccagggcgctaagacagaacttactaggtttccctccagaacctgaccagttggatttggggactgaggggactggggatggagagagagaccattaaaggtatggctggcagcagggaaagaggaggggctttgtaattgagacagaacagaggccaggtctgcactctctggcaggatgcgtctactctctgcgcctcagtctccctatctgtaaaatggagggtccactgagccccctttgccctggcatcaagcctggtttgggcgtgagcactttattccctgggtcccctactctgccagccctcgaccaggcttcagtttcacaccgtgcagggttctatttccagaaggccaagagcaaagagttgcgttacaaagaacttgggggcccagacctgagccaggggagcctcatggctgcagcccccctgcacctggcaggagaggcccaggaggcacagccagctgctg

SEQ ID NO: 1927 - DNA, 1099 bp, Homo sapiens
gggtgggccatggagggcatctgaatacaggagtagggggggtgtgggtgtgtaaccagagaccgagagcatgagtggggtgtgcctcgtgtgcgtggattcgtgtgtgtgtgtgtgtgtgtcttgtatatgtgtgcgcagagtgcatcattttcagactctactatttccgtcaagtttctgtttgatttggatcatctcaggatcggattctgttttagagtgtttctgggccaggatccgggcccctgccctcctctgcacctgaccacactccctactcagggctagtctgttcttcccggacatcttctggtagccgtgcaggagagggctgggtggggcagaggccaggaggggacctggtgtgtcacctgcccaccacctggctcatccctcaggcccaccctgaccctacattacataggttacgtcagcctactgtggctgttgagcaaagcatttctcctttctgggcctcatttgcactagatgggcctgtggtcccaaagtaggtcagtaggttggggttgctgacaccccttgggtgcagctttgggacagatgagtggctctgtcctgtcactgccctctccctgcctgggggctatgtgcactccagacccctgcccaggctcaggcccatgaggtatggagacaccctggcccccaggagctggaggcaccgcccactcccctggcattccagctttgcaggtgaccctcctctacccaaagctctgtccccctgctcccactccagaagaactgcggcacgcgcttcgggcagcctagccacaggctttgagcgcctgcattcctgggggctggagggtggggtgccaaaggccctgagcaaaagccagagctcctctcatcaaagcctttacaaggtgctgggcccagaggctttgccttgacagagtggcccagggtttcaagggaggaggaacctccccctacctaggacccttcctgtggggggtctacagagtcagggacagaagggaagggacccacaggaagtcacagtggtgcccagggatgtgtcagcccccagccacggggacgcgggattcaagaatgaagtaaatacagt

SEQ ID NO: 1928 - DNA, 1148 bp, Homo sapiens
agtaggacatgaagaagaggggcagcagcttggtgcccttgcagtgactagtgtttcagtgctgttgcaagaagggattcaagttggggcaattaagaaagagattgtgggagactggagagagctggagcccagattttggtgatccctgtataaagtactaagagtaagactggttaaactgcaatctcaaatgtttccatcatttaagatttcatctccttgattctgtatatcagtttagcttatggattattacaattatgaatttattagctgctatgtaaaaatagtccttattaaatgcttgtgatgggcctagcctgtgtcatgttctggaggaaatgtaaggtacaggaaatctaaggtttctacttttgagaagcttacaaattaattaataaaagagatattgaagttcctggtactctctgtgcattcacaccttctgtgagattattttgcagtttatcccagtcattttaggattttagaaccaaaaaagagtgtgatgatttcactttgcatttgtttcagacattgtgaaaatgttagcctgagtacattaacaatagaaagctgacttgacccttgggggctgacctttgaaaaacacatagccagcacttgagacacatggccatatagggattaacagctgtgtgctgaagtagattagtgtttctaatttttagtcattcacgtgctagcttcataatttttggccaaattgttcactaacctgctgtttacttaataaatatcttttctttaaattgtctgttatttgcttgatagttgtcttcagaatgttttacttcttagcttcatcccatgtaattatgggtttgctgtgtgttttgtgtgtgtgcgtgagaaagacatacattaaaataaatattacaaaagttttaaaaagtctattctacctaaaaccttctataataccttaggaaactaaagtggattcatgatagagcctcgaggggaaagggaccacccacctagattaagccattgatatttgagttcttgttcactttttttttttgagacggagtctcgctctgtcgccggggctggagtgcagtggcgcgatctcggctcactgcaagctctgccttccgggttcatgccattctcctgcc

SEQ ID NO: 1929 - DNA, 2038 bp, Homo sapiens
ataacgatggagaggtagatgacgaggaagatgaagaagagcttggtggtatggcagcctttttactctcagctggtagcagcctggccctttcactttggccttagattgcttagactcagaggcccctggcagtgggcaggacactcctgtcagaggcctcagattccccttccagctgtgcagatgtcttgcctcggtttccaaggatggcacagcttgctagtcatgggtcccctgacttctcactgggtgggttgagttaaagaggtgggattaataactaatctaaatgccgctttcttacttttccagaagaagaaaggggtcagaagcgaaaacgagaacctgaagatgagggagaagatgatgactaagtggaataacctattttgaaaaattcctattgtgatttgactgtttttacccatatcccctctcccccccccctccaatcctgccccctgaaacttatttttttctgattgtaacgttgctgtgggaacgagaggggaagagtgtactgggggttgcggggggagggatggcgggtgggggtggaataaaatactatttttactgccactctttatttttttcccctactttttctttgtgtccggtttttgtccctgtaaatgcgatagctaagtacacactaagtgagcatttgttcctgactctcaaagaggatggtttggagttctcttacgtttcctggtatttcccaagtctcttgggttggttggaaggctgtggctggtctcagtttggttactcaatgcccaggaggggctgagcaccagccatatcttttgctttggttcacatgatgatacctgcttttctcaggcctgctagaggcatccaacgccctggtttgtaaatagcaacctaaaggcgtattttggcactggtctggggacattccccatctctcatcccttttcccccttcacagatggtggtgggcttcgctctacaaagaggactctgatgttactcttgagcttatgagccagagagctgaaaaccgcaggcttgttgtgttaagttacaaggaaaatggatttggtaattaaaattagaagaaacacaccttcaaacttcaacttctttaaaagaaaaaaaaaactgtcctatcttgttctgtaaaatattagaacgctttgttttacaaaaaatgatgagagaattcttccacatgtacttctgtgcttagaacatttttacggacctaagcgctggagacgttgctgcatgtcggctgggttttttttttcatacacccgagcacggaaaaactaacgcaaaattgtattttcttacctagtggaaatctgaaatgactgcaaattcctagtgaatgtacaggtttgctttcgtgtccctcttctggttgctttagaagtgacgtgtaatttctgaacccatgtttcatctgtataaaagaacatctgcaccagtttttctcctgcccctcagaagagccaaactttgagttttatgtctgtttgtcattgataaatttcaataaatctttttatacaatttttttggggatggcttctttgagtccaacaggccattgatcttttcaagatgcattccagatgaactgctaggtgagggggaagcttcatttttgttacctgatagaatagcttttcttatgagatatatataatgtgatactatgtttggatatttttggtcttaaagcaagactcagtggtgtatcttcattaaaagcttcctttaaaaaagttacagagttactaaaaaaacaagtacccaaacaatcaagttgggccaaccttggaaccttgttttgaatatctttcattgttttgtttgtcgtattgtaaaaagaatgtatggttgaaaactcaggaatgtttataaaacaaattatttcacaaacccagaggtttacatatggtgttttattttgttactttacttaacagtattataatcatttccctgtttctttaattttcaaaagcatgtatcttaaatggctacatagtagtcc

SEQ ID NO: 1930 - DNA, 1147 bp, Homo sapiens
cagctacagcggcaggctctgctgtgatggcaggagtgggtgaaagcaactgggcatgtgggggtcttgtgggggcattggggtggcggggcaaggcccagaagtccctaacaatgctgtggctggtgcatgtgggttttgggagaatgcgagagcagggttggaatgagaccaccaaccttgcagaggcagcagggcttactgggtttgtcttctgcggtacagccaaggcccctgtctggagtggccccctggttctgcagctcggctcaccacaggcctcctctcacccagatgttgaaaaggcagaaaagtcagggtgggcaaatccatcctgtggtcgttggcagcacagtgatccggaaagctagaagaagtgacggagtgactgactgcttcctgcgtctgtctccctgttctctgaggagtcctctaacaccctccccctgcttcagccccattcctcagccccgctcacacggtcgggccttctttcaggtgaaagaacttgtcctggacaacagtcggtcgaatgaaggcaaactcgaaggcctcacagatgaatttgaagaactggaattcttaagtacaatcaacgtaggcctcacctcaatcgcaaacttaccaaagttaaacaaacttaagaaggtaaatagagtggagtctgtgtgtgctgggaggcgggggtggggagtgggaagggttattacctatgtttagaaagagtaattgaagggaaagccgggtgcttgcaccaacatgccagacaattgcctgagactgctttcccttcttgcccgtctggggaaagccgggcagctctgagccggtagccttcattttaaaagctgtttctgctttttctttccctgccttatttagcttgaactaagcgataacagagtctcagggggcctggaagtattggcagaaaagtgtccgaacctcacgcatctaaatttaagtggcaacaaaattaaagacctcagcacaatagagccactggtaagtcattcggaccctcccctccctgcaggggtaggaggtgggaggaattggcatcagcaaatactacttttgcatttgtccttttcccacttaatttttttgactctcatgatgtgctatgagatagaattgagctatt

SEQ ID NO: 1931 - DNA, 1144 bp, Homo sapiens
tgagtaggggtaggggacattcacagtctccctttaatacaataagctagcttgcccgagatccttggtgaatcaaggctccactgccgtgtgtcagcttggtgctctttgtttaggctgtgtggacagatccaccaaagtcccctccagtcacccctggggtcccacagaggtaaacccccgggttctctctgcccatgtcctgagaggccaggaagtagctacgataaggattccatcagccatagactcagggtgggtgggaaggtggctttctcctagttatcttggagtggggaacaagtaagaggcaggatgtgtgggctggaagggcagagacagaggtgcacagtgaagcttgaaagagagaggcccgcagagtgtgtttgctgagagatttcagcaaagttgtgctggaactctgcagccagcagtgcccagtgctgggtttctggattctgctgcctcctgtagaattcgtgagaactacgtgtgtatgcatgtgcgtgtgcagggggtgatagggtggaggcaagggcctgtcattctcaatttagaggaattactttcagatttcttcagggaccatgcatctggaggagggactcatcttcaatttatgtaaccaactgtcaccttagccattggcttcatgggcaggcctaagtggtgtaactgaatggacgggtgaggggagtccactgatatggcctgtgtgcccagcatcgggaatgagacaaggagttgtataaatgctatgtaagtatttttgtagcaaatttaatttcttgaatccagtccttgcatcctgggctgggtaggagagaagagagtggttatagtggatggtggtgcctggctcctgtggtggagctggagtgatggagcatagcacatacactgcagggaagaaggtgtgtggttagtaaagccgatttcaaccccagctgtggatcagaactgccaggggagcatctgaagcaatacccaggctctgcctgaactgaatcagtctctgagggtggtgccccagtccgtgtatttttagaaagctctaaaggggactctaaagcacagttgggaaccaccccatggagcagggtgcagagcttcacagcaggtaggaagaagtaactaagtggaa

SEQ ID NO: 1932 - DNA, 1166 bp, Homo sapiens
aggaattttgagttcaaaaatccagacttagaggacaatttaagatttaatcagatacccactgaggaatttttaaaaagtccttaagaatgaccatgtactccattttacttttcttggtaaagactctaaagtgctaaaggcagctctgttttgctttttcctcctcctcctcctattattattattactgttatttttgagaaagggtctggctctgtcacccaggctggagtgcattggtatgagcacaggctcactgtagccttgacctcctcagctcaaacagtcttcctacctcagcctcccaacgaactgggactataggcacactgtaccacatctggctattttttacatcttctgtagagatggagtctcactatgttacccaggctggtcttgagctcctgggctcaaactatccttacaccttggcctcccaaaatgatgggattataggcatgaaccacggttcccagccttgctttcacctcctaaattcaacagtcagagagtacttacccaattaaaaaaaaaaatcaacagttgctttaaaccagtattcacctatagtgaagaactgccaactcagaagcaaattaaaataaatttttcaatatggcttttctgagatagatagacttttaaaataatggaagagatttactatctgttggtcactgctctcagagcttctatcttcctcatatacaattctctcttgtgctcccactgtgtgccgagtgtgggtctacccttcatggaaaaactgcggtattcttaccaatcgttaaatgccttctaaaagacagttatttgtagttttcttagtgatagtcctggttacaattctgtatcatgtagtttcccaatgtagcaataggaaacttcagtaatggtggattggagtaagcataggtatatgagatttatagtctacacaggcattgatttcaatcatagaactttttatcagaactattagcaagtggttaaatatacttgtaacacaggtttgggctacatagtgttaagtgtcacatgaggccttcttaatttcagtacataccaagttctccatcccaaatcccttcttgattctttgatgatttaacattatttatggataatttcttattctgacctttaatgtttctaaacaa

SEQ ID NO: 1933 - DNA, 1223 bp, Homo sapiens
taattctccaaagggatgtagatagtattcccctacttctaatatttttcctcttcttagatggaaaaataattgttgcatcatgtttcccctttttcagtagtcgaaaacgaagatcttccacagtagcacctgcccaaccagatggtgcagagtctgaatggaccgatgtagaaacaagggtaggggaaaaattaaatatttgtctgcctactaaaattaggtttgtcatgttttaaaccccacagctctagatttttatgctctttgaaaatgctgaggtataatctcacattgccagtgcaccatgtaggcctattcctagaataacaagaatccacttcatcaggaactcccttgcaagtgttattcctgaggagaatctcttggaaagaacatgggaaggtaggggtcaggaggctaagctatggccttagccaccaactctctttgcaaacttatctaaaatgagataagttacctggatgacctaaagacctttctggctcacaacatttgtggcctgtgccagaaataaattacgagtgactggtgttttaacgtaagagtctttgctgaactagaaagcaatattgcatttcacctaggtgtggagcctgctaaataactgtgttttatagactattgagaggagctgatctttttcctcttgtcattttcctctcagtgttctgtggctgtggagatgagagcaggatcccagctgggacctggatatcagcatcacgcacaacccaagtgagtactgactgtaattggggtcttgctgtgtgcttttttcctcctctggtctttacattatcactccttctaccagccatccacttattcttcagaagaaatatatggttttggttttccccttggactatctgggcctccatgggcagactgcagtaggcagctggaatgctgagagcctcagaaggctggataagagcaatcagagctgcaaggcaggcggtggtggaagattggtggctcatgttcatattctgccaacgctcataaagctttctgaggctgaactgagagtacctctaaggagggaaggctaaaggcttaagttggagactagacagctttgtgtaaatcattgtttcctgacttgcttcttggtcttggtgtagcaataggtgttcactaaaataaataacactgaatgaaagaatttatagtagggaaggaatcataccttttct

SEQ ID NO: 1934 - DNA, 1199 bp, Homo sapiens
tccaggaccttccactaataacaaaatcccaggatgttccatctcttatataaatgtatttgcatataacctatgcacatcctcctgtatactttagaagtctacatgtttggtacacatgcttatttttccactgttgaatccatggatgtggaactcactgtatatagtgttaggggttgatcactgtaacctggaatgggggatacttttcgtttttggctgcgtgagtgcttaacaaggacagaactgggcgtttacctatgcatgcacatgtattgcaggccctggccaacgtcaacattgggagcctcatctgcaatgtaggggccggtggacctgctccagcagctggtgctgcaccagcaggaggtcctgccccctccactgctgctgctccaggtaggaaacatggagtttttagtattgggaggagtgtagagattttttaaaaaatagtattatagacaaaattgccattaatttttcacaagtatatgaagtatggaaatcctaacacctgattgactttttttttctagctgaggagaagaaagtggaagcaaagaaagaagaatccgaggagtctgatgatgacatgggctttggtctttttgactaaacctcttttataacatgttcaataaaaagctgaactttactgctgttggtcttgtccatagttttggaatgtgctctgcaaaaatggtctgttttgtaatgttggctttcagcctattctgccatgacacaggctggattttccctgccaccattgccggatgtgagatttagacaatcctgatgctaacaagaaggcacctcatggtacagtgttgaaaactgcactggggtggcaggaggaaggatcagagcagatgctttgtccaggttacctgtgtaaacttgatgattataaggtgtgtcccctacactgggggtggagggtaatacagaccagctttagaaagcctcctgggtatttaccctatacaaccctgcctaagaacgaactttgacgtatgctgaatgttgactgctacatcccaaggttgtaaaaaaacaagacttagctatgtaatgtctcaccaaatgtttgggagttttatggtaacactgaaggagtgcagaaagtttacttaatagtttattaaggtctccagttacacaaagtggaaaaaaaaaaagattcaaacctg

SEQ ID NO: 1935 - DNA, 1199 bp, Homo sapiens
aataaactgatacattactaccagccacaggttttgaagattgtacagcttgtcttattttcttttgttgttattcctctgtcttccctctttcctcctcccgctaaataattatttgctagtagaccgtgggaaaaaaaaggaggaaaaaaactcgagcagcccaggactataatatatatctatttattatatgtctttcggttaattcctgatctgaggagcgctgtttttcactcccatgcgaaagtcaccagcgggtagggcctgattgctacttttcatgcatagttttagacacaagagggcattgtgacgtcgcgcccagcggcacccagtcgtaggccgagtcccgcagccccacgtgggggccccgcgctcccattggccagcgccggacgaagctgccacattattttgttacttttcagtccctatttggaactgctctcgcggcagttcagacctcgtgctcgtccccttcgcctgtctgtgtgtggtatccgtaggtccggggcacttttttttttggtgtgtgtgtgtgtgcgtgcgcgcgtgtgtgtgtgttgggtgtgtgtgttttgggggtttgccggggcgcggagaggagagccgggccgaggggaaggaaggaagccgtagagctccccggtctcgggctgcgtctcccctccagcgctctcctgcctgtgcgctccgacgcggcagcggcggtggcgctgagcgctcctcggtggggacgcggtgctcaagctgggagcagcgagaaccctttgcggaggcttcccgtgcccgctggacttaggatgccagggcgtttgatttgcacctactgagcccggagttcctccccggccctgggaagggcttgcagcggcggcggcggcggcggcagcggcagtagcagacggaacagcaggctctcctctccgagggggggcgtcgaagcgcccgcgccgggctcccgccctcaccctccggcgctcctgcggccccaagccaccacctcgtagcccgcctccttcctcttctcgccgcgagccccaggcccggacgcctctaggatcggacccgcgcgccccggatgcttggggctgccccggcgcgcccccctacaggcgcgacccgctgagtgacccggagggggcccgagctcgccccaggaggggcccccggcctcgggaccccgcgccggacct

SEQ ID NO: 1936 - DNA, 1176 bp, Homo sapiens
acaactgtgggctatgaggagatgggagggtggggcaggagccaaggtgggggctactccctggacagaaattcaactccacctccatctgtcatggaccacccctggccacacaaaggccaaggaaatgggattaacacgtgctcagcacctatatggtgccaagcccatgcctgacacttcaccttcagaggcccattttcctcatgctggctctattatcttcagatcccagataaggaaactgaggcttagggggggtcaaggcccagagtcttgcagagaggtggtagattgaagccctgcagtcttcctcctgtaccatgctgcatctccatgacttaaaggttgcatgctaaggcttagcatggactccagctctccgccatctacctcctaggttgaaactcagcccatcgctgttgaaagcttgcaccatgccctaggccgtgttcctcatttcatcagccacagtcctgctggctcatgcctggttacacacgcagccccctggagggcaggggctgggtctcattcccgagcccagtgcagccctggcacaattccttcccagaagcgattctggtaattggagtgagtggtgggtggaactaccccacccaggcaggtgtgtttctggaatccatggctgaggtggttgttgacaagtccgggagggagagagggcgaggaactgcctgcttcccccaaacaggaatttttcctaatgggctgagttctcagctgatgagagagatgttggacggaccctaacaagagaaggctctacatgcagcaccgagtgagtaattagatactaactaatttgcatttcacaagagagtcagggatgttgggggaaaaaaagctgcaaaggcctattggagaagggaacgctggggacaagaagccccgacagagccaaggaggagcggcggtgcaggcgtgctgccgggcattcggtggcacagctgtggagatggcgggacgggggcagaaggtctgaaggtccctgcaatgccctcgatggctccaaacagcagcctgggctgcctaccattgccttgggatgcttttttatttccatttggaatggccaggagggagacaggaagaaactgagacagagatgcatagataactcccagtttctagagtagggttaacaaagtttat

SEQ ID NO: 1937 - DNA, 1215 bp, Homo sapiens
caaacctgcaccactgcatcacaaattcctgcagcctaggccactgagaaaattgcagacaccacagatgaagattacagttgaaaaatctgtacagagaccatgttactgagtccacccagaaccaaagtcaacataccattcccgaccaacaacccaggatccatttacaggaaaaaggctcttgctatgaaagttaatccataaaattacaaaaatgactgttttggcagtacattgagctccacagagacagcgccagggcaagtgagagccggacgggcactgggcgactctgtgcctcgctgaggaaaaataactaaacatgggcaaaggagatcctaagaagctgagaggcaaaatgtcatcatatgcattttttgtgcaaacgtcgggaggagcataagaagaagcacccagatgcttcagtcaacttctcaagagttttctaagaagtgctcagagaggtggaagaccatttctgctaaagacaaaggaaaatttcaagatatggcaaaggtggacaaggcccattatgaaagagaaatgaaaacctacatccctcccaaaggggagacaaaaaagaagttcaaggatcccaatgcacccaagaggcctccttcggccttcttcctcttctgctctgagtatcgcccaaaaatcaaaggagaacatcctggcctgtccattggtgatgttgcgaagaaactgggagagatgtggaataacactgctgcagatgacaagcagccttatgaaaagaaggctgcgaagctgaaggaaaaatacgaaaaggatattgctgcatatcgagctaaaggaaagcctgatgcagcaaaaaagggagttgtcaaggctgaaaaaagcaagaaaaagaaggaagaggaggaagatgaggaagatgaagaggatgaggaggaggaggaagatgaagaagatgaagatgaagaagaagatgatgatgatgaataagttggttctagcgcagtttttttttcttgtctataaagcatttaacccccctgtacacaactcactccttttaaagaaaaaaactgaaatgtaaggctgtgtaagatttgtttttaaactgtacagtgtctttttttgtatagttaacacactaccgaatgtgtctttagatagccctgtcctggtggtattttcaatagccactaaccttgcttggtacagtatgggggttgtaaattggca

SEQ ID NO: 1938 - DNA, 1198 bp, Homo sapiens
cttctatttagttttacttcatcttctcacatctatcaaatattttttaaagatatgtttaagaataggaacagtatttttctttctttttttttaaattgctgctccttgtagagcagggctacgctgcaggcagtgtgcccagaatagcaagaacagtatttctatagcttctcagccttttggctaagatcaagtacagttatgtttttatagtttaatatctgaaatgtcttctatccaaagacaattttttttttttttgagatggattttcgctcttgttgcccaggctagagtgcaatggcatgatctcagctcaccacaacctctgcctcccaggttcaaacaattctcctgcctcagcctcccgagtagctaggattacaggcatgcaccaccacgcctggctaattttttttgtatttttagtagagacaggtttctccatgttggtcaggctggtctggaactcctgacctcaggtgatccacccacctaggcctcccaaagtgctgggattacaggcatgagccattgcgcccagccctaaatgagtttttggagctgggagatggaacagtatcttgcttgatctactccacacatcgacctggtattgcagtacctccaggaatggtacacccccccacctcaaaggataaaaatcaaaattaaaatcaaaaataagatttctatatatttacctcaagtactggtccagctccaagaataatctgttctactccactggcaaatcctttctgactgagagcagtaaggtggtgaataagaaagtttgtgctttgagtcttcccagaaccactctctcctgaaatcacgatgcactgattctttttgcgctgaagcatggcatgataagctacatcagccacagcataaatgtggggctcaagttttcccagttggtggttatcatacattttgacatatttggggttataaataggaagaaacttgaatgggttaataactattagaatactgccaacataggtataaattttttcatgcttaaagcgatttcgtaggttttctaagagagttttctcattcaaatcaggtaaactacataaatcatcaaagtctttctgttgaggctgtggaagaaaaccccgttccatcatcctgcgacgttcttctgttacccgtagccatgactgcaggctaccataat

SEQ ID NO: 1939 - DNA, 1179 bp, Homo sapiens
ctacagtattttcagcaaatgtgattggacaagtgggcctgtgccttatcttttggtggagtgaaaaaatttgggccagtgaagccaaatccttacagcaagcagcatgcagcatacctggctctttgctgattgcaaataggcatttaaagtatgaatttgagccgggcgcggcggctcacacctctaatcccagcactttgggaggctgagacaggtggatcccctgaggtcaggagttcaagaccagcctggccaacatggtaaaaccccatctctactaaaaatacaaaaatgagttaggtgtggtggtgtgtgcctgtaatcccagctacctgggaggttgaggctggagaatctctggaacctgggaggcagaggctgtagtgagctgagatcacgcaactgcattccagcccgggcgacagagtgagactctgtctcaaaataataataataataataaataataaagaaaaaatatgagtttggaatcagatatctccattacttccagctaaagcgtcatcataggtatttcctaagttttaagttctggataaaaactccactggtgcctactatctccaccatgaactctgttaaggaaccttcacttttgtatatgcctgctgttttctcttcatttccctgtcttctgcataagcatgccctcttgctaagtaattcaagcataaggtcttggaatactaaaatcataagcttaggagaaagaataaaataaaacttattccccgtccccccaaaatccctccaatttccttcccagtttcggaagatgtttcatttattttcagaatttctcctttgctgtggctacccatggaaagcccttgaagtcaagaacggtgtagcattccactctgacatctggtgtgagcctgaacaccagaaaataatttttctcccttccaggaaagtgaaaatgatttccctcaattctgcagccatctctgatgcaagtgtgagtttcacttgaggtcggccttggccactgtgcgctattcacctggacttcagggcatcagtctgtcaccacctgtcatcaccaacctttgaagctttaattccccagttatttgctaatgtgggaaaggaaggaggagggggagggcagaagcccctgggaatggagcttcctgtgtaattaagaagtaa

SEQ ID NO: 1940 - DNA, 1553 bp, Homo sapiens
ttttttaaataaaattggccacagctcctgtgctgtggggtggcatacacagattacgtactgatgtggccattgtccctgtataaggtagggtatcatcagatgacaggaagcagctagctctgaccctgggcaaggctttgcaccctctccaggatagtgaatgatgtccaaaggtccctgccaaccctgccatctgagtgataaggacatttcagggccttcctcctgtttgcctgggctgtgagtttggtgccaccttgtggtgtgaggaagtagtggtcagccagcctagttcagtactcaggctatggggcagctgcccaggtgcaaacctgcctggcttggcttttactcaccaacctcccttctcttcctccaggcaaggcccgaggcttcttcaagaagggagatgtggtcattgtgctgaccggatggcgccctggctccggcttcaccaacaccatgcgtgttgttcctgtgccgtgatggaccccagagcccctcctccagcccctgtcccacccccttcccccagcccatccattaggccagcaacgcttgtagaactcactctgggctgtaacgtggcactggtaggttgggacaccagggaagaagatcaacgcctcactgaaacatggctgtgtttgcagcctgctctagtgggacagcccagagcctggctgcccatcatgtggccccacccaatcaagggaagaaggaggaatgctggactggaggcccctggagccagatggcaagagggtgacagcttcctttcctgtgtgtactctgtccagttcctttagaaaaaatggatgcccagaggactcccaaccctggcttggggtcaagaaacagccagcaagagttaggggccttagggcactgggctgttgttccattgaagccgactctggccctggcccttacttgcttctctagctctctaggcctctccagtttgcacctgtccccaccctccactcagctgtcctgcagcaaacactccaccctccaccttccattttcccccactactgcagcacctccaggcctgttgctatagagcctacctgtatgtcaataaacaacagctgaagcacctgtttcctctcttttctgctggggagggggaggtggttgaaccctgccctctgagcaggctgggaatggctgcagcctcgtgccccgcagtgggagctatggtggtgtcacctgccatcctgcccacctcctggtgcagaggcgctgggaaagcagtagcttactatcttagggttacaggttgcccccttcagtgctgcggggagactttaatggcttacgtgaaccgaagatgggaaagagcagggacaaggcctccctcccactctggtagataaacccaaattgcaaagtggccttggccatggttcttccactttggtcttcctgcattagcgtatcccttatgggggctgtaggaggagtcagctctgggcgcctgagactgggtttggctcccaggtcctcagttgtggacctaggctccccttgggacccctcct

SEQ ID NO: 1941 - DNA, 1152 bp, Homo sapiens
ctcatggcccagtcaagttgacacacaaaattaaccatcacaagtacccagcatagtacctcactattactgtcattactatacagagttctttatatatgatatttaatcctcagaacatctctatgggggtgataggagttatcttcacttgcataaagggatgctaaaggttctaagaggccaaataacttaccctgttactcccagctggtaaaagagaactagcatgtgcccctagaactgtctgacattaatgctctttccatgacatactattgtttcctagggcctagacttttttggtacatctagccccttttcatcacatcttactttcctctacttttctttatttggttcttctcttcccattgattctccacagaagaagaattatgagcggcttcagaaagctctggatagtgtgatgtctattcgggagatgacccaggtattctgccttctctctgtcccctctcctttgcctgcccagttcaagtgtcctattctgttggtaatttgtgggagtgggatgaagatttagagatgctacgcactgtattttttttttagtctttcctctttaaccttcccaattcctgttctctgttttgttagctctgttactcctctttattctctttagtctttgtgtctcaatctttacctttgctgttaattcctttacaagttgttcatatttaatgttttgccataattcttagggagttaagaagtgaaggaaagacctctgcccagggttgggagggtgaggaggaggggggcttgaaggtaaggaactagacacaggggcctacatcttctatccttctaggggtggggcagccacatggagcggtgaccatcctttgactcaaggctgtccctcaccagacttccccacccctcgtctgcaatctctgcatgaatagacattcatttgtactcatttacaggtgggcctcttctcagcaaatcctgtatatcacagttgagatttacacataagatacacctaggaggaatgatttacttgtcaggaggacgctttgcattatttaaagatttaccacaggattccttagcctaatcttcttgggacattgattttatttattttttgatttataatcaactttttagggctgt

SEQ ID NO: 1942 - DNA, 1102 bp, Homo sapiens
cacgtctgtacaagtggacagaatcacacagctacctaaagtgggttcacctgtcatacagtttagaggttccacttacaacaggtttccatcagtagccaaagcaacagaaattttagcttaacggctgagggcttccgggattaccgcagggcgggcgggaagcgcctttccgctccggagggaaggccgcgtccccaagggactgcctaagtgggctggatccctatggcctgcggcagacaccaccacgtaggcggtccaggggtccctctctcggtgactggtgaccaggaggccgcaatctcttcacataaaaggtctacgggtttccgctcggccctcacagcggcagcggatcgaaccaggaaagcaattcccgctcggctcccctcgggtcccaggcccaggaaggccgggccgtggggtctccccgggctccacgcaggggcggtggggcggggcgcagtgacgcaaagaggagtgacgcgacgacgcagcgcgacgcggtgacgcacgcccctttgttggctcagtagcgatagcagcggccgtggaggtggcgttggggactgttttctctcggaggccggagcggagccgcgtctgactgaggcgggcagcaagcggccccctcgctccctccctccctcctccgcgccctccccgccgccaccagccgtcaaacgccaaccgccgctcctggggaggagccgcggctcgcggggccggagccaggcctgcgtccggacatcagccggagccggagcgagagccggggcctcggcgtccccgccctctccccgcctcggccagcgtccgccgggcccccgcgcgtcgcgccatggactcggacgagggctacaactacgagttcgacgaggacgaggagtgcagtgaggaggacagcggcgccgaggaggaggaggacgaagacgacgacgagccggacgatgataccctggatctgggcgaggtggagctggtggagcccgggctgggcgtcggcggggagcgggacggactgctgtgcggggagacgggcggtggcggcggcagcgctctggggcccggcggtggcggcggcggcggcggcggcggt

SEQ ID NO: 1943 - DNA, 1154 bp, Homo sapiens
tgtcagctggagaaaagcagttcttccttgcccacttgagaagtgcacgcccactcacccaacatcctggtctctaggaaagcctcatgtgaggttcctctttctttcagctcagtgcccatgggcaaggatcatgatttccattccgtgttacaatgacaatatttaatgagcataaccttctcagtctcctgctctcaaatttaggacagagccgctaaggacaaaacaatccctcccgtgctttatgatggcagcaggggctggggagcctctgagggactctttcattctgcagttgtctggaagcctgggtggcgtcatgagctgaaggatcatgctttcctgtcctggctccataggttataggctggctggtgaaaggttcacgtggcccaggctgaacttcattgcctagctttggatgtgctttctgccataaagactgatttttgttcgttctgagccttcaaggaatttgttttttacaactggaatatgctcctgtgtgtgttaacagatcatggatgttttatgttttcactgatcatttaaagagtttgacctcagagctccaggatcatcagtaaatttgtcatgttatatatttatttttttataaatcaagacttctgtgtgctcttaaatatattaaaaacaatttacatttcaggaattctgtctgtaattgatttttgtctccatcaccactctggaaccagataagataaaaatcattctgatcttcatttgtgatgtgcatgttactttgctcttgaggtgcttgcagtccctcatgctgagcctgagctataggcttgtcctgtggggttgaaagtgacacaaagtactagtatgaagtagcccagttaaagctgaattggagcatagcagtttgagagcatggtgagccttttcagcttgttgggagggcagtatgaacatggcagctggtggtgggcctgcctagttcaggggtcttcatttcccctgggcccacagcagcttctggaatctcaaagctacctcaagctcttcatttatgacctccctttccctgctttggataagaaagcttgattactccttcaaagtaaatttaagcctagaatgcagcttgtaactcaaagctgcattctaggcttaaattaagg

SEQ ID NO: 1944 - DNA, 1197 bp, Homo sapiens
atttatgaaaaaaatacaaataactgataaacataaaaagatacctcttaagaatcattttaattttctgcctcttttatgttcaacagagaatttcactttgaatgcagtaacttaaagtatttataaatctgattctagggtttgaaataaaacttttattagatactcatgtcatttaacaaggcttgtttatctcaggtagaaggtttttttttcccctaatgttcttctaaatggctcaaagtttggtttcctacttgaaagtaaatcttatttattagacatttgtagtgagatgactatatttatgtgtcacattcaaagaacaacagttaataatttttggacttgttagtaatatattttctgacaaataatagaagagagatttgcttaactttgttctttttctttatttttgtaggagccagcattcgaacgttcactccattttattttctggtggagccggtggatacactctcagttagaggctcttctgttatattaaactgttcagcatattctgagccttctccaaaaattgaatggaaaaaagatggaacttttttaaacttagtatcagatgatcgacgccagcttctcccggatggatctttatttatcagcaatgtggtgcattccaaacacaataaacctgatgaaggttattatcagtgtgtggccactgttgagagtcttggaactattatcagtagaacagcgaagctcatagtagcaggtaagttttaagtgatttttttttttgcattttcaaatatttataacatacatcttgataaaagcactgttctcttggagttttcttttaattagtagcaacaaatatactcatttaacagatatcaattgtgcatatactctgcgtatgggaccttgctgtagggcttgctcagtgccgtagagaataaactgtagcgtgtttccacttgtctgatggcttaatattgctatcagaagtactgagcagttcttttctccttttaaacttggaagtggcagaggaagtggtataggaaaattaaatcactttgacggccaacttctatcttacccagcataaccatttagtatggttttgtaaaacttgcagtaaagtcagaatcctggttccttgatgccttaaccaaggaaatgacattcaattggattaattgttttaaaatctacaga

SEQ ID NO: 1945 - DNA, 1221 bp, Homo sapiens
gtttgttttatttacagatgagggaaaaggtcaagtgggaagcttgtggtctcacagttgggaagctggctagtgaacccaggtggtctgacttctagctccatattccctcttgctcccttccagatagaacaggagaaaaataatctttccttagtggttttattactctgcaaatgacttttacttattttttctgattgtcaaggtaatgcaggctcattttagaaaacatggaaaatgtaaaaatttgtaaagaagaaaatacaatcactacagccacataacttagatttaatataactataaacatttgttgtacttgcgttttgaagaaaaatgcctactatagatacagttttaaattttatatacaggctgggtgccgtggctcacacctgtaactccagtactttggaaggccaaggcaggtggatcgcttgagcccaggagtttgagaccagcctaggcaacatggcgaaaccctgtctctactaaaaaaaaaaccacacacacaaaaattagccggagtggtggcacacacctgtaatcccagctactcaggaagctgaggcagaagaatcacttgaatctgggagatggagattgcagtgagccacgattgcaccactgcactccagcctgggcaacagagcaagactgtctcaaaaaaaaaaaaaatttatatacaattttgtgcttaacttttatcacctaacaggccttgagcaatttaaagtattactttaaaatattttagttttcaaagtatattacagaagtaataataactcaaataattttagaaatttggaaatgtatgaaataaaagtctgactcttcaggtgtaattgttaacagtttggtctacaccttcttggagctttttcttttcacaaatatattttgtctgttctacatattgttctaccacttgcttttgtactctgctctggcagtcctccatgagtgttcatgaagatctatttttcgtgtttttataattatttatttaaaatcacataagcggtatgaataggtgctcatgaaaattaaaacaatatggaaaaatacagagtaaaaattcgtagttaaaaaaataccatggtgtcctgttgcctgtcctgtgtccttacacctcacaagtaggagtgaatcagcttctaggactgtttctgtgtatttactgactgaagtgtgcagtcacagaacatgtgagtg

SEQ ID NO: 1946 - DNA, 1189 bp, Homo sapiens
gataagatttggataattgacactggaggccagagactgtgatagaacctaagcctggggggacagtgagagggtgggggcttatgcaggtagctggtgtgatcaggtgggcttcctaggaaaaggtgcccaagggagctgggaaggatgggtaggttttataccccagaggcagatataggagggtgttccagcctaatgatgagcagaggcttggaaatagggttgatcctggcgggtctggagggtggagaggagcctggggtgaggctttacaagtcaggagctgaagcagctggaattcaagccctgctgcctctcctcttgcctgcagactttggtttcgcacaacacatgtccccgtgggatgagaagcacgtgctccgtggctcccccctctacatggcccccgagatggtgtgccagcggcagtatgacgcccgcgtggacctctggtccatgggggtcatcctgtatggtgagacctcttttccctgcttctcaccctgaggcctacagtttcctcaggcaaggcctctctgggccacttctgaagggttctgatgaaaactgactgctggcccagggcccctgctgaggggcgtcaggccaggcttgacccattccctcccagcctccgctctgcctcccttccacagaagccctcttcgggcagcccccctttgcctccaggtcgttctcggagctggaagagaagatccgtagcaaccgggtcatcgaggtgtgtctagcagggccttagcgaccactggggggcagagggagtcagggccctgagggtttagacctcgttctgacctgcagagactggagtatgggctccaggctgcctttgtggtggaggggcaggttctaggctggaagtcgaggtgccaggctgtcccagggcctcaggtcagcccacagctggcagcacagtgcccattttgcaggcccttgtggggagaatgcaaagcagagccaggcccagccttcctaggagcatagtccagggagggaaataaggacccagaaacacgattctagctcagctcagggctccagcgagggtgcaccgggagcccagggatggaggcctcgctccccgctggctccatcatcctgacccatcctgttcctcctcggtctcagattccccacctgtccaacgcgtacctctggggttcct

SEQ ID NO: 1947 - DNA, 1228 bp, Homo sapiens
aaattcccgggccctggcttcttggcgcgatggtgaggcactaggggcgaagcgaggcttgggctgctggagcgggaatgagggggcgccaagtggctccggaaactgggggaggttgtactggcctctccgcaaacacagtgtgtgcgggcgtgagggctgtgagtctggtagggaaaagtccaccactctcccgctcccgagacgggggcgggggtacggggcgggtaagacagagcaggccggccggcttagagtcccggtgcttccctggcggaaggaagggcccctgcctcccggggcaggaactagggcttgtctggagctgggagtcctttcaggtcttccccatccccaagaggacctcccaaggatacccccttccccagccctgccgtggggcttgtacaagaaggtgcttagaatcaggctcactcttccacactgttaggaagcccctccgctctttccagagccagaaagtagtagttttggggttgagacttatccatccatccatccaatccatccatccgtacgttctaagcgcctggtctataccatgaagtgtgctaggcactgggaggacttgagctgccaagggaaggggaaatcggaggcttgaattggagtcatagctaaggctccaggggcagagacctaactgcgccttgtgtgtagtgctaagggggcttcctaaggatgccatcaaacttaaaggcggatggatggcaggagctggctggctgaagtacagtttgtgtaccaggggtagggaggcaagggtgggagacgtgtgtcttcagacagggaacagcatgtgcagagacttcaggttagagagagtatggctccccaggaatggatgcatttcccatagctgggagagtatcatctgcaggttagggaaagatgaggctggacaagtagagaacaaatcttcctggctcttggatcaccacaatcaagataatgaacgtatccactggcctccataatttccttgtgtgaggggctattttaagaagtataatcaagaaaggctgttctggctgggtgcggtggctcatgcctgtaatcctagcactttgggagagtgaagagggtggatcacctgaggtcaggagttcgagaccagcatggccatggcactccagcctgggcaacagagggagactctgtcttatttttttattttttaaaaaaagaagggctggtctgatgtgtc

SEQ ID NO: 1948 - DNA, 1218 bp, Homo sapiens
ttagattttctttgttaaggaatgtattttaatattttaattctttgtttgtttgagatggagtttcactctttcgcccagtctggagtgaagtggtgtgatcttggctcactgtaacctccgcctcctgggttcaagccattctcttgcctcagtctcccaagtagctgggattacaggtgcccgccaccatgcctagctaatttttgtatttttagtagagatggggtttcaccatgttggccaggctggtcttgaactcttgactccggtgatctgcctgcctcagcctctcagagtgctgggattacaggcttgagccactgcgcccggccggaatatattttaattcttaactggcccttttgctaataagaataatttttacagttggccattaagattttatgatctgttgatatttatagtggtggctttatttgtatatttctgatagatggataattaggaacttatcttttaatcataggtggcacaagatctctgtaaagtagcaggcatagcaaaagttctggtggctcagcatgatgtgtacaaaggcctacttccaggtgaggttttccagtagaaaaaaatgtagtgtctaaattacgcttgaatatatgaatatgaaagtatttcaaaatatttttttatcaaatgtgtttaattctcagaggaactgacaccattgattttggcaactcagaagcagttcaattacacacacatctgtgctggagcatctgccttcggaaaggtgagaaggttgagaatgtggaatctgatatcactgcttgaaagggttagatttcattgtgctgaaagtatgcaacagactgtttatgtagccaatctggatttatctgaattgatgtggtagttttgctaaaatttattctttcaagattttgtcataattttccgttaaaactaccatttccaggttttcaaattatgttgtggagaaaactctaattaggctattattttaaaattttctgcatgtaaaagtaatgctgaattctgcttgcatgtgagagagagagtgaacgagcaagagtcatttctattagtagcccattttaagagatggtttatttggatggctgatggatatctagaaaagccaaattttatctacgtagggaatttggaaagggcttgtggtggttgaagacatccttaaggtaaagaaagctgtaatctgatcatgtg

SEQ ID NO: 1949 - DNA, 1120 bp, Homo sapiens
cgctgggcgagcgccgcagcgactacgaccgcgaggcgctgctgggcgtccaggtgaggcggccaggccggtgctgggagggccgggcctcgcaccgcggctgccgcgggctttgtcccgggacaaaggggggcggccgggcgaggcctggcaggggcggcctgacaatgggggccgggcggcgcggcactcgctctctgggggtcctggggcctggaaagcctgaggagatagcacggcccaagagctggatcccttctacccctcagatcatggagggtgtgtagggggtaggggccttgaagtgcaggtgcgggtcaccccgaaaccctttggcaagggggtcttctagtagccctgtttttctccaccattttgccccactgatagtaatgcttggccctcctgtgtgtcgcttccccctaaaggaagatgtggatgaatatgttaaactcggccacgaagagcagcaaaaaagactgcaggcgatcataaagaaaatcgacttggactcagatggctttctcactgaaagtaaggactgccctacacgactaacaatggagacaaacacaaatatgttaagcagcggtgtctgctgaatgtatagattgctagtgtcccaagttggaagtcctgtgagaaggagaaaaggacatggagaataggctttatacttacaaatctttagacactgagaaccaagtaaaactcggtgctttctccagttatatataaacatcattgaccctgtactctatgtggaagtcacaccttgagacaccctctttctcacgtgacttttgttagtgtcaacaatatgatttattttagagaaatatgccccaaaactttaaggcagtaaatgatttatcgctcttttgatatatgcttcatttaaattttaggaatttgcttctttttttaagcaagtagaaaaagacctgttgcctgtgaattacgtttattataacattataccaaaatgttagagctggtaggggccttgggatcatcttgtccacatcactttgtagagatgaagaaatgaagcacagggataagtgccttctacaaataagtggcaaagctggactagaatccaggtatcctgctctta

SEQ ID NO: 1950 - DNA, 1308 bp, Homo sapiens
tttttggtcttgttctgatttggaaggtgaattgagcaggtctgctgctgttggcctctggagttcatttagttaaagcacatgtacactggtgttggacagagcagcttggcttttcatgtgcccacctacttacctactacctgcgactttctttttccttgttctagctgactcttcatgcccctaagattttaagtacgatggtgaacgttctaatttcagaaccaattgcgagtcatgtagtgtggtagaattaaaggaggacacgagcctgcttctgttacctccaagtggtaacaggactgatgccgaaatgtcaccaggtcctttcagtcttcacagtggagaactcttggccaaaggtttttgcggggaggaggaggaaaccagctttctggttaaggttaacaccagatggtgcccctcattggtgtccttttaaaaaatatttactgtagtccaataagatagcagctgtacaaaatgactaaaatagattgtaggatcatatggcgtatatcttggttcatcttcaaaatcagagactgagctttgaaactagtggtttttaatcaaagttggctttataggaggagtataatgtatgcactactgttttaaaagaattagtgtgagtgtgtttttgtatgaatgagcccattcatggtaagtcttaagcttgttggaaataatgtacccatgtagactagcaaaatagtatgtagatgtgatctcagttgtaaatagaaaaatctaattcaataaactctgtatcagcccccaacatattatttttcattatttgggggatatttcagttccagagcagcagtatcatgttttctttgttggtgctgtctatagttcatcatggtttacgtgtgttttcgttatagctgttgccagattctaaagggcttgatattcaaaaaaccacagatgctttcagtccagtatatcctagaaatatagagctctactttgtgcaatgcactggggatacagtggcgatactgtccttgtcttcaaggagttcggagtcctagtataggagacatacataggagaagataattttcacactgcagtggttgtagtaatagaatgggagtccaaaggggagttccggagaggtcaggggtgacttcctggaggagatgcccaagcttggaggctggataggctttgttgaaagatggtacacaagagtgtgaaacaaaattgtgtgtgcagggagcttaaaatacaaggctggggaaagaagttggagaagcaggaaagcccaggccctctagtgtcttacgg

SEQ ID NO: 1951 - DNA, 1123 bp, Homo sapiens
aaacatgtctctgccttgctaacgccatcaccagccttttctcctctctgactcttctgaggtctagcccagcgcctggtacaataagtttctccataagtatttgttgtttttctttgcacttctcaccaacagtgctgccaagattttaacctggtcaggagaatctggtcaggcagagattagtgtctccaaccttcctaggggagaatgggctaggtagaaagatagcactcagagggctctgaatcatctataagggtggcatagtcataggaggagagtgggtttggtccaccagaacctccctagggagccatctgcgtccaagggcggccagaggccaagaaaaggcgctgaggccttggctcctttaagaggcgtggcctcactgcagcctccgcagaggcgattggctgaagctaccggccgcgtggggcgggactcggttgccagggagcggcgcgggagccctgaggggactgcggcggctgcgcggaggagcgaggcacttgctggggtcggggctgcgcgacggcgcaggggctgcggggagcgccgcgcaggccgtgcagttcctagcgaggaggcgccgccgccattgccgctctctcggtgagcgcagccccgctctccgggccgggccttcgcgggccaccggcgccatgggccagtgcggcatcacctcctccaagaccgtgctggtctttctcaacctcatcttctgggtgagcggggccgggcagagcgaggggccggcggcggggccgggcgaggccgcggcggaggcgcccgtgggggccgggcttgggcctgggcgggcgcgcgggggccgcgcgcgggccctcaggcggctgaggcgaggggagggccgggtgtgaggccgcttcgcgaggtccctgccggaccaagccgggagcctgggcgcggaggacagcgaggggaggccttcagggactccacggcctccagccggcgcctccgcgctcggcccacgcgggctggctccgtgccaggcgccccagtctcccccccccggagtcgccggctggacggagagcgcttattgcagactgtagcaggacgtcgggctcgaaataggatcttcgccagaggctcaggt

SEQ ID NO: 1952 - DNA, 1196 bp, Homo sapiens
aatggtatagccaacttggaaaagagtttggcagtttcttataaagttaaaaataggcttaccacacaactcagcaatcctactgttaggtgcttaaccaagagaaataaaaacttacattcacacaaaaacctgtatgtgaatatttatagtggctttattcataatctccaaaaactggaaacaacacaaatgcccttcaactgctgaatggataaacaacggagtactatgcagcaacaaaaaagaaagacattctgattcaagaggcaacacagatattaataaatgtgaagtgcattatgctgggtgaacgaaaccagactcagagggctacgtttagatgactccatttgtatgacactctggaaaacgcaaaacaacaggaacagaaaacagatcagtggttgccaggggtaggggctgggaggagttgactacaaagagacagcatgccgggatttgggggtgacaggattgttctgtaccttgatggccatagtggttacacagccacacgcagttgtcaaaactcatagactgtgcactagagagggtcagttttactgtggggtaattatacctcaataaacctgatggaaaaagtttgctgtgggactattgaaacaaggaaaaccaaataacaagtcagtctgtcagggcagtgagacacggtgaggatggcttcctccagggtggcctatggaggacattggagactgtgagaaggaggtggtcacagagctttctgaggaggtggcaggtggctgtgtggtctggaggggaggtgagggtggcccacaggtcagggctgggttgggcagtgccctgtgggccaggttaaggggcttcaccctcctctgggcatggtgggtgccactgagggcataggcagagggtgattgaagcacagttgtgggcaggatggtctgggaggagggtggagggaggagggaggaagggagacagcacctgtggccatgtctaggatgagtgatgggggtgtagtgaagaatgaggaagggtggatcggggtgtcactgagagggtgttcccaaggcggggtcagctgccagagaccacaggctgaggcgggagagctgggggtgctgatggggtccttggggaccttgctggggatcttgagcggtgctggggctgaggacctgtaagtgaagcttccaggaggcagggga

SEQ ID NO: 1953 - DNA, 1166 bp, Homo sapiens
tccacccccaagttcaggacccagatcactctctggagaaggcctcagcctcttgccttggctttcaaggctctgcgtgatttggatactcgcttagctcttatttatatatattttaaaagcatcagcagtttatctcatgcccactaaactatcctgcctccgtaccctttgttcatactttctgctctgtgtggaatgcccttctttcttcccctgttctttctcttagacccaagggttctcagccttatttctgcctctcccatctctgatttactttcattttctgtatcgatttctcaaaaaatactttcttgattctttcatcatcccttttcccaccctacccccggttcctctttccacattataatctatgactgcctctctcacctaactgccagtattagcttttcaggacaggaactggttttacacattttggtattccagcatctagcataatgcctgacacttagctgaataaagggagtaaataaaacagatttgtaaagtcagcaaatgctttttaatttgtgaatcttattttaatgatgatctgattttctttttacaggaactatataaagttcagaaaacatggtgagttaatacacatgccaataaacggttgcctgataaacagtattgcttgtactcagtttacagacttgagtgggaaaattgaaatagaaggaaagcagtgagaaggtgccttttttcttgtcagtttcctctcacctattgaactttgtataccaggataggttttgtaagatcatttgtaggcttgcaggagttggcctactttcagtgggtaggaatcactcatgtgtttttcctttgcagtctcgaagatatgactccaggaccactatattttctccagaaggtaaaatagaaattgtttaatctgcctcaagtttaaaaataaatgtgttagacttttagaaaaaaaaattacaaactttttttggtagttgcaaagttcatcctttttgtactttgaagcaattatcatcaccaggttgattataccatagaagagtgaaagtggaaatttgtttctagcttgcttcattgctgatttcttttgggccagtggtgcaggagcacagaggagagtcttggcttctcactgcttttgttttgtaggtcgctta

SEQ ID NO: 1954 - DNA, 1199 bp, Homo sapiens
ggtcttttcaatcattagaatctcaggcttctgtgaaaatttgtcagttctggagtagatgcagaagaaggggttcagttctagtagagttagatatttaaggaagatattcctggagcagggtccctatgtagcacgtatatcttatctgaagtatagtaatttaaaaattatttcatgcaatcaatgataggcctgcttttatattaggcttatattaatacaattcatgtgcattgtttaatttctgcattgttattttatatgtgtgtattttagtgcagatggacgttttgaagggaccagtacgaaaacagtcatcaggtacaatggcactgtcacctggactccaccggcaaactacaaaagttcctgtaccatagatgtcacgtttttcccatttgaccttcagaactgttccatgaaatttggttcttggacttatgatggatcacaggttgatataattctagaggaccaagatgtagacaagagagatttttttgataatggagaatgggagattgtgagtgcaacagggagcaaaggaaacagaaccgacagctgttgctggtatccgtatgtcacttactcatttgtaatcaagcgcctgcctctcttttataccttgttccttataataccctgtattgggctctcatttttaactgtacttgtcttctatcttccttcaaatgaaggtgaaaagatttgtctctgcacttcagtacttgtgtctttgactgtcttccttctggttattgaagagatcataccatcatcttcaaaagtcatacctctaattggagagtatctggtatttaccatgatttttgtgacactgtcaattatggtaaccgtcttcgctatcaacattcatcatcgttcttcctcaacacataatgccatggcgcctttggtccgcaagatatttcttcacacgcttcccaaactgctttgcatgagaagtcatgtagacaggtacttcactcagaaagaggaaactgagagtggtagtggaccaaaatcttctagaaacacattggaagctgcgctcgattctattcgctacattacaagacacatcatgaaggaaaatgatgtccgtgaggtctgtgatgtgtatttacaaatgcagatcttcttccattttaagttcagaagttactttcattaattttggcagagtaaacagcatg

SEQ ID NO: 1955 - DNA, 1189 bp, Homo sapiens
atgaaattagactgaagtggtccctaggaaatccaaaaataaataaagtgtgtatgtgaggaagatgaacagctttctaacatgtattattctgaaccaacttttaatttggcatgaaattaatctcaggctagagtctctcaaaatattaaaataagtaaacactactgggcaagaataagtatatatagtaagaataattttttttagtttattgtaaaatatccaagtctattttaatttttaatctatcaaaataaaccacttgtaatataagttgatgtgtaaatgaacatattttgtagtgtcttttaaagcttatatctatagtagaccttcaggctagtgtctgtccctgagctgagtatagggtcacttaccgtttagaggcagcaatgggaggcagaaatcgatttggcttctaactcagtgtgtttgttatatcttaaaatatgtacacaatttacaattatttaatgcatttttatttttttcctaacaggttgttgaagattggaaattcatagcccaggttcttgatcggatgtttctgtggacttttcttttcgtttcaattgttggatctcttgggctttttgttcctgttatttataaatgggcaaatatattaataccagttcatattggaaatgcaaataagtgaagcctcccaagggactgaagtatacatttagttaacacacatatatctgatggcacctataaaattatgaaaatgtaagttatgtgttaaatttagtgcaagctttaacagactaagttgctaacctcaatttatgttaacagatgatccatttgaacagttggctgtatgactgaagtaataactgatgagatacatttgatcttgtaaaaatagcaaaatattatctgaactggactagtgaaaaatctagtatttgtatcctggcaaataatactaatttataatccacagtaaagttcatcctttgactgtgctggagaattccagttgtatttgaagactgattttaaaacttttctgcatttggtaaaggtatgtaaactttcctgtactcactgagtaacagctaatctttaatataatattatactgctatatttaaaaagctgactacttgatataattacttaatgtgatgcttgatataataattacttaatgtggccgggcacggtggctcac

SEQ ID NO: 1956 - DNA, 1238 bp, Homo sapiens
tgtcttagttgaaccaccgtcatgccaaagaaaagaattccgaaaatctctaagtcacacgatgccgagaggccagccagctctgcagctgggctttcagttccaattgtttccagagagtgtgcaggacatttctccgcagccatcttttgcagtgggccacgagggtgctgagaacctctctggtccccgcgcttcaaggggtgggcgctctgccggcgggaatctttaggatgaactggaagcacccctacactcactcctattctccgggctggagtcggcatcgccttccttggcccgccttacctttaaggaaacggaaaggtgctgaccactagagggctgtttatacatttttattaaacaacagaagtttgtgcgcacagaatcagacatgaaacacaagttttaaaagtcatgaaaaactttaccaaaaaaaaaaaatatatatatatatatatatataaaatagaaaaatcatttaatacgaaatgtaattcttagaacaaatcaaaacaatcttattcctttgaaaagatctaggaacaacacttttctctaactgcccggctagctcagtcggtagagcatgggactcttaatcccagggtcgtgggttcgagccccacgttgggcgggtttgttttgctttcgtttgaccaacttcaggtctcatcaacggtagtaattccaccagtttcagttgtcatcaacggtaataacagacttcagcccggatggtcttattttcaaataattcaatacatacaaaactaccaatactattttaaaaaaggaacaatgggcctggcacggtggctcacacctgtaatcccaacactttgggaggccgaggagggtggatcacgagatcaggagtttgagaccagcctggccaatatggtgagaccaccccaccccctgtcccccaccccgtctctactaaaaatacaaaaattagttgggcgtggtggcgcgtgcctgtagtctcagctgctcgggaggctgaggcaggagaatcggaggctgtggcaggagaatcgcttgaacccaggaggtggaggttgcagtgagctgagatccggccattgcactccaacatgggcgacagggcaggactccgtctcaaaaaaaaaaaaaaaaaaaaaagaacaatgaaaccagtaaatttcatcttgtaaattacacacttaaaggctatctgccctataaaagtatttgttgctgagtggcct

SEQ ID NO: 1957 - DNA, 1193 bp, Homo sapiens
gagtttctgcttgagtttgactgattagggaacagaaaaacagaaatatgtcggccgcggtggctcacagctgtaatcccagcactttgggaggctgagacgggcggatcatttgaggtcaggagtttgagactagcctggccaacatggtgaaaccccatctctactaaaaatacacaaattagctggtcgtggtggcaggcacctataatcccacctactcaagaggccgaggcatgagaatggcttgaacccgggaggcagaggttgcagtgagccaagattatgccactgcactccagcctgggcgacagagcgagactccatctcaaaaaaaaaaaaaacaaatgttatgaatactgtttgacataaggggaaagcacaatgatatttctacaaaggaaatagaatgttggcttgcaattcaaggcagccagtatgtgaacaggaagaatgtaactcttaagaacagacctgttgaaattgaagtaggcatagtccgttttggggatccactcagagcccttctctttggtccaccttcagcctgtttccaagtgctcttttgtcatacctggctcttccggcttgcctcaccgtgtggttcggcaggttttctctctttatcagtaccagaagctgagctctcactctcctcttgccacaatttacttacccgtggttctgttttgaggggccttgcttttctccagtaatccagttgcaaaggatctgacagatgacttcattttctgtgttaatgggcaataactccttaatgtgttctcttccgagcacagttgttttcatttagtgcactcttagaggctcagtcttctctaaaattcagtcttaggtcaggcacggtgacacagcctcactgagacctccctgtagtctcagttactgggaggctgaggtgggaggattgcttgagcccaggagtctcagaccagcctgggcaacatagtgagaccttgtctctacaaaaaataaattagctgggcatggtggctcatgcctgtagtctctgagcccaggagtttgagaccagcccgggcaacataacaagaacctgtctccaaaaaccaaaatcaagtcttaaaattctaataatgccatgtcatattggtgtagaaagcatttttttcccctgcagaagtcacttaaatcatacagtcctgagattactt

SEQ ID NO: 1958 - DNA, 1293 bp, Homo sapiens
ttaatactggacactgacaaattcatgtttactataaaatctccttacatggaaatgtgactgtgttgctttttcccatttacacttggtgagtcatcaactctactgagattccactcccctccaagcacctgctgtgattgggtggcctgctctgatcagatagcaaattctgatcagagaagactttaaaactcttgacttaattgagtaaactcttcatgccatatacatcattttcattatgttaaaggtaaaatatgctttgtgaactcagatgtctgtagccaggaagccagggtgtgtaaatccaaaatctatgcaggaaatgcggagaatagaaaatatgtcacttgaaatcctaagtagttttgaatttctttgacttgaatcttactcatcagtaagagaactcttggtgtctgtcaggttttatgtggtctgtaaagttaggggttctgttttgtttccttatttaggaaagagtactgctggtgtcgaggggttatatgttccatttaatgtgacagttttaaaggatttaagtagggaatcagagtcctttgcagagtgtgacagacgactcaataacctcatttgtttctaaacatttttctttgataaagtgcctaaatctgtgctttcgtatagagtaacatgatgtgctactgttgatgtctgattttgccgttcatgttagagcctactgtgaataagagttagaacatttatatacagatgtcatttctaagaactaaaattctttgggaaaaaccctcaattgtgattttaataaattaaaagtagcacattacatggttagaaaatgtcagtgttaaagaatggtacaaagtgaaaagtgtatccctctcttgccgccggtggtagcttgtcccagtggaagctgctgttaacaatttgtgcccccacatccccctccctgcccatccaccaaaaaaaagtacatttacttatgtaaatgtacttatggtgatgtatgtttgttttggcctcacagcatctgtttccccttaatttggtagctgctcacatttccctcgaaagaaccacaccctctgcattctcagttctctgctttggatgggacatttgccctgcagtccccccaccctccaggccatgccctctccagggtgaggcctgtgtgatctaccgtactagggtactaggccctgaaagaggcttttcttgttcctcctgcatcttgaacctggagcgggagctgttgtaggccccgcccttggagaagagaactgtctgacagtggggaga

SEQ ID NO: 1959 - DNA, 1174 bp, Homo sapiens
ttggtaaagcaggtcactagattataggagtgaaaagccttttcgcacaggcttcagagtcataaagatcagacttgaagtcccagctgtttctcctcaacagtgtgaatgtgcataaatcctttaacttgcccaagctgtagctccctcttctacctcttaggagtatgtgcagatgaaataaagcgatccacgcaaagccatagttcagggtccccccgcgtgccgtgttctctacatgttagctcttaatagcacacacgtggcagcagttgcaagtgcctggcacaagggggcgctcaatggatgaccatttctaatgcggttctcagcccagagatggttgtaccttcttgcagctactaagcgagaccctctcctctgtagttctgcggacaaaaaaactactgggaaggcctcttcagccactgttaatgttgggcccctcccttctccccgggagaaactcttctctgagtttccctccttccattcttaccgcagcctttcctgctggacagtccaattgttgagagagggacttcctgttactgcagagagagtaaggctgcctgtccgtgggcgctgcagatttcttggtcattggaaaatcaatttctcttgtgcaatagggattaacacctaaaccagaagaggaaaaacagcaagaaatcatttgtgctctcaaaatgcaaagttcaactaagaacaatatcagcccctcattagccaggggccagtgtgactgtaaaccacttaacaccctgtgccaggtgcgtggtggggagaggtggccgcggaagacatgagcagcattgtcatgatctccacgcatgctgtctgtactgcagggtgcagatgggactctcacttccattttacctccattcaatgcaacaagagttgacaggcatttcctgcaagtcaatcagtgtgctgagctctcagaaaccacaatgctgcatcagatccaggccccggtgttttcaatcccaaccaaggagagaaaggaggaaaacacaaaggtttccgaggacaagcacaaacaggcgagacccagtaggaacaggggcaggggagatcctatctgactggctcttacacaggcactcacacacagggatacacacacacggagacaactcttgattctttggatatctgcaaaaatgca

SEQ ID NO: 1960 - DNA, 1178 bp, Homo sapiens
gattctacaggaccctccaaattccataattcctgaattgacttcgtagaaaatattaacctttggaaaagtgatcattgcaaatggtaaaggacacaggagtggcatcgggtgatgcaggcccacatataattccacggtggcctgtgagtagatctggagattagggtttggcagtgggactaaggttcaacacagccttcttaaactgaaggctaagactcctcactctcagaaccttggttaacctcaagaaacattccagttccctatcagataggaatccaagactccctctgtggacaccaggcaccatgaaatccaagtctggcaatccagaggtgagaccacagtttcagtttctagggtctaaattgattaatgcaaatgtaatccatttacagtataatcccaggttcattgccctgtggtaattcaaacaatgtgagcattcaaggcacagaaataacaaaaaggctttttttaacttctagttatttttaaacatttttttttaatcatcataggtacttacttggtaggggagataccaagatcacaaagttggtttcccagggcgaggcttattcagtacactccaggtgtgctgacccctgcgatttccccaaatgtgggaagctctactgcatactttgtggtagagagaactgtgttcgtgctctccccttctcccctgacataaatggttttttttttccttttttgagaggagtctcgctctgtcacccaggctggagtgcagtggcaccaactcggctcactgcaaactccgcctcccgggttcacgccattctcctgcttcagcctcccaagtagctgggactataggcttccgccaccacctccggctaattttttgtatttttagtagaggcagggtttcaccatgttagccaggatggtctccatctcctgacctcgtgatccgcctgcttcggcctcccaaagtgctgggattacaggtgtgagccaccgcgcctggcccaaatgtattttttaaaaagaaaaaaagattgttttatcatcataaaaatagtacatttggtgagaccatttgtttaaatatagaaaaaataaaatgaaaatgacctttaaccccactatccagacgtagccactattgacattttggaatatatcctccagctctttttttc

SEQ ID NO: 1961 - DNA, 1249 bp, Homo sapiens
ggacactgctgatgattcccaagattgagatgatgacggtgatgacgactgggtgaacagccatcacttcaacattgtgataatccttcacagcaagaaaccgaataaaatactaacatttctaacaactgctctgacattgtaaagagatccaacagaatcactcctgctgaaaaatacgctttctgccacctacacatttctatttaggaagtaaaatttgcttcatggtcatgaccccattagtcagtgttacagctgtgttggggataggaagtatatctggcagattgatatttatacacttttttataaagcagattttaaaatatagtaacatccatttttttcccttgaaagtgattctcttataaaaaatgaaagtggagtttaaggtatatcaaatcgttgtggaaggtgattaaaaatcaaaattcttttaaatatcaacttaattttttctaagtaagatacaaaaaattttcatctaaagtaatatttcactttatattgtaaagaaggtaggtatattggtggctgaggtctcttgaaattgctaaagggaaatttttctatggtaatgctcttacggatataaacctcagttaaatggaattatctatgggatgtgtggttctggttaactaaaaattaaccagtaaacactctgtagtaaccattacagaaaatacttctgccttaaaaaatatgatatgccagagatgagttagtgtttcttgacgttggagaccttttaaatgcctcatctgttgtactgaacaattgaaactgcatgcagccataaaagggacaagaaacagaactgtttactaactttgggacatcccctggagtttttaaaaataaataaatatatatatatataaaaaaaactcttttatgtcatttgcctttttcttctaaaagtgaatataaacagaattttgatttgttttttgtttgttttttgagatgaagcctcgctctgttgccaaggctggagggcagtggtgcaatctcggctcactgcatcctccacctcctggattcaagctattatgcggcctcagcctccagagtagctgggattacaggtgcccaccaccacgcccagctaatttttgtatttttagtagagatggggtttcactatgttggccaggctggtctcgaactcctgacctcagctgccttggcctcccagagtgctgggattgattacaggcgtgagccaccacgcctggctgtc

SEQ ID NO: 1962 - DNA, 1195 bp, Homo sapiens
agcaatgatcccacattggcctcccaaagtgctggaatcatagaacccaagctttttgatggaggatgaaaagttaaattgtagtgtattgacataacaggatattatgccgcattaaatatgaatgagctacagctatacattggttgctttcaatgtagttaatcagagtacctttgcaattatcagtgtcaaaaataataaagcaatatttacccattattttaaaaaaaatgattgaattcccactgtatgccagattactgttctgagtgccagggatttaacagtgaacaagaaggacacatcttctgtcttcatgaagcttatattttagtttagagggggagatatgaattagtaagcaagcagagtaatatgtaatttaatgtagccaggaaaggtatggaaaaagatgaagcaaagtaagaggctagcatgtatgtgatgtgtgtgtttctgtataataaaggaagacttctgtgaaaatgtgacacttcagcagagttggatgttctgaggaaaaagtaggaatgagctcagcataatcaaggaaaagcaagaaggcaaatgaggcgcagagtgagcgagctaggacctgggggagaaggacagaagatgaattcaggtaggtagacaaagccatatcatgtaaggccttatagtttagtaacaagtttagagtttttaaagtaggatggaaagtcataggagagttttaagcaggggaattacatgatctgatttatattcagggactgaagaattgattgttgggggcaaagggaggggtggagtaggggaaggtagattcaaagggcccagttggtaggctttcatagaagtttggatgatagtggagtagatagggatggggtagagtagcagtggatgtagaaagaagtggttagtttggtgacatgttttggggtataattgaaggacacagtgatgaatgagatatgtctgtgagggggaggaataaatcaataatgaattccaggttctggtaagggcatctgggtggatggtgacgccctttactcacatggagaatcttgaaagctaagtagattaggccacaagatgttaagagttcattttagaaatgccagtgagacacccaatatgtgagtctgaagctcatatgagaggtctggagtttgaagatagaaatatgagactcatcaacata

SEQ ID NO: 1963 - DNA, 1158 bp, Homo sapiens
atgctaataatttgaaccctatagaaaattgcaaaaaaaaaataggttttatttttaaggaatgcattttttaaaatgagataatgttgtgacaacattttgtaaactgaaaaaaaaaaaagtgtttgttaattccctcacacacccataactatttgtcatcacttagactaaaaagagttaccgaggcagggcatggtggctcacacctgtaatcccagcactttgggaggctgatgcaagtggatcacctgaagtcaggagttcaagaccagcctgaccaacatggtgaaactccatctctactaaaaatacaaaattagccgggcatggtggcacgtgactgtaatcccagctattcaggaggctgaggcaggagaatcacttgaacccaggaggtagaggctgcagtgaactgagattgcaccattgcactccagcctgggcaacaaaagcaaaactccatctcaaaaaaaaaaaaaaaaagttacctggcatggtattgtacagaacagggtctgcacaatttttcaaaagtaggatagtaaggtttgcttcaagctcatctgtcattctgtaggagcagtgggggattttggaaggcgaaaaaaggaaaagtcaatgggtagcaacactgattctgcagctggaggactgtctatacactactttgcaaatgggggtgagaaaaatgcagtatgccagtaagcaaaagtagaaaaagcaaatgtaggaaattaacagcaaattttttacaaaagaaggaaggaacacagcagagctttgccttgttgagaacaatcggctgcaaactgaaaactgaccagcatgccttgagctgttaggccacattactaaagtctctgattgctcaatctgcaaatgagtatcttcagcccttagctcctatgcagaaacatctgctcccaacctgacgtatgtttatttactggcctaaactgcctttacctcaaaagaccatggtaacaggcagactgaccaataatgtatgcctctgtgcttattggcagggctagctttggaacagcatgcaggagatgggactatgtcacacagcatctaataacaaatatctgtccagatgttctcgagcatcatagtgtaactctcattttctgccctttataatactgcctc

SEQ ID NO: 1964 - DNA, 1231 bp, Homo sapiens
tctcagcttcaccactgtgctgctgggtgacttcaggcaaggcccattcctctctggaccctggttcctcatctgtgtactgtgtgtgtgcgttttttaaaaatcagcttacttttaaaatttgaaatatgaaagtaaacacaaagttaaaatagcaaatgctcagcttcgtgtaccatctaatcctgttttatgtatgtgcatgcgtgtgtgtgcgtgtgtgtgtgtgtgtgtgtgtgtgtgtgtgtgttctgggctacctcagagatccattctggctttgagtgtggtatgtcccatcttgggcaggtccaagggaaggcatgagcgatctggctttgggacaagtatggggctggccctagggcccggatgcttctccctccgctgcctatcacagaggggagtttgtcttgcaggaaacagcctcatccatcagtggcaatggggggctgacagtggccactcccccgccagtcctggctggaggcagactcataaatcccacaccaggccgggctttaaattcctttgattcacatccggcctcttggaggacagagacatttggggctgtggggctggctgttctctcctgggcaggacaggtgggtattgggaagaagcctcttcatgggcccagcagtctcagatggcctctccgaggatatgcagtgctgagcccccaggatgcctcaggctcagcctgagccacctctgcccaggcccaggccacctctgcctaggccattcctgtgccctggcctgaatcaccctggaggtcacctatgtggacacactctgtggcctcagagatctcgtggggcctgtggcccagagggttggctccatgaacttcacagcatggtcacctgccaatccccatggcattctgtcttggggctgtgaggacacggtgggagatcagggcccagtctgtgcatctctcattccagggaggccggggccccgaatccactgtcccttaggcaggaaggggacagggacactcagtccagggaggcagccatttgtcacctttcatcaggacttttgccacactcagatgccactggaattcttctttacttagtgttttttaaaaatcagcttacctttaaaatttaagtgtgtgatttaccctcttctttagccatatttgagaaatcagggtctgatatactagtcaaatacccgcacacatatacatatacacatacacatgtgcaca

SEQ ID NO: 1965 - DNA, 1175 bp, Homo sapiens
gggaggctgaggcaggagaatttcttgaacccaggagacagaggttgcagtgagctgagatggcaccactgtactccagcctgggtgactgagcaagagcgaggctccatctcaaaaaaaaaaaaaaaaagaaaaagaaaaagtaatagaggagttcagaagcagagacagattactcttggctggtaagtagcatgagtgataaatttaagctgaatgattatggagcccaaatgaaataacttgtgtgaaatgttcttaaaataatatggtgttatataaatgtaactgatgttttaccaaacaaaatggagcagggtgctttgggtgaaagaaggggggcctgttttgatctgctgatggcataattattataatgtattaaagaatgtctcagaactgtagttgtcctaatagtactgcttgaaactttcaaattgttactgctttcagttgctttccgaagtggggataatggtggatctgatctcttctgttttgttcttgcagctctattatcaagtcctaaattttggaatgattgtctcatcggcactaatgatctggaaggggttaatggtaataactggaagtgaaagtccgattgtagtggtgctcaggtaacagtttttcctttcaaggcatggaattgcatggcattacttgggagaaaaattgagatatgaaataactggcatatcattctcttagaaactactcttttccagaaaagggcctggaagaaaattagtcactacttatcagttgtaagaaattctcaggctgggcacggtggcttatgcctgtaatcccaccaatttgggatgctgaggccggtggattacttgagctatggaatttgagactagcttgggcaacgtggtgaaaccctgtctccacaaaaaatacaaaaattagcgggtgtggtggcatggacctgtagtctcagctactcgggaggctgaggtgggaggatcacctaagccctagaggttgaggcctgcagtgagttgtgattgcaccactgcacttcagcctgggtgacagagcgagaccctgtctccaaaaaaaaaaaaaaaaagagagaaaagaaattcttactttgttaggcatttccattcagaactccaaagggctcatgacctttctacaaaaaagttaccatgttaaggttt

SEQ ID NO: 1966 - DNA, 1212 bp, Homo sapiens
accatgttttgtttatccatttgtcagctgatggacctttgggttggtttccccttttggcttcatgaataatgaataatatgaataatgctgctgaagaacattcatgtacaagttatcatgtggacatgttttcagttgctttggatacctaggagtagaatagctgggtcaaatagtaactctgtagggaggggaacatcacacactggggcctgtcagcgggtggggggctaggggagggatagcattaggagaaatacctaatgtagaagacgggttgatgggtgcagcaaaccaccatggcacgtgtatacctatgtaacaaacctgcacattctgcacatgtatccccaaacttaaaatataattttaaaagaggaaaaaaagtagtaactctgattaactttttgagaaactgtcagactattttccaaagtgactgcagcgtttttacatccccaccagcagtgtatctaggttttgatttctgtacacccttgccaacacttgttattgtctttttgattgtaaccatccttatgggtgtgaaatggtatcttgtttccctgatggttaacggtgttgatcatgtgcttattggactccaacttttttttttttttgagacagtcttactctgttgaccaggctggagtgcagtggcgctatctcagctcactgcaacctccgccaccccgggttcaagcacttctcccacctcagcctcctgaatagctgggattacagacgcccaccaccattcctggctaatttttgtatttttagtagagacggggtttcaccattttggtcaggctggtcttgaactcctgacctcaggtgatccaccgacctcagcctcccaaagtgctgggattacagacgtgagccactgctcccggcctggactccatcttctttggagaaatgtctgttcagataatttgcccacttctgaattgggttatttgacatcttataattgagttgtaagagttttttatatcttctgaatacaagttacttgtcagatttgcaaatattttctcccattctgtggatgttaatttttttagtaaattctcaagatacctatgttccattttattgaactctactacagagttttacaatattattttatgttttgtattatttttgcttttacttgataatgtaaaaagcctatatatggttatttatataata

SEQ ID NO: 1967 - DNA, 1192 bp, Homo sapiens
caccccagataggcacccactgcgttcaagatgaagtccaaactccaaaatgtagcctacaagggtctccatggtctgtacactgcttacctctctgtcctcatctcccatcatgccctgctttgttctctgtgctccagctggcagccaaattatgatgtccattatacagggagatataaaaatataaagggaaaggaaatgtgaggctagagaattgggagaaatagagtcttgttctttcagatactaaaatgcactaaaaagctgtaacaagcaggggtgttactgctagattggtaaactagaatataaaaaccagaaacaggccgggcacggtggctcatgcctgtaatcccaccactttgggagactgaggcgggcggatcacaaggtcaggagttcgagacaagcctggccaacatggcgaaaccctgtctctattaaaaatactaaaattagccgggcatggtggtgagcacctgtaatcccagctactcaggaggctgagacaggagaggttgcagtgagctgagatcgtgccattgcactccagcctgggcaacaagagcaagactctgtctcaaaaaaaaaaaaaacagacttggatatatttaagaatttagtagatgatcggctgggcagggtggctcacgcctgtaatctctgcactttgggaggctgaggttggtggatcacctgaggtcaggagttcgagaccagcctggccaacatgatgaaaccccgtctctactaaaaaaaatacaaaaaattagctgggcgtggtggcgcatgcctgtcatcccagctacttgggaggctgaggcaggataatcactggaacccgggaggcgaaggttgcagtgagctgagatcgagccactgcactccagcctgggcaacaagagcaaaactccatctcaaaaagtaaaaaaaaaaaaaaaagaatttagcatatgattacatggcattttaaatcaacacgggaaaaagtggacttttcagtgactagagttgtgatagttggttgactagctggaaagaaagttaagctacgttccaatctcatgtcctacccgcaaaatgaactccaatgaattaaagacttaaatgtgaaaaagtagggctacgtaagtactaaaaaataaaagtggacatacataattggatgacgaagtcattataaactaac

SEQ ID NO: 1968 - DNA, 1190 bp, Homo sapiens
aaatagcccaaagaggtgtgtgtgtgtgtgtgtgtgtgtgtgtgtgtgtgtgtgtattttttaaagccagtagagaccaggcgcagtggctcacgcctgtaatcccagcactttgggagactgaggcaggcagattgcttgaggcaggcagattccttaagtccaggagttcacgaccagcctgggcaacatgacaaaaccgtgtctctaggaaaaatccaaaaattagctcgtatggtggtgcgtgcctgtagtctcagctactcagggggctgaagtgggaggatcactggagccccggaggttgaggctgcagtgagctgagattgcaccagcacactccagcatgagtgaccctctatcaaaaaaaaagaaaaaaggaaaaaaaaagtcacaagagagtaatataataaggaggaggggaaagatcctatgtccatagagaaaagaatggaaaagcgatcagtaagccagaccgaaagatgggtgggttttggatagtctggaatccctggatgatgaggtgtctttgaggaatgcacatttacagtttggctgcagaatggggtataagaagattaattgtggctggaaaagaacatcggtgaatacggagaatggtgatggcccggcagaagagttgctggtgtggcatggcctatagaggcactgtggtagagtggaaagagatagtattctggctctgcttattagctgggtgaccttggtcatgaagttctgtggctctttgctttatatatctatacagtagagataggatgcttcgcagaattaagattatgatgaagagagaaagcctaggtgatacaggcacacatgtatttcactctcaatacaaaaagaacaacaaaaacgttgttttgttttgtagaacagagcttttgagcaaaagaatgatgtcactattgctttgaaacagttgtttctgatagattggggggtagtgaaggccctagggtaattgccccataacaagagtggctgtaagagtccaggtaattcagtcaaagtctgaactagaccagtgcctgtaggatttgaaataaggagctgaatgggggaagcattgcaaacacgaagtcaacatgttcagaatgttctgagcaagggaagtggtattgctagggataacagtggtttcataaatggaaataggtttggcattgctg

SEQ ID NO: 1969 - DNA, 1150 bp, Homo sapiens
gtaagtgctagatctgtagttatctagagaacagaaaaaacagtgtattggttaggcaataagttttaaacagaaagtttcttatataatgtgtacatggtttgatggaagaaagttccccttgcttcttatcactttctttaaaaaggctcaaaaagtcctcagaatttgagtctccagtgatactaaatgctcccgactttgttaccaggccatgtgcatgttgctgtggccccgacataagcaatttgtcttcagtcactgtagtacttccagccagttgtcattctagagtcttcaggtactcatttaagaatgcaagccataggttatcagaatgtatttgacagtatgtatttttcttttgtccccagagttggcaatgatgagaacatgtcaaacacctggaaattcctgtctcattcaacagactcactaaataaaatcagcaaggtcaatgagtcaacagaatcacttactgatgagggtaagaggaagttatggcctttattttatgcctctgtagggactgtgtgtgtgtcattacctagaacataagtcttaatggagtgacagtacctgcctcttctgtatcccgtgaagattctctaaattgtcagtaaagtgtccagtgctttgtcatgactgcgtaatcagactcatccagcagctgtcaagtgaaggatgtcatttatttcgatgtgggcctactctttagtacaaatcttttccttcccttagacttttttacatgtacagttctagctcacagagcaattgtaagcctgctctcttaaatatgaaaaggtaccaggtcccttccaattcttaacttcgtgtagatagaagtcatgtcttaatcatgtttgatttatgtcatgtttattactgttaacctaagtctcgaatgtagagtctgtcactcctgaacaggatattgatttttttctggtactagaatatgatctctgtgaatatcccctgtattcatgtgtcttatgaaatcaactatcatcttgaggaaagtccaacataggcttattttacaggtcacaaacctgattctgatattgattttttgatatattgaggagtaggtacagacatgaatgaaggacaactactgggagactttgagattgagtccaaa

SEQ ID NO: 1970 - DNA, 1200 bp, Homo sapiens
tctctagtttacaggaaattcactgagatacagatgatgagcgatggggtgggggttcaccccgggcatggtttggggctcaatggctgaggcatctatccaggctgctgcttcacacctgcctaagctgcctccttgaacctggatagggtccttccaaggcaagtggctagtcacgacctcaggtgcaatatggaattgaggtttctaccaggaggtgttatgttgtttcccgaagtactaatacttgcatccttggagagagagaaagacagcagaaaggggtgggagagtggattaaagggccaggaccagggccaaaaaaggccccattaacccgcagccaaatgtccacctgaggctgggtaagcagcttattaactgataagaggacagtatgaagctgttagcttagggagtttgacactcactggtttgtgggaaggcaggaggctctcaggtgattgagggaactgaagaataatctgtcaagggctttctgcaggtccctgggatggggactccctaaggttcccagcagccctaggtctccttatattctgactttaaaatgtatgatagtgactaagagcatgtggcttggaagccagacaaacctgtgaccctccttagaactctagcagggtctgtgaatctcagttttctcatgtgtgaaaaacagaatgataatatcgatttaaaggggctgctgtgtggactactgattgtcataatatggatggtaacaatgatacaatttgctactatttggttgagcagtgtgttctgggttctggattccaagttctggtttctggttttttttttgtttttgttttttttttttgagacagacagagtctcactctgtcacccaggctggagtgcagtggcacgatctcggctcactgcaagctccgcctccaaggtacacgccattctcctgcctcagcctcctgagtagctgggactacaggcacccgccaccacgcccagctaattttttgtatttttagtagagacagggtttcacaatgttagccaggatggtcttgatctcctgacctcgtgatccgcccgccttggcctcccaaagtgctaggattacaggcgtgagccaccatgctcagcctctggtttctgttttatgtccattatttcagttaatccaatgagcagcccaagccttcaagattttat

SEQ ID NO: 1971 - DNA, 1101 bp, Homo sapiens
aattaaaaagtaaattttaatgtcgaaaatgcaaacttggggagggcagaaagatcacacacaaggctgtcacttcatacttgcaggattgcacagcagccgggcagaggcgctcctcacttcccagatggggcggcgggcagcagagacgcacctcacttcctagacagtgcggcagccaggcacaggcacacctcacttcccagacagttgggcggccaggcaagcgctcctcacttcccagatggggcggctcccgggaagcggggctcctcacttcccagacagggtggccaggcagaggtgctcctcacttcccagaacaattctttatgaatttgataaaggactgaagtgcaactgaaagctgctagtgatgatctggtaatatacaatttgtccagtagccagtttgtttttattgtgttttctaaccataagagatcattaaaggcaaagcctgtatgacgctgtacacacacaaaaaaatggtcaccgcaggccatactaccaatgaaatggtaggtaaacaaatcttctggtcaagagaaaaaaaaaagaaatagcactctgcatgctttgctctacaagacgaatttccctagaaagaatccaatgaaggccgggcatagtggctcactcctgtaatcccagcactttggaggccgaggcgggtagatcacctgaggttaggagttcaagaccagcctggccaacatggtgaaaccccttctctactaaaaatgcaaaaattagctgggtgtggtggcgggcgcctgtaatcccagctactcgggaggctgaggtgggagaattgcttgaacccaggagacggaggttgcagtgagccgagatcacgcctctgcactccagcctgggcaacaagagtgagactccgtctccaaaaaaagaaaaggaatccagtgaaaatggctgcaattacaacaagaagtgaaggaagaagactggtgacatctctgaaggatgcagttgaggttgatccaggtttatccgaatatgctacctttctgagccttaaaccttcatctctcaggtgttgatttgcttctgatagcttcatcatttctccctgaagtcttt

SEQ ID NO: 1972 - DNA, 1379 bp, Homo sapiens
taagaatctcattttagtgaacatctgaattatgatctagaggctagtagatcaaattaattgttgaggggaatgagttttatttgtagcttagccagtccctcctaacatctcttcctttatttcttagtatataagctagagatgatcttgccatctcctaaaaatataagacagtaatatgtgaaaagcatttggtactttgaggataagatgcccaattaatatcacattggccatattataatatattcatgggtgtccagaggaacaactaagccatatgctattatctttgttctagaattaaaagtttttgttactcctcacccaaaggcatagcgaatagactgagatattacgttgtaacatctttaacatgaattaatcattgcgcctcagtgagaagacaagtgtgacattttctggatggacagtttacatggcatcaaatattacattatcctatgatgaaagagagcatatgaagggaagcactccttcaaacatggcaaaatcagcaatttcttacatttgagtaaccagccaattttacagtctctcagcagtcttcttattcctcacatagacttgagagcaggatagaaggaagtagagtatcatgagttaagtattgaaaaaagtcagttgaatttctgtactataaattgctttgaacagctgataccttattttgagtacataaattcactttgttttgctctacgcttcattgtttatacatatgccttctctgtatgcaactagctggatttttctgacccagaagcatattcctgtgaaatagtactgtttgttaacttctctatttctgagctagccagcttgatgcccgaaaatctgcagttgctgggtttttgctgctcctgaagaactttaaagttttaggcagcctgtcatcctctcagtgcagtcagtctctcagtgtcagtcaggtaaggattatttacgttaacttgcagtgtgtgcgtatcattcatgtgcatcgatgaaatgcacgctgttttcttttattcctgttatggttgtaagaatgatcctagaactaaagagtctgatgatgatgatggtgctgatgatgatgatgatgatgatattggctaacactcattaatggcagatttactgtatgctaaactgtgctatccagtatggtagccactgtcctcagtgtggctattgaatggaacatttgattgaaatgtggctagtccacattgtgttgtgctatacatgcaaaattcataccagattttgaaataaaagaatgtaaaaatctaataatttttaatattgattacatcttcagagagaattttgtatgtgttgggttacagaaaacattaaaatttgacttt

SEQ ID NO: 1973 - DNA, 1233 bp, Homo sapiens
agtggggaaagcatgactaacaaaggctttgatgagaagatagagtcttttttttccttctttttatttccactgccttggagcaggtttatcacgttagagcattaattctttccccttctagggcactgcatcagagcatgggggacagaacaaagaaccagccaagaagaaaaggaaaaaataaatgaaatgcctgagttaatgtgaactttggggcttctgcttcatttttacccaacaagcaacaatgccccttgtcctgtagtccacaccgatgttggcatcttggttctgaacccactgaattcaactgcaccttcagttagaaggaatcttcttggcaggtcctgctactgaaaaatggctggccttaggcaagcccttttgcaaaaagcacagctgaaagcctgagtttgggagcctgcaccaccccgatgaagctccacgggagcaaatacagagcctccaggcagtgctatggtccaggctggcttcgtttttccaaggagcctttggtgagttcaattatctggtaaatatccagcgcttcacctgaaagatagtgcaaattggttaggatgccacctcaagaactgtaactgagagctcagaagtgagcaaaggagcttaatgctaaggtcaaaaggagagtgaaaggttgagaacaattgccacgaacggtaatgttacatgttaggagggtctgttttctttttatataagtgtgtcttagatatattttaaatagaaaataagctttctgatttacttgtttggtatttaaagcacagtttgtttttctgtcacctatagagtgcaagaatgcactctatagaataaattatctttaaacatttcttctgtggttgaagtaggggacaggtacaggtagaatatttgaagctctgctgccttcatttctgaaacatcatatcacattcactctggacacagggcaccttataaactgaaattagcctagaatatagcctgagtcaagagtggattctctggggccccaagtttcctgttctccaagacccactttctagtccacctcagatcctatgtgtaatgaggaacaaatgtgttgtgctcaccctggggaatcccgtatctcctttccatcccagttgggttggaaggggttttacaatccatggtcacttccttcctgaggcaccggtcaatatcgactgcactgaaaaaggcgactgactggggcaagtc

SEQ ID NO: 1974 - DNA, 1226 bp, Homo sapiens
tgcgccccgccgcccgcctgcgcccggcagaggcgccgcggtgcgccctgggactagccgccgccctgctccgggcctcgctccctgactggagagggaggggccgcgccgtcgctcagcgacccggcctccccgccgccgaccccgccggaaacctcggtcctcacggtgcttcccggtctgctgctcccccgaccccaggcccacggcacggcgtcccccttcgcgcggcctacgcagcctcggggtagcgtgtggcctccacccggccggtccgcttcgctggcagccgcaacttcccgtctgcacccagctaggtcccgcggctacccgagaggcaagcgggagactcccagcgcgaccaataggagggccgccaatggagcggtccgcccgcggggggagaagggggacttctgggtgggctctccctgcggaacgcgcgaaccaaaggccaacctccccttctcaaggagcaggtggattggtcccgagctagctggtgggcggaggtgacgtttttataagttgctcaagagacggtaacaaccgacgggccgcgtggcctaatggataaggcgtctgacttcggatcagaagattgcaggttcgagtcctgccgcggtcgaagggaggttatgattaacttttagtttattcctccctcaggaacgaagtattgggacaatgtgaacgtagtcgccgccgattcccaccgcacttcaaagatgtgggaacgccaagatccgcggaagtaaccacgcccagcaagtccctgcgagattgcccgcctacgtgtctcagcggaggcacatttctaaaatgtaccaggtctctcgcaccccgacgcaggtggaggaaagtggagagggaggggcatcctgtacagaaatctcaatttatactcaattgatggttggcaagagttggggctcgcagccaaagcgaggctccctccctcgcccatccggtgctgcctcctcgtccagagcaattctgaggggtaaaaatgttgccttccgttgaacctgaatttgcccgcagatgctagcctccggcccacagcgcggctggagcttgtccccttccccagctgtttccagtctccgcatccgtcttgtgttgctccaggtgcttcaacagctctcagcgctcggtggttggtgaactgtggtaaagtgcacgcagaataaggtctacgtgattaagcaccgcctgggggttgg

SEQ ID NO: 1975 - DNA, 1221 bp, Homo sapiens
agccaggcatggtggcacatgcctgtaggcccagctattcaggagtctaaggcagggagattgcttgagcccagtaggtcaaagctgcaatgagctatggtcgtgccactgcactccagcctgggtgacaaagcaagacttcatctcttaagtgaattaatgaatgaataaatgaatgaataacaagttttttgaaaaagatgatgaccatcatggagccaggaggtggagtagtcgccccttatctgcagaagatatgttccaagacccccagtggatgcctgaaaccacagatagtactgaaccctatatatagtactgttttttcctatgcatgcataagttcaatttgtaaattaggcacagtaagagattaacaacaatagtaaaatagaacaattatagcaatataatataataaaagttatgtgaatgtggtcttcctctcaaaatatcttattgtactatattcacccattttggggccatggttgactatgggaaactgaaaccatggaaagtgaaatcacagataatggggtactattgttgtttttttcatggcagttgatataaggacttgaggtttttattggttgaaaaaaaaataaacctagctggaatctgtttactaagtagaattaatgtctcgctgaggaaaaaagggagactaaaaacacaatgaaacttttcaactgcatgaactatctgagaagagttaaaattcaataagaactatctttagaagcattaattattataatagtggtttgttctgtttctagatatttgtagcagtcctttggaattggaggtgggatttcttttaaatggttaatggtgttcactttcttatactttgtgaataaaatgcatatcttatatatctcacaatcctgattgaagattggaaaatccgaaagtgaatggccaaaagttgccaggcctttattctcactagattttacaatgatttgcagatctttctagcacactttgaaactttggttttagattggacaagacagttttcttctctaagatcagaattaacgcctgggcgcagtggttcatgcctataatgccagaactttgggaggccaaggcaggaggaatcacttgagcccaggagttggagaccagcctaagcaacatagtgagaccttggctctacaaaaaatttaaaaattaggtatggtggtgcactcctgtagtcccagc

SEQ ID NO: 1976 - DNA, 1170 bp, Homo sapiens
caggccgccgtgcttggcctggtctccgaaaatgagctctttggagctaccataagcgccgaggccttctacccggacctggggcccgagctttcaggggcagccatgggagagcccgagccaccaggccccgacgtctaccagctggcctgcaacgggagggccttggaggagccggcggaggaggaggtgctggaggtggaggcagcctgtgagaagcacacccggcggaagacgcggccacctgtgcggttggtgcccaaggtcaagttcgagaaggtggaggaggaggaacaggaggtctatgaggtttctgtgccaggtgacgacaaggacgcagggccagcagaagcccccgccgaggcggccagtggcggctgcgacgccctggtgcagagcagcgccgtcaagatgatcgacctcagcgccttcagccgcaagccccggacgctccggcatctgccccgaaccccgaggccggagctgaacgtggccccatatgaccctcacttcccggccccggcccgggatggcttccccgagcccagcatggcgctgcctgggccagaggccttgcccacagagtgtgggttcgagccaccccacctggcccccctgagtgaccccgaggcccccagcatggagtccccggagcctgtcaagccggaacagggcttcgtgtggcaggaggccagtgagttcgaggctgacacggcgggttcgaccgtggaacgccacaagaaggcccagctggatcggctggacatcaacgtgcagattgacgactcctatctggtggaggcgggcgaccgccagaagcgctggcagtgccgcatgtgcgagaagtcctacacgtccaagtacaacctggtgacgcacatcctgggccacaacggcatcaagccacactcgtgcccacactgcagcaagctcttcaagcagcccagccacctgcagacgcacctgctgacgcaccagggcacccggccccacaagtgccaggtatgccacaaggccttcacgcagaccagccacctcaagcgccacatgctgctgcactcggaggtcaagccctacagctgccacttctgcggccgcggcttcgcctaccccagcgagctcaaggcccacgaagtgaagcatgagagtggccgctgccatgtctgcgtc

SEQ ID NO: 1977 - DNA, 1538 bp, Homo sapiens
ccaccatgccaggcctcaacccctcttctttatcataggtattgcgagttagatgttctgataggagacttcttcacaacttgcaaacctgctccttcttcccgtaggtatttacatgaggaatttccagagtcctggtcagttcccaggttggctgaaggctttgatgtcagcactgatgtgatccgaagagttttaaaaagcaagtttttacccacattggagcagaagctgaagcaggatcaaaaagtccttaagaaagctgggcttgcccactcgctgcagcacctccggggctctggaaatacctcaaagctgctccctgcaggccactctgtatcaggctctttgcttatgccagggcatgaagcctcatctaaagacccaaatcacagcacagctttgaaagtgatagagtcagacactcacaggacaaatacaccaaggagaaggaagggaagaaataaagaaatccaggacctggaggagagctttgtgcctgttgctgcacccctaggtcatccaagagagctgcagaagtactccagtgattctgagagccccagaggaactggcagtggtgcgttgccaagtggtcagaagctggaggagttgaaggcagaggagccagataacttcagcagcaaagtagtgcagaggggccgagagttctttgacagcaacgggaacttcctgtacagaatttgagtcggggcttggcttatggagatgcctcgtgaaacacagctgggcaagtattaatgtatatggaacagcctggatttctgcatatggataagccaccttggaataggaagaggtgttgagcctggactgtgggaggaaagagctgcgtggatagattcaaacttcctgtggtagtgctcccagtctgacctctgtagaccttcagtactcactcttcttgcttaggctctctgtgtgttgaaagccatcccgtgttgcatgtgttgttacaattttctgtgatacttgcaatttatgtttgagaagaagtgaaaagtttgccttctgacctcatttccttcttgatcagtgaacactaacattttggggacaacttagtcaattggttttccttacaacaaaataaagtaaaatgtagcagtctgcctctttggtgctctttggggtgggatggtttacctgtgaaccttggagagagggaaggacaaaggcagaaaggaaggatccctggtcagtaaacattgggagagagatggaaccagaggaatttcccagcaaagggctctgtgcagagcatcctgcttagtgagggattctgacaactgaaaactggacgcctttcttttagttgctggggttctggcagagattgggaaatgaggggttggcagaaaatacaaagcaggcaaaggctttagggcccttataatctccagccacattttaaagtttatattaagagctgggcatggcagaatgtgcctacagtcccagttacttgggaggccgaggtgggagaatcgcttgagcctcggaggttgaggctgcag

SEQ ID NO: 1978 - DNA, 1576 bp, Homo sapiens
ggctcactgcaacctctgcctcccaggttcaagcgattctcctgcctcagcctccggagtagctgggattacagatgcatgtcaccatgcccagctaattttatatgttaagtagagacggggtttcaccatgttggccaggcgggtcttgacctcctgacctcaggtgatccacctgccttggcctcccaaagtgctgggattacaggcgagagccacctcacctggccacctatcactttgattttcatgttgtttggctatggtaaaatgtgagctctcgaagggcaatgtgagatttgctttgtggccctgccaatcccctccctcctccctgtcttcctgcccacccccccccactcccccgccagccatgagcagggaatatttcaatgctattgctgagagtggaggtaaccctttctatagttttcttttgtttctacctcatgactagatgattcactgcttgaacatgctccacacatccgttctttctcactccaaaattgaggtcatcaccaagccccattaattttacctcccagattcctctcgaacctatctgtcaaatctgtccatcttcactgccacccttcagtaccaaatgaccagtctcttacctgaattcctgtagcagcctccaaactgatcttcctgatatgatttttgctctgaaaaaactggtttcactcacagaaaccagagtgaacttttaaaatcctaaatcgaatcacatcacttctcagcagctttccattgcttttagaatgaagacccaaatccttacccaggcctaagaggcccttgtggttttgtcccctccccctccatcctcttgtgatatccccttccctctcccttgcctcacctcagcactcttgagttctctgctccttggtcatgccaaggttgtgtgctctttagacccttggtactaactgttccctctgcccagaatgttcctcgcccagtcctttgtgttgcctcctatttgtcaaccaggtttcagcctaaacctatctccttaggaagactttccctaactatcccatctaaattagtcaccctccatcacattatcctcttttttcatcaaagtccttacacctgtctggcaatttcttattaattgatttgtttttggtaaactccacgaaaggtgggagtcatttctcttgtttccattctttccacagcacttagaacagtgcctggcacatggtaggtgctcaatatgtgtttactggatgaattaatgagtgcatgctcatgggcaaggatctcattgtgctggaaaagcagcagagtgagacaaaactggacaggtgagtgaaggtcacaccaagaaggttcttagctgccaaactaaagggtttggatcttactctctggagaaaagggtgtagctagtggttttataggagaggagaggcgcgatccgcacttgagaaggtcaatttggccgctgtgtgtaggtcatattacggagaaaaaaactaaaggctttgagacaatccatgatgtaaagggcttagcacagtgcccagcacgcagtaggtctccagcgagtcgt

SEQ ID NO: 1979 - DNA, 1201 bp, Homo sapiens
gcacctcgatgcctgctctgacctgacccagagggcgaggccctccagcgggggacattcccaggctgagtggaccccacggctctctcccacgcctggattacgacatgaagtttttaccacaagcccgagggcaggcttgagttaggcagactgaaggctaattttcattttctcccagctggtttctgctgcttcagaaaagtacaccttttccttatggaccagaggaagaggaagaccattttatcagtcactgaaaagagtcccctggcactgatgagcctgaagagaactgtgctcctcctcgggggctggggaaggaagacagggactgcaggtgtctcatactcagtggcctccagacaaactccagacaagcacagacctccccactaagagcagccagagggagctggtgaggccctaaccccacccaccgagcaactgagcttccccatccctccccagagctgtgtctctgtgggctgggagtctaatgtcacccccctagaccgtaagctccttgagggcagggacagtgccttatcattgttgaacccgtagcacctaacacgtgcgtggcagcacagtcgtgtgctggagtgagtgctgcagaaccgtgcgtgcagcgcatgatgaatgagtgcgtccgccatgccgtaaggcaggctcacctgtagctatccccttccctgccagatcttctcagagctttagcttttctagcactcgtgcctatggtgaagcatgcactttaatatgcttttaacactaggtgaccaaatcacagtgaagccgggcactgcattctccttgggctgtgctccacgcgggtgggtgggagctgtcttctgagtacatccggaagggctgagcaggtgagtgccctgagcatcctggctgggccccacccaggaagatcttccttctcagatccacgtttggctctaaattgcttcaagtagagattcattctttgaggttgaaaaaatagtttatagtaaaacgaaggcctaattcatggaagcatcattagtcatcaataccttctcataaaatagatgggccagatttccaccaccgcctgcctcctctaacttgggtgatgccagtaggtttgaagggggcagagcactgcagggggaggggggggtctaggctgtgagaggacagggtggagaggaggagaaccctgaag

SEQ ID NO: 1980 - DNA, 1157 bp, Homo sapiens
gggaggcaagaggggtggagactgcttcccatcctaccctcgggcccacctggccacctgaggtgggcccaggaccagctggggcgtggggagggccgtaccccaccctcagcaccccttccatgtggagaaaggagtgaaacctttagggcagcttgccccggccccggccccagccagagttcctgcggagtgaagaggggcagcccttgcttgttgggattcctgacccaggccgcagctcttgcccttccctgtccctctaaagcaataatggtcccatccaggcagtcgggggctggcctaggagatatctgagggaggaggccacctctccaagggcttctgcaccctccaccctgtcccccagctctggtgagtcttggcggcagcagccatcataggaagggaccaaggcaaggcaggtgcctccaggtgtgcacgtggcatgtggcctgtggcctgtgtcccatgacccacccctgtgctccgtgcctccaccaccactggccaccaggctggcgcagccaaggccgaagctctggctgaaccctgtgctggtgtcctgaccaccctcccctctcttgcacccgcctctcccgtcagggcccaagtccctgttttctgagcccgggctgcctgggctgttggcactcacagacctggagcccctgggtgggtggtggggaggggcgctggcccagccggcctctctggcctcccacccgatgctgctttcccctgtggggatctcaggggctgtttgaggatatattttcactttgtgattatttcactttagatgctgatgatttgtttttgtatttttaatgggggtagcagctggactacccacgttctcacacccaccgtccgccctgctcctccctggctgccctggccctgaggtgtgggggctgcagcatgttgctgaggagtgaggaatagttgagccccaagtcctgaagaggcgggccagccaggcgggctcaaggaaagggggtcccagtgggaggggcaggctgacatctgtgtttcaagtggggctcgccatgccgggggttcataggtcactggctctccaagtgccagaggtgggcaggtggtggcactgagcccccccaacactgtgccctggtggagaaagcactgacctg

SEQ ID NO: 1981 - DNA, 1177 bp, Homo sapiens
ctggcccaggctcacgctgggcagagctgggaagggaagcccaggcaggaagaccccaaaccaagctggtgcctcctcctccaggccacaggcccccaacccgctcctgaagcagggagagccatggaatagtcgaggttgctggtccctttagcacactggggcgatggaaagggaggggtcacaggggcagggtctggggacatctgcagcctggaatcccagggaagagaggaacttcccaatacaagcagcctgggcagagcctcctctctaggacatcccagtgattaaactcgaaacacaacagtaggggggcccaggctgggcgccactcaccgagaacttggggcggaagattcctgagatgtggctcttaaggatctccagcgtgggtgtccttcccccctctcgctcctgctcctgaggccagggacagacgtcagcgggtggccaggcttagggagggggagggcgaaaatgaggagcgcagccccaggtgggcaggccggtggcgggcagcggccgcggatggggcagctcaccgaggacgacgtggagtggcggtcatcctgcaggagcagcacaggcgggggctcgccggggcccaggtgctccagcttggtctgcagcaactcctgctgggcctgcagcttggcctggctgcacagcgctacctgcagcccctgcagtgcttcttgcagcacttgcctcttgcccagcagctgcaccctgcaggcaggggcgggtgggagggtggatgagaataagggctcggtctgcggcgggtagccagcagcagttagggtaggtaggagggagggaggcccaggaggctgctgcaggcaggggcccactcaccgctcccgggggtgggtgttctcctcttcattccggagctcctgttgcagctgcgtaaccatctcctgccgcctgaacaccatctcggtggccacagccagctcatctgtcactgaggtcagcctgcacccaagagaagggcagcattagaaccgagccctcctgccccctcaacccaggtccagtgcatccctgtagagccaagcaagcccggccacctggtgacagctctgtgtggacagtctccacgacctagccctgcctacataaacactcgtggtctgctgggagccccgccgcagcccaggtgcaaagc

SEQ ID NO: 1982 - DNA, 1184 bp, Homo sapiens
cttctgctgcggtcggggccggagtctgggctggagccaccgcaggcctccctctgggtcctccgccgcgagctccctgcaggtctctgcggggacagcttaggtgcgcccggagcttgcctgcacctgcgatccagagccaagcgccccgcccctgcccgggcgcgctccctccttagccctgcccctctctgaccccacctccgacgcaagagtggggcggggcagctgccggtggcgtcccgaacccagactcgccccgccccagagactgcgcctgcgcgggcacgagacaacctctccgcgatgactgtgagtggtccagggacccccgagccccggccggccacccccggggtgcgtacccaacccccgcgccatcaccccttcgcacccgccctgaccatccctggcctccttctccccatccatgaggctcgccccgatccctcctctcctctccccttagctcccgggctctgccccgaaccccctccgacgtttccgccccctttctctctacaggccagctcagtggagcagctgcggaaggagggcaatgagctgttcaaatgtggagactacgggggcgccctggcggcctacactcaggccctgggtctggacgcgacgccccaggaccaggccgttctgcaccggaaccgggccgcctgccacctcaagctggtgagggagcctggcgctcttcccctcgcccgcccgggccccggttcgcccatctaagctgatgcttgggccccagctggacattcacgctcccaggccatccccgcttgccagatgttttttgcacctcagggtggtgggggatcgggtgaccttggagagcgagagtacccctgctgcctggttagtgccccgagagggagatgaccattccttcaggctcctgtctttctcttacaggaagattacgacaaagcagaaacagaggcatccaaaggtaggggaatggtgggccctggtgtggagctgtagggcttctgtggtgggcaaggactctgggaccgctgcaccgtcacattctcctcctttggccccagagacacatctgccttctttctttcccactgcctcgggcctttccttttctgcagctaccctcaccttttctgaggctgaagcaccgagccccacattcgtcccccccaccttcttctggc

SEQ ID NO: 1983 - DNA, 1124 bp, Homo sapiens
tttctggtctcagctggaagaagagttgaaggcacgaattgaattgtgggaacaggaacattcaaaggcatttatggtgaatgggcagaaattcatggagtatgtggcagaacaatgggagatgcatcgattggagaaagagagagccaagcaggaaagagtaagtgtgaacgtgaacgcaaattgggaaaagacgaagaaagtaatctgagcagcccatagtctctgccggggaccagggtttgtggaacagggagccggggaccggggcttgtggaacgggaagccggggaccggggcttgtggaacggggagccggggaccggggcttgtggaacggggagccggggaccggggcttgtggaacggggagcccgcggcagctctttagctctggctgtagagacacgggcctagattcccggccctgctgctgttgccatcccagacccgctctcttcctgagatttatcactgttgcttctgactttcacacagcaactgaagaacaaaaaacagacagagacagagatgctgtatggcagcgctcctcgaacacctagcaagcggcgaggactggctcccaatacaccgggcaaagcacgtaaggtaaacacaaggcttagggaaacactgatttcaagggagtgggtgagggtagtcccagccacctctttgaagggggccagcccctccacacctgtgggtatttctcatcaggtgggacaagagacagagaaaagaaataagacacaaagtatagagaaagaacagtgggcccaggggaccagcactcagcatacagaggacctgcaccagcaccggtctcttgagttccctcagtatttattgattactattttcactatcttggcaaggggaatgcggcaggaggacagggtgatagtggggagaaggtcagcaggaaaacgtgagcaaaggaatctgtgtcacaaataagttcaagggaaggtactgtgcctagatgtgcacgtaggccagatttatgcttctccccacccaaacatctcagtgtagtaaagagtaacagagcagcattgccgccagcgtatctcgcctccagccacagggcagttttctcctatctaagaatagaacgaaca

SEQ ID NO: 1984 - DNA, 1171 bp, Homo sapiens
cccacctcatcccattttttaagtgtaaatgcttttttttaagaggtgaaatcatttcctggttgtttattttttggtacaaccagaaagtagtgtgggatattgaattatgggaggctctgactgtctcgggtgtcagcttaacattccatagatggggggttagtttttatatcccataatacaaagcatattaaatggcaatatggagtcagtcctgcatttaatgtcttgaacattctaaattacttctattaccatgttgttttttagtagaattgtttcctaaagaaaaccactctttgatcatggcgctctctgtcagaattgtgtgtactctgtaacatctttggttgtggtagtcctgttttcctaataacttactgtgctgtgaaagattacaaatttgaacatgtagtgtacgtgctattgagttgtgaactggtgggccgtatgtaacagctgaccaacatgtgaagatactggtacttgataacctcttaaggaaaatttgcttccaaattttaagctggagagtcactggaataactttaaaaaagaattacaatacatggctttttagaatttcgttacgtatgttaagatttgtgtacaaattgaaatgtctgtactgatcctcaaccaataaaatctcaattatgaaaaaaataaaaataaaatgtggcctaaacaataaataaataaataaataccaatttctccaggaaatgcacatcaaaccccaccgcaatcacttcatacccattaggatggctctaatttttttttaatcagaaaataaaaaatgtcaacaaggatgtggagaaattaaaacccttgtgtactgctatgggaaaaagtatggcggttcctcaaaaaattaaacataagttccacttctgagtatatgcctaaaataattaaaagcagggactcaaatttttaaatgtttatttttttaattatttatttatttttaatttcaatagtttttgaaatagccaaaaggtggaagcaacccaaatatccttaaacagattaacggatttttaaaatgtggtctaagtaagtggaaaaagaaaatgtagcatatatacaccatggaacactactcagccataaaaaggaatgaaataatgtcttttgcggcaacttggatggagctggaggc

SEQ ID NO: 1985 - DNA, 1223 bp, Homo sapiens
tgacaaggttgtggtgactggtgccatgatgtttgacagtagagctgtgtgagagggagagcagctcccctcgccccgcccctgcagtgtgaatgtgtgaaacatcccctcaggctgaagccccccacccccaccagagacacactgggaaccgtcagagtcagctccttccccctcgcaatgcactgaaaggcccggccgactgctgctcgccgatccgtggggccccctgtgcccgccacacgcacgcacacactcttacacgagagcacactcgatccccctaggccagcggggacaccccagccacacagggaggcatccttggggcttggccccaggcagggcaaccccggggcgctgcttggcaccttagcagactgctggaaccttttggccagtaggtcgtgcccgcctggtgccttctggcctgtggcctccctgcccatgttcacctggctgctgtgggtaccagtgcaggtcccggttttcaggcacctgctcagctgcccgtctctggcctgggcccctgccccttccaccctgtgcttagaaagtcgaagtgcttggttctaaatgtctaaacagagaagagatccttgacttctgttcctctctctcctgcagatgcaagagctcctgggcaggggtgcctgggccccagggtgtggcaggagacccagtggatggggccagctggcctgccctgatcctctgcttcctcctcacaaccccaagagcccccagcccggtccatccacgtctggagtctggggagaggagcagggtcttaggactctcagctctgagcatccctggcagggtcttcaacctctaatctcttcccttaagccctgtggccacacagccaggagagacttgccgctggctcccgcctcatttcagcccagggtgctcatccaggggcccagaacagtcccacctgtgctgctgtgcccacagcacaaagccaggcttcactcccaaaagtgcagccaggccctggagggtgatcctgccagcagccctacagctccacaccctacccacccatcggcagcccctctgctgttccccagggacctctcatacactggccaggaggctgcagaacgtgtgtctccccctccctccaagaggtcctgctccctctgccagaaccgtgtgtgggcgggtgggagggcgctcggggcccggcccctccctctccctgctggttttag

SEQ ID NO: 1986 - DNA, 1252 bp, Homo sapiens
aatgtgttccagtgccaggtttcattccaagccaatgctttaagagattgtgccgcttttctattgcccgtgattgacaccaatgtgctagagatagatctatcatccttgggcccaaggagaagacaacttggagtacaattgcagcctaaaaataatgactatgtaatagaagtaagaaatacatgttttgttgtcatagccattgattttacggagtcaacagttactgtaccttaccatagcctatactgaccaataaactgaaaatttcctgtgttagtccatttgagctattataaaggaatacctgaggctgggtaatttataaaggaaagaggtaattggctcatcgttctgcaggctgtacaagcatggtgctggcatctgctcagcttctgtagaggcctcagggagcttttactcatgacggaggctaagtgggagcagacagtcagtcacatggcaagaaaagtagtgagagagagagaggggaggtgccacaaacttttaaacaacgagatctatcacttcttggccttttagctaagatcaagtgtagtatctgtttttatcagtttaatatatgatacatcttctatccaaggacaatatattaaatggatttttggagcagagagatggaatagaagcttgctccatccactccatgcatcgacctggtattgcagtacctccaggaacagtgcaccccctcgaggtattaaaaaaataaaataaaataaacaaccagatctcaggtgaactcagagcgagaactcactcatcaccaaggggatgacgcaaagccattcataagggatccatcccaatgacctaaacacctcccaccatgtcctgtcggtaacactgggaattccatttcaacatgaggtttggaagggacaaacatccaaaccatgctacctctctactcaaacataaaacatcatatttagaaaagtcattattgttgtggcataactatattctacattgatttgaaaaggcccctaattatagccagcaatcatatgatgagattaaattgaattgatgaacagattacataacaaaggggacaaaacatgttttgtgaaaacacactttcaatattgaacctaggccgggtgtggtggctcacgtctgtaatcccagcactttgggaagctgaggcaggcgaatcacttgaggtcaggagttcaaaaccagcctggtcaacatggagaatctctgtctctactaaaaatac

SEQ ID NO: 1987 - DNA, 1155 bp, Homo sapiens
cacagctcgactgtcacccagcagctaggggagcactgaagctcttaccaaagctactgtcatggtgacccttggggccgctgccctcactcagaggcattctcgttccccttcccctccccctcccttcacaccctcgctataagagtggctccagctcccccttgatgtgtattcaacgtagagattagcacacaactcttcctttgttcaccgggtatagttgatgccttaaggaaaaggaaacttcctgtatcattgcaaaggatagagagatgagagaaggcatccccacagagctcagtcctgcactgtcttcccctgtggctgtgggtctttttccgcttcctggagcgcgtacctgagctcatgcacctttactgacctgtgcggacctctcttcctcagggtttccctctgcccacatgtacctgtgccctgcatggcccacgcacaccttcccgtgtcaacgtcctccaacctttccctcctcagataagccatgtgaactctactgctcgcccctcgggaaggagtccccactgctggtggccgacagggtcctggacggtacaccctgcgggccctacgagactgatctctgcgtgcacggcaagtgccaggtgacgtacttctccttcggtccttggtggggctttggagaggagactcactctccccagacagggagtggggtagagcagaggtctcaggaggcctaggggagtggattttcttaggaaggcacccagtgatgccgcctcctgccgccagtgttgcctggtgcaccaaccctagctcagtaatgactgagtgctaggccaacaaggagtggaggtggaaagaacaggcacaacgtattctaagactttgaaaattgctttagacatcatgaccaagacgaaggtaggcagggtactaagatgcgcctaaaggatgtctgcacaagccaggccccatttagtgcagaagagacggcagaactgagccaatgcctgtgcaggtcacgccaggcagataggtgcgcccagctgtcagggagcatccatctactggtatatagtcccaaaggcattgagggctggatggccatgactggttagaacagtgataaaaaccatttaagtgaagaaagagaggccgggtgcggtggct

SEQ ID NO: 1988 - DNA, 1114 bp, Homo sapiens
gaccatgactgctctgaggacggaatggcacagaggccatgactgctgtaaggactgaatgggcacagaggccgtgactgctgtaaggactgaatggcacagagaccgtgactgctgtaaggactgaatgggcacagagaccgtgactgctgtaaggactgaatgggcacagaggctgtgactgctataaggactgaatggcacagaggctatgactgctataaggactgaatggcacagaggctatgactgctataaggactgaatggcacagagaccgtgactgctgtaaggactgaatggcacagagaccgtgactgctgtaaggactgaatggcgcagaggccgtgactgctgtaaggactgaatggcacagagaccgtgactgctgtaaggacagagtgggcacagaggccgtgactgctgtaaggacagaatgggacagaggctatgactgctataaggactgaatggcacagagaccatgactgctctaaggactgaatgggcacagagaccgtgactgctgtaaggactgaatgggcacagagaccgtgactgctgtaaggactgaatggcacagagaccgtgactgctgtaaggactgaatggcacagagaccgtgactgctgtgaggactgaatggcacagagaccgtgactgctataaggactgcatggcacagaggccgtgactgctgtaaggactgaatggcacagagaccgtgactgctgtaaggactgcatgaatgggcacagaggccgtgactgcttaaggactgcatgaatggctgctgctggggtttctttctgaaccatcggggaagctcccccaagtcccctttgtcccctcttgggtcctagtttgagccatgtgctggcactcagttattttaacgaaaccatatacatttttgacatgacagaggaatgatttgtatgttcttccccaactcttaaaaaaagaattaaaaaggatcttttagcccttttataaaatctttgctatgttcctcagaaggcttttaccaagatggttaagtatgtttccaatcttggagcaatagcagctgcatgttttgctgcaactggaggaaagtatatttcttgtggaa

SEQ ID NO: 1989 - DNA, 1226 bp, Homo sapiens
agagatttaccattttgactctgcataagaagggaaactagcagcaggtgcctgctgaaggagggcaaattgttttgatgctgtcaaaacaatactaatgttactcttaatatacccagggataagatacatttttccattagggatacaaatgtcattcccaacaatttcagtgttgcctcccaggtggacttttggggggatgatttttgaagtaacttaaaaaataattttaaaattaaaaatttgataatgaagtagttcatcttctctgaaagccaacatggaaaatggatgctgttgtatctgtctctgtacccctacccccaacgcagctgctctgtggtatgtttgtaagtcacacacaagctcactcttgggctcaggtaaatctgaccaatctgcaaagaaacgagcccagacctggaaaaccaaatcacagcaaggtggtcttgcctgcccctccggggggccatgggcgtgtgtgagtgaggatgaccgacatcgcgtttccttctcctttctggacaggttggcctcattcagcttgggcaggagcaggtgctaatccagcccctcaacaactcccagggcccattcagtggacgagaacatctgatcaggcgcaaatggtccttgacccccagcccttctgctgaggcccagagacctgagcagctctgcaaggttctaacaggtgagtcggggcagcagcatgaccagcttagaacacacgcacagcccacatcctttgtgtgtctccaagtgcactgaagccacatgagtgagaacttaccttcccctatatttcaaaagctgttttattgccctgagaccacttccttttcctttctatgtgtcttagtgtcggcagtcctttgaaaaagtcatcgttttgtttctgcaaggaacctaggatctctttcatgcagtccctcaattttatatatcaagagcaagttgaggtccaaaaaaccttgtagccgagcttggataagaattccctcctcctggtgccctggccaggagctcactcttaataatacagtgctcccgagttctggccgcagtaactaaagccacctggggcgcctctgaagctgtgattcgattctcgattcttacagtgtggcccccgggccagcagcatcagcatcacgtgggaacttgttagacatgcacattttcaggccagagctgtgaatcagaaaccctgggggagggtc

SEQ ID NO: 1990 - DNA, 1398 bp, Homo sapiens
ctcttctcgttttaattcccaagagttttagttgattcttgtttgtggatgctgcatcctcctgtttctctccaagacatcagtaatatttattctgaattcattctcgctctgctaacattaattctgtgtagagaggggccctggaggtgctggaaagctggagcctgagattctgcttagggaagctcccatgctaactcagtcttttcctccaagataaggatgaacagttgacaataccaagctgtgttgtgaatcaggaaagcccaaagctgtcttatctcagtgactgtgtgatttgtgtaggtttgccccgaacagtaatgtgaggatgcagcaagatgtgcaggccctctgacctggctagaccctgccttgcagagacattgtcactgtcagctgctcacttcctcctggggactctgaggcccaagggggacagtggtgaaatatgacacagcttctcccctaggtgatcagactgcttccaatgagcctgtgcccttggctacataaagaggaaacataaatattttctgtgtgtgtgtgtctgtgtgtgtctctttgtatgtgtgtctgtgtgtctgcatatctatgtgtgtgtctgtgtgtctttgtgcatgtgtgtttctgtgtgtgtctgtatgtgtctgtgtgtgtgtctgtgtgtgtctgtctgtgtgtgtgtctgtgtctctgtgtgtgtccgtgtgtgtgtctgtgtgtgtctatgtgtgtgtgtctgtgtgtgtgtgtctgtgtctctgtgtgtgtctttgtgtgtgtgtgtgtgtgcctgtatgtgtgtgtctgtgtctctgtgtgtgtctgtgtgtgtctctgtgtgtgtgtgtgtctgtgtgtgtgtgtgtgtctgtgtgtgtctatgtctctgtgtgtgtgtgtgtgtgtgtgtgtgtgtgtgtgtgtgtaaggtgggatgtctcttcctgctgatcggtggcctgcctgtgtgctggcttggttagaggagtttcgtgcttctctttatggcgctgctcttcctcagatgcttgcgggtgcctgggtggatgctgactgttctgctcgggattccccgtagctgtctgtgaacacagcatttgtcacaatagcctgcgaagaggagggccaggggactgtagcaggctgccttggggacatccagagcatggcttccgggtggtgggctccgtgtgcctcctgggagttgcccagcacactttctctttagcccacatcgagtgtagacccatcagtcccaggctgcctggcacaagctggagaggggccagatccacaggagtctgcccactatggctccccactcctcccagtcgccctgctggtgacctggggaccctcttgcttcccatgtcccccagcagcctcgga

SEQ ID NO: 1991 - DNA, 1221 bp, Homo sapiens
aaatatttcagtagtcagtcttcatgtgataccatgtacatcctattttctatataggaagatgaactggatggtgtttctgaaggagagagttcttgtatcagtttgttaacaaagataagatactacactggttgaattactttcaaaagcttttgaaagtaaaagagaagcaacttctgttggtctaggtctaacagttatgttcttccccctcttaagttttaatccaggtgctggtttgccaactgacaaaaagaaaggtgggccatctccaggggatgtagaagcaatcaaggtaatcatgtgttaggattcttggactggaatgagctaagatgggttcagaacacaaagctggataataaacatgttccgaacattgcagatttcattttcccacagttattagcatacagcaatatttctgtttaaggaaaaactagcataaagttattatttgatcagacttgaaattacacaagctaattaatgtggaggcagctttgtctttctcattttccaaggtgcatttatcacttcgaacagttacttaccttggtatgctgtctcagtgtttgccttaatttttactttcgaagatttgctgtctggcaaatccttttgactgatcagtagggaccctcgttttataatattgcctccttaaattattcagtaacataattgcaaatagttacttcacttagctacgattttagaacatgtggagtgattatttataagaaggcctgcatctcttcaccaattttagaaatttgtggtttggcttctagttttatttttgtgggccaataacattcttccccctacaccaaagtatttaatgttcctgatggagaagttgctgtgaatttctgtaggtgattgacacttagttttctgggtagctgatacttggttgaagttaatcatccatctccattgccctctgtcctccagaatgccatagcaaatgcttcaactctggctgaagtggagaggctgaaggggttgctgcagtctggtcagatccctggcagagaacgcagatcaggtgaacaaatggtgttctttgtatgttcaaattaatgttacactcagagtgtaactcacaaccatttagatgccatgactctggaatgccagagtagtgcctccttacatcaaatctaatatatgaaatctctttaaatgctctttgaagataaagtatttgat

SEQ ID NO: 1992 - DNA, 1210 bp, Homo sapiens
atcaccctcggtgggtttggagcagaccgtttctacctgggccagtggcgggaaggcctcggcaagctcttcagcttcggtggcctgggaatatggacgctgatagacgtcctgctcattggagttggctatgttggaccagcagatggctctttgtacatttagctgtggtgtgtgcttcagaaaggagcagggcttagaaaaagcccttttgtccgtaggagttgatgtggtgtgagtgatatatttctatgtttttaatgtacagcatctgtactttgtttgccttgataaaggtaagataaatgaaacgctgaactatgctaatctggaatttgtttttatttgcctgaaatatatttttttctgtgaaaaaattaaaacgtacttaagccaggagaatgaattatacagtgattgaaaatccatttaattcctatgacttttgttttgtattgcccaagtcaaactacatcacttgtatctccagcccaaatgtagtctgccttgaaaagtctttcagctgtgactgcaggaagtgggagtgtttttattgttagctaattgctgtgactgcaggaagtgggagtgtttctgttgttggctaattgaagttattaggctcagcttcagtcatgtgtaagttttgcagtgtaatacatatgtagtctggtctgtatatatgaaaatttgaattaaactgcagaatgtttatgtctagttatggtttaaattttcttagtagtatataaaaggtaagagtactgaaaaattaataaaattgcaagttaagaaatactgtgggcctgttttctatattaaatataatcttgaataatcattacaacttacctttattgttaagaataacatttttatctttcagggcattactccattctaacagagtcataattggctggtttattgacacagtggaaatatataaatgtttttgagtatagatctgttatagaccctttatcggggaaaaaaaactcagttattcaaaaagatttttactcaagcttgcttttgaaacatttaaaaacttagcattttttctttcaaatgtgggtatctgagttactgctttttaaacacttgtgtgtattatccagaagactgttaaccaccatatcatatctagaagctataaaatatctgcatatttcattcagcagatgatttattgatttcagtttacctg

SEQ ID NO: 1993 - DNA, 1141 bp, Homo sapiens
ccaaagtgctgggattacaggcatgagccaccgcacccggccacaatggcctttttgtcactgctccctgtgctgtttggtggcactgttttcccatcctatgctgtcttgactcccactgaagaatggtggtctcaggccacaagcatgggaatgtctggggtgctgggaacacagtgctggcccagctgggcagggggcttagctggatgtcctggcaggggcacagccctcttataccccctaaaactccagcatggccttgcccgatgatgggtgtggagtcactcagcatgccacccctacatacccaaaggccccaggtctgccccatgtgccccgactcccacagagacccccctcccagctttgctcttgtggacccttgaacatcaggaaacacaaacacaacccaaaccccttccagaggaaagctcaggcctgaggtctgagagcacagcaccccagcacttcacgaaaaggtgtgtgaaatcctaagctctcgcacttctgcctctgcatcagcccaggacaccactccaccctcttggcgggtaggcctctgtggaggtgagtcacccctgcctggacaccgtgctgccctgctgctgaggacacttatacctcagctcagaaaacagggcctccagactgagtgagtggctcatgcctgtagtcccagcattttgggagggcaaggcaggaggatcgcctgaacctcggagttcgagaccaacctgggcaatatagtgagaccctcatctctgccaaaaatttttatttaattagccaggcactgcggcacatgcctgtagtcccagctacttggaggctgagacaggaggattgcttgcacctgggaggtgggggttgcagtgagccaagattgtgcgagtagtgcccccaatggctccgccaaccccgacatggcaggtttcagctccatcaccgccctgttccctcaccccacgtgccactcgcatgtctctctcaaaaagacacccccactttcccccagctctgctcagcatagtggtctccacctcctgcctctccctgcagcagcctctccaagatgctgtccattctggaaattgaaaatccaaaatcagtacttaagggcaagcataaggtgccagca

SEQ ID NO: 1994 - DNA, 1168 bp, Homo sapiens
tgtcgctgttccccccgtgtcgctgttccccccgtgtcgctgttccccccgtgtcgctgttccccccgtgtcgctgttccccccgtgtcgctgttccccccgtgtcgctgttccccccgtgtcgctgttccccccgtgtcgctgttccccccgtgtcgctgttccccccgtgtcgctgttccccccgtgtcgctgttccccccgtgtcgctgttccccccgtgtcgctgttccccccgtgtcgctgttccccccgtgtcgctgttccccccgtgtcgctgttccccccgtgtcgctgttccccccgtgtcgctgttccccccgtgtcgctgttccccccgtgtcgctgttccccccgtgtcgctgttccccccgtgtcgctgttccccccgtgtcgctgttccccccgtgtcgctgttccccccgtgtcgctgttccccccgtgtcgctgttccccccgtgtcgctgttccccccgtgtcgctgttccccccgtgtcgctgttccccccgtgtcgctgttccccccgtgtcgctgttccccccgtgtcgctgttccccccgtgtcgctgttccccccgtgtcgctgttccctccgtgtccgtattcctcccgtgtccgtattccttacctgcaccttttcctgcaggtgggactcagggtacttgttcagcacatgtgctttcctcttcgtcttctaggagggagtggttgggtctgggctccctgttcccaagcccacgttgtgttcatggctgtggctgcctgggtgatgagtgtgagtttgcacctgggtttccctgggccttaagcagacagcgtcaccctcagagccatcaccactgtgaatcatttggatctttttccatctgggcataaaattgtatgtgtagacaaatagttgttttttgcttttttgggtggggggggtcagggtgtggggtttacagaaaaggtgctgtgcccctggccatcctgtcccccgtgtctgctgattacagctgaaggacaggtcctcctgggatgcagcatcagtgtcctcggccgcccctggtagcctccggggcaccatccgtgcagggagaggcgctcctgcctctctaccgtgcagggacagtcgggtgggcttttggtacacctgccaggtggtgctgaccaaactgagcttcat

SEQ ID NO: 1995 - DNA, 1202 bp, Homo sapiens
tagcagggatgacaggcgcccagctaattttgtatatttagtagcgatgaggtttcaccatgttaggttgatctcgaactcccgacctctggtgatctgcccgcctcggcctcccgaaatgctgggattacaggtgtgagccaccatgcctggccgggatgtttttattgtgtggtctgtggaggacgtccatgtggcttggtggccaggccccagtgccccatcccatcctatccctcaaggaggctgcccttgtgagatgagtgtagccccaccaggccacctggccagggtgtcggccacagtcacaacttgttctcttgttccccaaggtcttcggggacgaggaagccacagccccatgagaactccagacccttgtcccttgagcacccctgggccggccctcagctccggacctccgtgcagccctcccacctcttcatccaagaccccaccatgccaccccacccagctcccaaccccctaacccagctggaggaggcgcgccgacgtctggaggaggaagaaaagagagccagccgagcaccctccaagcagaggtacggccgcgtcgtggggtggggtgggtcttgggggttaccacagcaccactcctggggctgaagctccccgaggcctgaggtcttcaggggaaaaacggccctctgggtgtcccccagccatactgggcccttccatccactgagaaccactgaggggccacgtggcaggccaccctgcggtggacggaggctggggctggagctttcacacacccgaggccgccgcgctcattgctctggaggcggggtccctcctcaacctgagcccagtctgcagggaggctgcagggccccagtgtgtggggaacgccggtccccagccagaggctgctcgctgctgggcagcctgggctttagggcagaggtcctggaggcatggcggctgcctcttgacagttgcgtcccaggagccctgagtggctctgcacggtcggaaagctacgtggttctgaaagccgtgcagatgtagaagtgtcgtcctggacgtccagcccacagccctcctcgctgtgtcctcttgtcatcctggatgtccagcccacagccctcctcactgtgcccttctctcatccgggacgtccagcccacagccctcctcactgcgccctccttggtcttctgggctccgtagccaga

SEQ ID NO: 1996 - DNA, 1195 bp, Homo sapiens
ggcatcccttcttagcatgagaggcattcctgtagttgtaaaagtttccagaaattgctttaaagtagaactatgcttgtggccaaaatatatcttgattgaacatttaaactgagtttcttgctttgagtttgagcgggagggcgtcatcgtgagtcttgtcttgagaaaacctctggtcgtgtttcatggacccacctttcctaatccttgtcctcttaatggtttcaacaggacagattgattcactttggagctgtaagtactgatgtattagggtgcagcgctcattgttccttgacgcagagtcccaaaatgaatatccaagagcagggtttccccttggacctcggagcaagtttcaccgaagatgctccccgacccccagtgcctggtgaggagggagaactggtgtccacagacccgaggcccgccagctacagtttctgctccgggaaaggtgttggcattaaaggtgagacttcgacggccactccgaggcgctcggatctggacctggggtatgagcctgagggcagtgcctcccccaccccaccatacttgaagtgggctgagtcactgcattccctgctggatgaccaagatgggataagcctgttcaggactttcctgaagcaggagggctgtgccgacttgctggacttctggtttgcctgcactggcttcaggaagctggagccctgtgactcgaacgaggagaagaggctgaagctggcgagagccatctaccgaaagtacattcttgataacaatggcatcgtgtcccggcagaccaagccagccaccaagagcttcataaagggctgcatcatgaagcagctgatcgatcctgccatgtttgaccaggcccagaccgaaatccaggccactatggaggaaaacacctatccctccttccttaagtctgatatttatttggaatatacgaggacaggctcggagagccccaaagtctgtagtgaccagagctctgggtcagggacagggaagggcatatctggatacctgccgaccttaaatgaagatgaggaatggaagtgtgaccaggacatggatgaggacgatggcagagacgctgctccccccggaagactccctcagaagctgctcctggagacagctgccccgagggtctcctccagtagacggtacagcgaaggcagagagttcaggt

SEQ ID NO: 1997 - DNA, 2167 bp, Homo sapiens
cttccagagtgccctgcatagaggcagacaccctgaagcctggtgacccctgggctctggctgggaaacccgggtcgtggggacgtgaaagggtgaggtggcagtgcctctgacctcttgccttttgaaggagggccctcctggacccgggagcggaccctggtggcggtgaagcccgatggcgtgcaacggcggctcgttggggacgtgatccagcgctttgagaggcggggcttcacgctggtggggatgaagatgctgcaggtagtgggactctgggcttgtgggtgtccctgtggggatggggttgggggatccttctcggcctttcacatcccagccagcgccggggcagggcctggctttggcagttgaaggggcaggagggatctattctgcggtgggggtgctgcccatgctggtgttatctgcaaggtgcctgaggtcagggcatcacagctgctgtgctagtgcccacgtttactgtctgcggctcctccttacctcaatgccacccaggcaccagagagcgtccttgccgagcactaccaggacctgcggaggaagcccttctaccctgccctcatccgctacatgagctctgggcctgtggtggccatggtacggcagggcaggggtggtggaagggcctgtgggtaaagggcgtgtgggtgtgtctttccccccagcaaagggaggggccctggattgagcccaggggcccttggtgttccccacttctccccaaccattatctctcgctgcaggtctgggaagggtacaatgtcgtccgcgcctcgagggccatgattggacacaccgactcggctgaggctgccccaggaaccataaggggtgacttcagcgtccacatcagcaggtacgggggtcctgatacaccaggctgctgctgggggcaaggagggccatcacttggggtggtggcagatccacgagacctggctgtcttgctgtgctaggatgaagccaggtcggacatgacagctcacactggtgagagccgtgttctcccagggcacacagggcaatgaggtgttccctttgtgttgtgtgtaccgtgccatcgttgcctgttacctgacaccccaaggggttggcacggggcaacttggggggaaatgaggctcccaaaagctggggcctgggcgggtccacgaggctgtaagaggccgaggccaggctggaacccggtttcccagctccactgttactccttccctgtctgcagtcacaggcttgctcccctagacagagggcaacgggagcagcagatggtccctgggattcctcagggtgcacatgaagcctgagcctcacattgctcctgtcctggcacaggaatgtcatccacgccagcgactccgtggagggggcccagcgggagatccagctgtggttccagagcagtgagctggtgagctgggcagacgggggccagcacagcagcatccacccagcctgaggctcaagctgcccttaccaccccatcccccacgcaggaccaactacctccgtcagcaagaacccaagcccacatccaaacctgcctgtcccaaaccacttacttccctgttcacctctgccccaccccagcccagaggagtttgagccaccaacttcagtgcctttctgtaccccaagccagcacaagattggaccaatcctttttgcaccaaagtgccggacaacctttgtggtgggggggggtcttcacattatcataacctctcctctaaaggggaggcattaaaattcactgtgcccagcacatgggtggtacactaattatgacttcccccagctctgaggtagaaatgacgcctttatgcaagttgtaaggagttgaacagtaaagaggaagttttgcacacccagttccataacgttgttggatgtatgagccaggcaggggtccagagaccaccagcctgcaatccggagaacccaagctaggcgcgagccggtgctgtgatcccgccaaaggagaagctgccttcccggggaaggggcagagaggggccggcgggctgaggccaaccagcgcagaaagggcctggcagccattactgtagcgctggcggctctgtcacgcccctgaagccgctggcccgcgggtgtgttcagctcaggagcggccctgcgtgtt

SEQ ID NO: 1998 - DNA, 1128 bp, Homo sapiens
tcccaggcctcccagcaggggtggctctcgcccctctggaggggagaccccaggaaccggcccccgccctcagccatagcctcacagggtccttgtttctcggggcctggctctgtgggtgcacaaggcatggtcgggctcccgtccttctggaagtctccagagtggcatgtgggcagctgtgtgaagcggccccccagatcttcatccagcctggcctgcagcagctccctacgccctctgctacctcccctgcctacctttgggtagacgttctcttgacccttccttctgtgataaagcaaaagcgtgtgatctcttttctcaccaaggaataaaacgtctctgaataccacagacgtgatgccgggcttttgggggccggggggtgtcctagggccccgagggaggagccctgtgggtgccgaagtcgggccgcaggccctgcactgagatgtcccctcagcctaccccaggcggctgggcatgctgggaagtcctcccgggctgtgtgtgtgaatcatgctgtttcttctctattttctctctctgtctgtttatttttgttgtgtgtcactctgcccagccggccgtcctgtctcttccctccatgctccgcttcgcccgctgctggccagaggtgaccaggtccggctctcagcacggccgccggccggggggccatggggagctccgcctcctccctggccgcagagaccgagtcggaccacagcttccccgggggaccgccctacccgggtcccccggcagcggctggctggtgtaggagcggcccaggggggcccgtctggggaggtgccctggtcagccggcagcaccagcccccacggccccgggcccgaaggtaagaggtggggaggggtggccccggagggctcccgggggcagagggcctcgttctcagggtgccccctccttggcagaggtgcttgcagagaagtgggtccctgctccttccagttgtggcagctctcttccccagggtgcaggagctgagcaggtctgagaccccggcctcggcctggctggttggtggtggggatgggggctagtgcgcccaatcccggcggccctgtgtttctcacaggctgtgctgctccacgcaga

SEQ ID NO: 1999 - DNA, 1214 bp, Homo sapiens
aacaacatctttgtaagggtttcgggtctctgagcccatgaacctgcccaggccctgcagaggtgagggtggccctagagtggctggggggttgtggagaccagaaccagggcagaagggcagggagggtgggggccctgccgaggtctcccaccgctgacccctgacccctggcccccttccacctcggcccaccgagagaggccggcacagcgcagactgcggggtcagtgacactcccctcagcgtctccagccacagaagggccgtggcctgccttcgccctcctcacccgtgtcccggggccacgtttgaactttaggccttgttctgacttcattgaaaccctcctgaagtgcagacgtcttcctgacccacctgggttttgccaggatgactccgaaaggtgtctcccagcagacacaccccgctggcgattgtttggtcctggggacccgggttctcattctcctctctggagctggtgaggctgtccttgctagtcggtgacaactacagggccaaagggagggtgtgtcccaggaggcccagcccacctctgcctgcacctgcggtcagcggggtgcagagtctgtgaaggcacctcccggagtgggggctgcaaagatcatggccactgtgccacccacaggggcccaggccggacgcctgggctgtgccgcctcggcagccaggccgaggaacgtgcaggtgcggccgggagcccgccggccacagctgcatccatgcccttctccgagtggtgatggcggggagaggcctggctgtctacgggcagattgcttgggctttcacagaagcccgctgttagagcagattcccggccttgggtctctctgctccagctggacgccctgagcctcgccgggcccagtccacccccgtccactctgccaggggcagctcagagccctcgccacgcggggctgagcgcagggaaggcagcatcacggagttcgctcggctccacagaacacccgtgttgctcgcggagactttttgtttttgtgcttcttatgaagaggcaggttttctttcttcctgaaccaaaagggtttagatggagcacaagattcaggccatatttacaagaacaattgatttttctgccaggcagagcagccagtctgtctcggaggctgtgctgtggtgtggggaggccccttgctcagatcagcctgtgccttccccag

SEQ ID NO: 2000 - DNA, 1200 bp, Homo sapiens
gcaggcttctgcggctccgaaacccgtggggccgtttctcctggaacggcagctggtccgacgagtggccacactggccggggcacctgcgtggcgagctcatgccgcacggcagcagtgagggtgtcttctggatggagtacggcgactttgtcaggtatcggcaccgtggggcggtgtgcacgccgcccccgccctcctagggccgagtccttctctggagaacaagcctgtccctcctgctgacctggggtggggcggcttgttcgtggcccaaatgggacctggagcttcagctccaaggtgccaacctcagaattcaggtccacccaggtcagcagattccagcgccctgaagagccggccctggagggcttcctattataggcctcagggatgggcccccgggggccgggctgcaagaggacggtgacggagcagctggcacctgctggggtcaccggcctgtggttgcggtaggcgctgagccacggaggtgtgggccgtggtaggctcagggccccgtcctcccgccacctgcaggtacttcgactccgtggacatctgtaaggtgcactcggactggcaggaggcgcgggtgcagggctgctttcccagctcggccagcgcgcccgtgggggtaacagcgctcacggtgctggagcgggcctcgctggagttcgcgctcttccaggagggcagcaggtgggtgctgcggggccccatcgggctgggctgggctaggctggcggccgtgaccacgcgtgaccctggcccgtggtgtctggcgcaggcgctcggacgccgtggacagccacctgctggacctgtgcatcctggtgttccgggccacgttcggcagcggcggccacctcagcctgggccgcctcctggcccacagtaagcgcgcggtcaagaagttcgtcagctgcgacgtcatgctggagcctggcgagtacgctgtggtgtgctgcgccttcaaccactgggggccgcccctgccgggcacccctgccccccagggtacgtggcccctaccccaggctcatgccccaggcccacggggagggctgcggttcacacgcccgtccttgtagcctccagcccctcggcaggggtcccgagagcctccccagagccgccgggccacgtgctggctgtgtacagctcgaggctggtcatggtggagcccgtggaagc

SEQ ID NO: 2001 - DNA, 1325 bp, Homo sapiens
tccctacccccttgcccaccaggctggccttggctgactccctcttggggacagggagggggtgccctttcattctccaaaccccagcctgcaagtctgtcccaggctctctgggaaataccccgaccttggtccagtgggctgtgtccccatgcccacagccctatgccatcaatgggaagatctccccccagagcaacgtggactttgacctgatgctcagatgcaggtcagagctagaggcggggggtctggctcaggtggcaggtggcttgggtggcaccccccaggccatgactccatctccccaccctctgcaggaacccagaatgggggcttcgggacacagccctcctggaggacctgggaaaggccagtggcctgctcctggagaggatggtaggtgggggagcgggggcccaggcaacctctctaggggttgagggccgtcctccagcaaagtgtttctccaggtggacatgccagccaacaacaaatgcctgatcttccggaaaaactaagcccctccttcacccccgcacacctgcatccctgccggaggctctgtgaggcacgaaccctgcctccctaggccggaccttgtggacgacagccccacccagtctgtgctctcagccgctggccgaagggcccagcctgctcagaataaagcatgtcctgctgccggcttgctggtgtctgccccacctcctcctaggagcaccttgtgaggttgggtgggagacggggtctcctgtggggtcaagggcttgggacgtcctgatccttgctgctggagctcgggcagtgggattggggccgagacagctgctgaggcaggatggagctggttggggatgcaggggcggacaggcactccctggtgaccttgtaccaaagcccaagccccagtgggtgtcaaggccccagcggaaactggctgggcatggggcacctggaaggatgagggtcgcccgaccagcagcagcaagccaggaggtctgaggcacagggagtgcgtttattcaccaggacggggtggcgcaggcccctgcgggggctagtcctggaagcggttgagcagctcgcaggcctgcttctccagcagctccaagatcttcttgacgcgcttctcgctggcggcgcggacgtagctgccggcgtccagcacggccacgccatcgcgcacctcacccatgatgaccagcggcccgtcgcccgccgtcatgttggggcaggggcaggcccagtccatgccactcagcgtcacctccaggtacttggtgcccaagaacttgaggcccatcttgtcatccttgagcacg

SEQ ID NO: 2002 - DNA, 1149 bp, Homo sapiens
cgcagtcctcagcttctcactctacagggtcctggtgaagagccagtgaggcccctggtacccaagccccctcccctgacctgggtgtgcctcgctgctggggctctgcaggggcagcacagctggggtgcaggccaggctgccactccgggaacgcctttgcgccgggactttttgtttctgaaggcagtcgatctgcagcggggccttatgctgccatgcactgccctggctcctgccggacccccagggtgggccgtggcaggtggctgagcaggagctcccaagtgccggccaccgctgtcagggattgcccacccctgggcatcatgtgtgtggggccggggagcacaggtgtgggagctggtgaccccagacccagaattctcagggctctacccccctttcctggtcctaggtggccagtgggtatgaggagggctggaaggcagagctttgggccaaaagcaggcgttggggggtcccccctcaagtttggagccgtttccgtggttgtagcagaggaccggaggttgggttcctgattaaacttcactgtgtgttttctatctcggatcccagtctctgaagacaacttgctttgattcaacctagaatgtgttgtttgtctttatgtgggctggaaacgccacccctcctttcattcctgggtcactgttctgaggtctcaggcgtgtgcatatggcctctggaaggtccactctgggctgctgtggcctgggagcccagtgtccttggaggtcctgcggtctgggagtgggagcccactgcgggaggacggtgcgcgcccggcatggactggggggcgccggtgcctgagatgtttccccggtgactgaccccttctcagggtccagtgtgccctggcactgcccactcactccccagagcgtcctgccagcctggctgagctgcgccgagaacctgggcttgtgtgaccagatgtggtcactgcctgccacagaacggggtgaccctggggccctgacctgagggaagcaggatgggccagagggagggacgggctgggagttgagcccagatgcctgcttctcgggacccagggcgtggccttcccaaggtcacccggacaagtatcagaaggcctggtcccccccctcccatgtc

SEQ ID NO: 2003 - DNA, 1134 bp, Homo sapiens
cggccgcgtgcagaaccccgcctggtcttgtgcccgagacgggcggaggctggaacttgagacctcaataaaggaagtagagccgctgtcggcactgcgtgtcaccccatagcgcggcgggctcgccgtaggcccgcggggcagctggcgggcgggggctttcggcggggttgtcgccatggtaaccggcggcgcccatagtcgctctcggggcggccttcccagtgcctcccgtagaggcctcttccggggcgggccaaaggaggtcacttccggggtccgtcccggttcccggccgttgccacgacgacgaagctgccggccaatggctggcggatgggcccaaggttcccggcgtgcagcgcggctgcctgagggcggcaggctcatggcgccggcgtcgcggttgctcgcgctctgggcgctggcggctgtggctctacccggctccggggcggagggcgacggcgggtggtgagcggcccgggaggggccgggcggtggggtcacgtgcggcgggcggggcgcgggctgacccagctgtgcccgcaggcgcccgggcgggccgggggccgtggcggaggaggagcgctgcacggtggagcgtcgggccgacctcacctacgcggagttcgtgcagcagtacgtgcgcccctgatcgcggaggtcgcgtcctgttcaccggcccgtctgccccgaccgcccaaggccgccttcccctgacctcgcgcgcacgcgtggggctggggcggcgaggctggcggtccggcctggccgcgactctgcccttctttccaggtacgccttcgtcaggcccgtcatcctgcagggactcacggacaactcggtgagcgcgtgcccgtccgtccccggccactctcgcccgtgctgggcccggccactaagtcccctccccgcccccgcagaggttccgggccctgtgctcccgcgacaggttgctggcttcgtttggggacagagtggtccggctgagcaccgccaacacctactcctaccacaaaggtacgcggcctcacccctggggcccgcccatttgccaacaccggggcggctggaccagacggtcctgacccgtctctttcctgcagtggacttgcccttccaggagtatgt

SEQ ID NO: 2004 - DNA, 1134 bp, Homo sapiens; identical to SEQ ID NO: 2003

SEQ ID NO: 2005 - DNA, 1134 bp, Homo sapiens
ttcttcgcccagcagcaggtaacggcgttgggccagccccagactcaggctggggagcggccagaagtgactttgctggcctcttgccatgaggctgcaggaaacagagtcctcgctgtgctgtgcggccttccccagcacacctccacccttgttccctcctggttcaggcccttcctcttctgcagcagagggcttcgttctgatccagaggtgctcactgctcacccagaggcagccaggcctgaggctgagggagcaggaggccctgggcagtccgggcctggagcccacccctccggccaccaggtccacgaggatgcccagcacgacccccacctgaggcccagcgggatagaagcctgaagacactcagccagcagggggcgggagagggcgagggcggccccggtggtgcctgggcctcgagcgcccatgtcccctgcggcacctcttgcctgactgcacgcggattttcacccggggctggagctggttggttcccccgtgacatccgtttccccggctgctgtgcagtgagccggcccgagccgtgggaaggccacttctcctccgctggacttggctgttagggagcgcaggcacactgggaatgggtcagtgtcattttctgtcacagccagggcccgtcctgtccagggacacatccgcagagccggcaggaggcttgctgggaaatggagtgaggctcactgtccctcggggtccggcctggctgcaggatggctgagttccaggtcccgtctcagccaccttactgctgggattggggagacaagtgtttgtttctccttgtagcacttgacccctgacaagatctaccacgtcacagtgatgccctgctatgacaaaaagctggaagcctccagacccgactttttcaaccaggagcaccagacacgggatgtggactgtgtcctcacaacaggtgcggtcacgccgtgcggccctgagccctcaagcctcctggtctgattcctgagccctgggcacaggtggcgactgcccaggatcctgcctgtgggggccctggctggagtgtgggggctcgcatgcgtgcacgtaccttcgtctctccccttggagccaggtgggcccatttgcagctggcct

SEQ ID NO: 2006 - DNA, 1114 bp, Homo sapiens
gatctcatgaaccactgcaccaagagacgatttccagcccagcactgggggcccagcccacaaacgaagggaacccctggaaggtgctggggtgctggtaggcgtggctgtcggtgcagtggcagttggtttggaggagcctgtcagcctctgcccagcaccctgtggcaggcaaggctttgtgccttggggcagaaccaacgtaggaatacaaggcgagctcagattgtgatacacaggcctagcagagagctgggctgcgaggggttcccacacagttcccacccagtcgccttactcctctggctgtattccgggccactgcagcacccctggccctgctcaaaccattcctgcctttgcaggagaagttgggggagctcgagctgggtgcgttttgcatgtaagaaaagttgctgaggcatgtcccggaggcccccgactggaacaccttgttcctgcatctgtttggcgagtctgacggttgtttctgccccgcccaccggaggccaggctcccaggcttcctccctctgctctcctcttcctgtgccttcgtcctttcctcctttgtcctcagctttcccgcctcctcctttcagagcccaccttcggcattttcctgccctacagccctgtgagtgtgcaccggggccagcaccccgtccagggccccatgggtgagtggggtggctgctgctttgctgagataccagtggcaagccttagtcctgtgattcggatgcactaaccaagtggtaccaagaagcagacttgacggcattatgaaactgtagagcgtgcgtgtgcatttttgtaatacatacctaatttttaaaaattcagcggcacacaagcccagccagcagccatgttggttgtcggttatgagctggactccactatcctctgtctccatgtcctcgtgcagagggggcccctgtgcaccgggttcttctcccttgtaggacggcgggacccggaggctggagaaggccaaggtctcgctaaacgactgcctggcgtgcagcggctgcatcacctccgcagagaccgtgcttatcacccagcagagccacgaggagctgaagaaggttctagatgctaacaaggta

SEQ ID NO: 2007 - DNA, 1227 bp, Homo sapiens
ctggaggagatgctggaggctgggctggacccgagccagcgaccgaagcagaaggtgagccccgctggctgtgccgccgggaacaagcctgaggctttgcactcggcgccggcacccttgcagcctgttgactttctccaggagccgtgggtgtggtgacgtgtgggtcttggcgtgaagcgccattagcgtgagttagaactggagcgttgcagtaacaactcgggggaagtcgttgtccctgaagggctctgcggctggccaggatgatctgggtggacggtgggtggtttctgggggccagtcacactggtatcagctgtgttttgtctgcacgaactttgctttgtgtaggtttttttttccgttgccatcttggtgtgtgaaagtgctcaattttgttcttatttgatggctggagtggggtggagggagcgcccagcctgtgggacacatgtggcagtccctggctgctaggccgggagcgtcctgtaggtgcggtgcacactacgccttcatctacctgggctgcaggtggcactgctctgtgggcccccggggctggggaagaccaccctggcacacgtgattgcgcgtcacgcggggtactctgtggtggagatgaacgccaggtgagtgatgtgaggtccgtctctggctcgccttctgtcctgacgtgtttgagttctggtggcggacctgaaaccgggtgtggatgttcccgtcttgagggtggtgggggcctgggtgtgtgggccgggaaaacgtgtccttcctcggggttcacgggatcggcagcagccgcgtcatgtgacggtctccacgcaaatgcggcagccccggccttgggaggctgccctgccagggacgcccactgccctgacgacccctgacctccccattgcagtgacgaccgtagcccggaggtcttccgcacacgcatcgaggcggccacccagatggagtcggtgctgggtgctggcgggaagcccaactgcctggtcatcgatgagatcgacggggcccccgtggtgggctccttgatgcctgggtaggtgggtgggcgggcaggcaggcgggcagcagggcctggactcaccgtgtcctctgacctcccccaaggccgccatcaacgtcctcctgagcatcctgaaccgcaaggggccacaggaggtggggccacagggcccggctgtgccttcgggaggcggccgacggcgccgggca

SEQ ID NO: 2008 - DNA, 1205 bp, Homo sapiens
acctcacctgcatggacttccactatgaggtgagcgtgccgtgcagcgtgagggcagggcacccggtctcacgccgccccgttcccactcttggcggggctcagtcctgcacaccctggtgagctgtcgcatcacagggtcacccccattgattcaggacgtcctctccctcccttcacggggtgggtggtcacacgggggcttgctggggctgcggggacggggtctgtggccctccatggtctcgagtgcagctggtttgctctggttcctgcacgggcaccctccgctgctgtccttggtcctgcccaggcctccgggccggcccctccttcctggagtccacagctccccaccgtcccctgacaggtgcctgttgggggcttcctggctgcgtgcccagcccctgccacacggaactgtggctccatcgttacctggacacgggcaggtgtgtcccacagggcaggtgtgaaccacagcacagttccactgtgcttggcccccagaccaaggctgagtcccttcagacgccccagttcctgccaactgctcacgtgttcacatgggggctgggagtggtctggggcctggagctcacgtgttcacgtgggggctgggggtggtctggggcctggagcttggatagtcatttgttctcagtccatgtgggagcctcctggtagcaccatccccaccctgggcccgtgtggtcatggccacggtgcacctagagcatctcaggcctggacaccccttcctgcatttggcccgtcactcgcacctgcacgcggaagccatcatcgtctgcctgctgccgacagccagtgatggctgtctcactgcctttgcgttttctgccagggttgctctggcactcaccgcctccaagcgtggagctggcaccgtcctcacgcggtgcctctgctgcgattccgggtcttggtccacgtgccggcctggcacaggcgtttgtgcctgcatttagtggctgtgtcctgactttattcttcaggctcttgagatgtctccatagcccatcaagtgccccgccttgctgaggacccgtgagctcctctctttgtccgagagcaggttcagctgacggtctgtgaaataccagaaagtaaacactctcagctctttggctggatggtcccaacacagccgtgacggggagcagccgcagggcacacgtgtgtgag

SEQ ID NO: 2009 - DNA, 1179 bp, Homo sapiens
gcccgccttggcctcccaaagtgctgggattacaggcgtgagccagtgcgcccggccccatacaaatgtatcttaacatcgtatacaacatcttttcattcagcctaaaagtgtatcttttctttcttttaaaagaaagtaaaccatttcagggggcctggacaagtgctgggaggaccgtgccaatggcttagttggccggcagggcctggtgggtgtccggcctctttggggggggcccatgttaaacccccgtctccccacctctggttggaatccctttgagcccatggcttgcccagctgtgttggacatggccaccgggggcgctgtggctccaaacacatagatggtggtggctggcctggcccctatattcccaccccccatatccccaccaccaccacctgcagggtccgtcttccacggctgccgcccatggcagatgtttgggcagaggcctggcggtactcccttcgctgactggtccgcccccgccaggtcccaggtcgctggccggctctgcacctgtcgccatccccggctccctgcccagagcaccatcgctacactcgccatcctctgcgtccacctcgccgctcggttcgctgtcccagcccctcccagggccggtgggctcctcagccatgacgcctccccagcagccgccacccctgcgttcagagccgggcacactgggctctgcagcctcatcctacagccccctaggtgagtgccggctccctccatgctggcgttgccgtgaagcctccgtggggctccctcccagatgccgtcctgactgaggggcctcacacggaaccttgtgccctatctgtggtggcaaaccacatgacctgctgctcacaggttcccccacgccgcagaccgagtctcgctctgtcgcccaggttggactgcaatggtacgatctcggctcgccgcaacctccgcctcccaggttcaagcaattctcctgcctcagccacccaagtagctgggactacaggcgggcgccaccacgcccagctagtttttgtatttttagtagagatggcgtttcatcacgctggccgggccggtctcaaactcctgacctcgtgatctgcctgccttggcttcccaaagtgtgggatgacagtgagccaccgtgcccggctatttgttacgttgtaaaag

SEQ ID NO: 2010 - DNA, 1133 bp, Homo sapiens
cccttcataatcccggggcctgcaggcggtctgggcggtcctgctgctgccagagtgactgcgccagggccctgcctgaccctcgccctgaccgcgccctgcaggccttccggacggtggagatcaagcgctgggtcatctgcgccctcattgggatcctcacgggcctcgtggcctgcttcattgacatcgtggtggaaaacctggctggcctcaagtacagggtcatcaagggcagtatccttcccagtgcggccgctgcagcttgggaggggggcgtggcctgggccgagtcccgggcagaagtcctgagcccagcgtgttccagtgcaggtggaggcggcccggccaggctggctgtgtccctgtcatggttgggccgtgagacgtctctgggatgtccagtgaacatcatggctccacccagcagggtggcatctgccaggctggtctgtggggcagggctgaggtctgggctgggtggtcatgacggggaagcagccagccctccttgatgagccccagatatcgacaagttcacagagaagggcggactgtccttctccctgttgctgtgggccacgctgaacgccgccttcgtgctcgtgggctctgtgattgtggctttcatagaggtgggtggcaggatgccgcagctatggcggaccccatgaaggattgggggtcttggtgaatgggcgggaacccctgcagctcacccacccccaccatcacattggctgacaacccgggcacttttagaatcacgtggtccagactcacaacctcaggaggagcagacacaccagggcctcttcacccccagagccctggggtgctgctcctgacctaccagcacaggcctgggcaccctcaccccactccgcccctccttccatctcctcactctgccctcccctccttccatctccacctccgcctccaccacgtccttgatctgtgtctgggctgggaagagtgagagcagctaccccaacgacatgagacccttccctggggccccaacgtgtgtgctgctcttcccttccctgaggccccgacgtgtgtgctgagctccccttccctggggccccgaagtgtgtgctgctctccccttccctgaggccccgacg

SEQ ID NO: 2011 - DNA, 1326 bp, Homo sapiens
gccaggggtgtacagtgcctgtcagggttgagcttagtgatcctctctcaaaccacacccccacataaagcctcatgctcacccgggctccagccagacacatcctgcccctgagagccacgcctctactctcggaggaacgtcagtgtctagagtgtggggtttgccctccgttggcagaaaggtgaggagaaagctcctcttctctgggcccctccctgcctgtccctggtaacgcctcctgggtcctgagtttgagaaagcagagcctcgccccagcaggtactcacagccagagtgcgggggccccagcaggttctcacagccagccggtgagtgcacctcagagcacaggggcccagagccaggccactccttcagggccccaggtcgcttgctgccagttttggcctgtgagctcactggcctcagtgccaggtaaggacagccaccttcctgggaagaagaggtgaccccgggtctggtggatttcccacaggggccgtcagaggatgtccacagaggcagagcccttggggcctgtgggctgggttgggctggtggatgtggggcctgggacttctccagaagcttacttcctgctgcatgctttgccgactgtccttccacctctaagtgtccatcgtgcctgtgggggctgctgcaggctcctgctccgtcagcccacctgctgctgcgctgctctgggagcgagctccctcatggcatctggaacgctctcctgtcctccctgtgctcagggctggagagagggtggcggggctgcgggctccccgggccttctgggcccagccctgccacctgggcccacctcctctcactgtctctggctcacgcttcccgggcctggagctgggacctgcccataggcatctgaagacacgtcagcctcagccggggggagcccttgcttgacgctctctggcctccgggctgcctctcgcgcccgctctgggcccgctcttcttctcatgatgtctttcctttcacctcctgcgttgtctgacatcgtcgctctcttcataaattgtagcgttttatgttttcgttcataggagtgttttatttgatttttctttattttaaattattacatttaagttctttttattttatgctctaggttttgaagtttttctaatttcttaatttttttgttgttttttgttttgttttgtttttgtttttatgtactgtattttcagtgttttaaccaaacagttgtggctactcatggtgaggaatgaccgctaagagtttgggttctttcagtgcatttggaggtcactgctacacgttgatgtt

SEQ ID NO: 2012 - DNA, 1148 bp, Homo sapiens
tgccacagggtggcatgcccagattttaggggtgacatgggaggagccagaccccagggctcttgctttcaattgttctcacagggtacaggaaaaggattccttgtgattagcctctcttgctccttttctccaccagcaaagtcgaccaagaaattatcaacattatgcaggatcggctcaaagcctgtcagcagagggaaggacagaactaccagcagaactgtatcaaggaagtggagcagttcacccaggtggccaaggcctaccaggaccgctgtgcgtgccccacccacccccaaccccccaccatcctcctgaggcctgggggccagaaccattgcaaatcttccctcccctcccttgtgctcacttgactttgccccctttgcatgtagcagaggcctcggttcccagcttgtttccattgcttccccagatcaggacctgggggcctacagttctgccaggaagtgcctggccaaacagaggcagaggatgctgcaagagagaaaagctgcaaaagaggccgccgctgccacctcctgaggcagctgtgggtgcccctgctgtgtggctctgtatgactgttgctgaaatataaagccctgcaacctgcctgtgtgtctggtgtgatctattggccccacgccccagattcaaaccaccactaaccatgcaggacacgggaaaaaaacagtaacacgcttaattcactttatttttcttgtataaaaaccctatgttgtagccacagctggagcctgagtccgctgcacggagactctggtgtgggtcttgacgaggtggtcagtgaactcctgatagggagacttggtgaatacagtctccttccagaggtcgggggtcaggtagctgtaggtcttagaaatggcatcaaaggtggccttggctgcaaaacaaaagaaccccaggagggtcagtggtgtgcttgaggcaagtcccccaacccaaaaattgtcgcactcctaggaacagagaggccattctgggcgggtctgtcgtgcattaggagagcctttctctgcctccctgaaaacacgccaagcacacactggacccgtgtggttaagcggagctgagagaccatggctatgccccatgtgtggaccacctaccgaagttgc

SEQ ID NO: 2013 - DNA, 1358 bp, Homo sapiens
caaaaacgaaacgaaggggacagatcggggggaagccaggtgagggggttcatgacttcttcggttttttttgggcggggtgggcggttacacagtttcgccctatcgcctaggctggcgtgatctcggctcactgcaacctccacctcccaggttcaagcgattctcctgcctcagcctcctgaatagctggggttacaggcgcactccaccatgcccggctaattttttgtgtctttaatagaggtggggtttcaccatgtggccaggctggtatcggactcctgaccttgtgatccgcccacctcagtctcccaaagtgctgggattacaggcttgagccaccgcccccggccgtgactttggttcttgaatatcataatggtattaagtttttttttaatgctctccctacaattttcttgtttgtttcaggaatcagagatcattgatttcttcctgggggcctctctcaaggatgaggttttgaagattatgccagtgcagaagcagacccgtgccggccagcgcaccaggttcaaggtacccggctgtcctggagggggctgcgctgggcttgccgggactctctcggctctgcatagttgcacttggcttcacccgtgtgactttcgtaacggggagagagagaaaagatctcctcaggacctcggatgggccttactgtggcctctctttccttgaggggtgcaacaggccctgggcggtgggcagtgattgggtgtagggccaccagctgcctcacacacatcttttcgcaggcatttgttgctatcggggactacaatggccacgtcggtctgggtgttaagtgctccaaggaggtggccaccgccatccgtggggccatcatcctggccaagctctccatcgtccccgtgcgcagaggctactgggggaacaagatcggcaagccccacactgtcccttgcaaggtaggctggtggcaggtgatgggcctgccgtggggcaggctccctcgggcccccgtctcctgactccttccctcaccaggtgacaggccgctgcggctctgtgctggtacgcctcatccctgcacccaggggcactggcatcgtctccgcacctgtgcctaagaagctgctcatgatggctggtatcgatgactgctacacctcagcccggggctgcactgccaccctgggcaacttcggtaggtggtccacacatggggcatagccatggtctctcagctccgcttaaccacacgggtccagtgtgtgcttggcgtgttttcagggaggcagagaaaggctctcctaatgcacgacagacccgcccagaatggcctctctgttcctaggagtgcgacaatt

SEQ ID NO: 2014 - DNA, 1358 bp, Homo sapiens; identical to SEQ ID NO: 2013

SEQ ID NO: 2015 - DNA, 1358 bp, Homo sapiens; identical to SEQ ID NO: 2013

SEQ ID NO: 2016 - DNA, 1189 bp, Homo sapiens
actactttctggggtcttggtctcttttcctagtgaccttcagggcctggccactgaggcctcagtgccgcctcggtcagagctgggcggtgcctgccttccgcgggtgggtgggattgcctggccagcacagcctggaatctgccgtgggggtgacccacacacgtttaatttgcactgacgttgtttgttttggtgtcatgcgtgaagccttacttgttctcagtcatgtttaccagacgtattatcatgcatttttgttttctgtctcttccccgctaactgccctttggcatggctctttttgctcatctcacccgcgggatctctccatcctgaccctgtggcctgggacctttcctcctcacccctccactggcttgttctccccttcccgggagctgggctctctggggcgttggggctccttcctcacccgatagtctgaggatagccagaccccccaaacaaggcttgaataactctccacccgtgaaagaattcaaggagagctctgcagccgaggccttccggtgccgcagcatcagtgtgtctgaacatgtggtccgcaggtagcgggactgtcgggtggggggcacggaccctggagcttggccccgtgagcacctgggtggcagtgcatggggctgcttgcatgacctcatcgtctgcccgtgtcctccctggccagcccagggggagccggtgacgaggggtggaaaggttgcattctgtccccaggccccgtatgagcacgggctggttgcacgcatccccaggccccctcggggtgccgctccgagagagccaggcgtgccgggcagcagcctccccaggctgtccccaagggccgcagtgtgggttgggggagacaccactcctggttttggccttttcgtattctctagaatggacgtttttcttcgggctttcttctcaacaaggtttattttttgttgtagctgaaagggaacaaggggcatttgtggagggtgctggggtggggcagcctgggagggcctgggtgggggctaggatcctgcagggcatgggcatgggcctgggccccaggccatggtcttagttctccccgcagtgtctgggtgcaggtgtgggctctcgggctctcggctgtcacctgcctgtgggtcatcgctgctggcactggcagaggggatacctgtctcct

SEQ ID NO: 2017 - DNA, 1081 bp, Homo sapiens
tcaggaaggccccgagcccaggggccggggtggctggcttcaggcccggcccacgtcctgactctggggtgagccttccacagctcaccccagagccgtggagtggtggagtgtggcccgcttgctgcagaggggcctgctctgggtgctggtgtttcctgcgggttttcagctcggctcagtcctggagcccttctctgctccagcgagccgtggtctgactgcaggacaggttctgggtccctccctgtggccctgggttcactgaggccagcactgtggtgggccgtgccccaagggcagagctgccaccgtctctggctgcctgtggcactagcttgccaggctcggggggagcattcagcttgaggctggtggttttgcatcaggtaagtggtggtcaccagtcctctgccctcttcttcagggggccatggtcttcgagttggcgccctggacgtgccggcctcccagttcctgggcagtgccacttctccaggaccacggactgcaccagccgcgaaacctgagaaggcctcagctggcacccgggttcctgtgcaggagaagacgaacctggcggcctatgtgcccctgctgacccagggctgggcggagatcctggtccggaggcccacaggtactgggcggggctggcctgagcgccatctttctgccagtcacccacagagctgtggacactcaggggcgattgcagacttggccctcttgggatatttgggggtaacttttgttttttttttgagacagagtcttgctctgtggcccacgctggaacgcagtggcgcaatctcggctcactgcaagctccacctcccgggttcacgccattctcctgcctcagcctcccgagtagctgggaccacaggcgcccgccaccacgcctggccaatttttttgtatttctagtagagatggggtttcactgtgttagccaggatggtctcaatctcctgacctcgtgatccgcccgccttggcctcccaaagtgctgggattacaggcgtgagccaccgcgcccagccatttgggggtaacttgtaagtctccagaggtgagc

SEQ ID NO: 2018 - DNA, 1234 bp, Homo sapiens
cgaaactacgacttccggcggcctcgtcgtcgcggggcgggaatggcagcttcagaatcactctatgttgcagatcgaagtctgattggctttgttcatccgtcactcaccgttaggcttcacggactctgcataagggaggagcttcgggtctgggtctgagagaccgtctccaaaagaaatgccacggtacgattggtggaaacaacgcggcagggagcggagcgtaccagcggcgggggaaggcgggcacttccgccaggatagcccaatgacagaggtgggacagtttctataaaagcttgagcctcgcccgcccctgtcttttcggggtcgagtccgagggggaagaggtttgttaatacgttcgccatgtgctacgatcttgggacgaactgagccacgagcgtggctttgagggccgtccgaacgctgcaggccggccaggtccctgggcgtccaggcctggcctacgcaccactttgtcccttagcgtttaaaggtttcttcccgaatctcaggccctcagctacctgcaggtaagactgggccgggcttgggttcccttattctcccagtctgtgatgaattgctttgacttctgacacctcgtatgaaaactgcacgtgcagtctgattatttagcaagactgaggcttgagggtgcgcactcctgacggggagctgagagtggaaacaggtgttgcccgaaacgaaggagtggggacttaatgtctgtattttggcgctgactttcaggtttcgtcgcgagccggctgcaagttttgaacctaagtaaacctcaatccggagggcctagcggtaaggtgggcgctgtgtctattgaagtgcttagcaataaagaaaggtagtgagttgattcggttttctctcaagtgtctttattttcctattctggcaccccagaggtctggctgatccacaggcaatcttggaaaagggtacagacatgaaaacggaagctcgttaccagtgacttttcatctcttgggattgccttctccatttctgcccgtgattttttttttttttttttgagacggagttttgctcgtttcccaggcgggagtgcgatggcacaacctccacctcaagcgattttcctgcctgagcctcccaaatggctggaattacaggcgcccaccaccacgcccggctaattttgtatttttagtagagacggggtttctccgtgttaggctggtctcaaact

SEQ ID NO: 2019 - DNA, 1111 bp, Homo sapiens
tggtgggagaccgcctggacacagacatcctcctaggcgccacctgtggcctgaagaccatcctgaccctcaccggagtctccactctaggggatgtgaagaataatcaggaaagtgactgcgtgtctaagaagaaaatggtccctgacttctatgttgacagcatagccgaccttttgcctgcccttcaaggttaaagattgagtgtctttaatctgcagaataaaaaaaaagaaattgaaaaccagttacccaaattaataggtggggcttaagcatctgctcggctaagtggcttcaaagagtgtaattggagttaagcaaaggcattcattgttaaccttgtaagtacacgtttgggggacgattttgtttacagatgcttgtaatcgaagatgcacttttaggcttggaaggcgttgtgggctgggttctgggccttgggtggggttggcaggggcaggctctgcacctgtccgggattcaggtaaccagggcctgccgatgggactgaggcgggtctaggggtgtgtgtcctgtattttattgaaaaactcattcagggatccagcccctcagggggcagagggactgattattctgactgttgggagaggcttgcatggaccagagccccatcagtatgactgaaagtccagcggagccttctgtgtccctgtgcctcccagcagggtgggagtggaggaggcggctgctcccaggtggcatctccctgcccttgggtgcaaagtgctgccctcaccactctcccacctcccttacttccttgaaaaccactctgatgtcacaactgagtgtctgttccgtttcagatacccagggctgctgcccagttctgtaaacgcagcccagctaaagctctgctgtctcaagtgtgcatttatacccaggtgatttggacggagcagctaccatggcgtggacgccttcactgaactccgggctgcagtgcagggagctcagagcagtgctgctaccagtttttaactttgaacaactgtgtcaggcaatggatttgaattttaagtgtattaatagctgtgctctgtgtcgtaggcaaaattccactgaaggagcctctgtgccctgc

SEQ ID NO: 2020 - DNA, 1204 bp, Homo sapiens
tcacggtccccgggccgccgccgccacaggagccgctccagctccaactcctcccgataaacaggccactgaagctctcgcccctgtaacttataccccacccagctcagttttgtcacttttctagccaaaggaagaccagtaggaaagcaaacccttgactctggcaggatttgcaggcagcaggcagcacccctctgccagccgggccccggctgcagaagtgctgttggtttggatgctgtgtgcctgtcaagattccctccggttttctggctagaaagctcatccgtttccggtttctaagagtcagttcagtggcagagccaccagggaaaagtgaggctcttgggggtggtttgaccctgcttacctgggagcacacttttcccttccccgatgacctgggatggtggccaggccgtgcccttgctgttgctgggcagtgtccttttggaaagggagctgccccaggctttagtgcagctgccaaccctgttaggcctggcctctcgaggcctcttctgacctcaagggtcacaccccctcaaagatcctctcacccatggtagttgctgctcgtggttctgtctgtccgtgcaccgatgcacacaccgcaccccaccactgtactctgaaattggcgagtgagtggagagccagctctgcggagtcatcacgcagccatggttgtgcctgccgttcatggtggtctttcaggttatcttggcaacatgtacattgcttttattttttttcttttttgctttcattgtacagtcagtactataaaatttctcttttgagttttatacctttgtagcattttagatgacattgtgtttgtactttgttgtgtagagtggaagaattgtgttgaataaacccaagatcggaatgcaaatctagttctgggttcactgccttctcacttgtcccctcgcccctagtaactttctgttcctcaccatccgcagtggcacctccgatgctttcagccaggagaacctagggtttgtgtgctgtggggaccaggttgctcctagggtggacaaatagaaggagatggttttatcgccaccttggaatgtgtgtgtgttttcagacagactctcgctctgtcacccaggctggagtatgtaccatggtgcgatcatagctcattacagcctccaactccttcttcagtgtccagagtagcagg

SEQ ID NO: 2021 - DNA, 1152 bp, Homo sapiens
gtggcgctgggcaggggtaggattgtgggggcctcatcagcccctattgccagaggactcccaggtcccgcagaggagcctgggccctgttctctcctaccagtgacttttctgctccccaaaggttttcggtattctggagaaagccaaggaaaagtacggcgtggacgactactccgtgagccagatctcgctggaacaggtcttcctgagcttcgcccacctgcagccgcccaccgcagaggaggggcgatgaggggtggcggctgtctcgccatcaggcagggacaggacgggcaagcagggcccatcttacatcctctctctccaagtttatctcatcctttatttttaatcacttttttctatgatggatatgaaaaattcaaggcagtatgcacagaatggacgagtgcagcccagccctcatgcccaggatcagcatgcgcatctccatgtctgcatactctggagttcactttcccagagctggggcaggccgggcagtctgcgggcaagctccggggtctctgggtggagagctgacccaggaagggctgcagctgagctgggggttgaatttctccaggcactccctggagagaggacccagtgacttgtccaagtttacacacgacactaatctcccctggggaggaagcgggaagccagccaggttgaactgtagcgaggcccccaggccgccaggaatggaccatgcagatcactgtcagtggagggaagctgctgactgtgattaggtgctggggtcttagcgtccagcgcagcccgggggcatcctggaggctctgctccttagggcatggtagtcaccgcgaagccgggcaccgtcccacagcatctcctagaagcagccggcacaggagggaaggtggccaggctcgaagcagtctctgtttccagcactgcaccctcaggaagtcgcccgccccaggacacgcagggaccaccctaagggctgggtggctgtctcaaggacacattgaatacgttgtgaccatccagaaaataaatgctgaggggacacagtcacagtctgtgggtcacacgcgcgagcggtcacagggctcaatcactcgcccacaatctagacatgaggctctcctttcacatttcaatcacacaaacgtg

SEQ ID NO: 2022 - DNA, 1206 bp, Homo sapiens
acccacagatggcgtcaatgtgaacacctctctttgtgctgaatttctgggccattcttttcctgtcttatttctaaatttccttcttccaagatgaaaacaaaagaaaaacttaaaacagaaggtattaaaaaaacaagagattcccaccattatttaggttcacctgcaaaacaaaaatcttactccagcccctcaatgccatcctgacacactttatgcaaaaagaattttcccagataggctagccagaaaaaacttcaagtcctctgtaacatctgaggtgaccaagaggcagaagagcagagcagtcgggggccgtgtcctggctgatcccaactgcagctctgctgtgggggcccgtgggagggaggcagacccctgggctttcctgctggccacggagactctgctcctgcatggaaagggagcctgggagccagcagcccacgcctggggagcctgcctggggccatgtgaccatggcctctccctgggaacgggctgaccacaacacaccctgctgccatccacttctgtttactctgcaaatgtaagaaagaaccacttggccagaagtgtcccccagatgcttttttttttttttttttggagacagttttgctcttgtctccccggctggagtgcagtggcatgatctcaactctcaactcactgtaacctccgcctcccggatactcctgcctcagcctcctgggtagctgggattacaagcacccaaccacgcccagctaatttttgtattttcggtagagacgggatttcaccatgttggccaggctagtctcgaactcatgacctcaagtgatccgcccacttcggtctcccaaagtgctgggattacaggcatgagccacggcgcctggcccccaaatgctcttgaaccggaaacccagggatgggagatgctcactgagctgctgcttttatgtgtgctggtgctatgtgtgttcatgtccgcggcagctgtctttttgctactataagggaattctggccaccctgggtggggtgtggtcggggtgagaacccaagcgttggaactgtagacccgtcctgtcgactgtgtgcccctgggcatgtgtgagcctcagtttcctcatctgtaaggggggcaatgatacctacctcacaggggtgttgtgaggattaaatgtgaggaggatagtggcagatgagtgatgg

SEQ ID NO: 2023 - DNA, 1239 bp, Homo sapiens
cctgccccctggcggaccccaccccctgtcctgggcgtttgccccagttccctccccaggcctcctgggccacctctcacattaacccttcttggctgcctctgaggctcccctgggctgcgtttgggagctgctgggtgggaggaggagggtgggatttgtgctgggctccacccccagggagggtgggagctggagggggatgtcacatgtccttgtgtttctgcagagcctgaagcttttgctgggcctccctgcgtgttcccatctgaagaggtagccccgggagaggccctcagggaccgacccagaccagcaagctccatttccaggggtctgcccagagaagcctggacccagggggcttctcagctcccctcccttccagcccaggcctccttgagctcctgtagcctctgcagctgcccatttcacctctttgtcattgcaatgacctggggcccagggtcacgcccaagcccctctttgtggcatgctcatctcagtgcagccccaactgcttctctgcaccaggccccgtgccctcccctggccctggccacacagcacctccttggccaccttgcatggatgcatgtcctccctctgtccctcttgtggtgctgtggctggccacgtgtcagggttttctgtgagcctctcaccttacagcctttgggcccctgggcccctgccctgcctgagccctgcgctggccagacgcaggtaggtgccaggggaggccttgcctctgggcactatagggggcagccccctgccttgtgacctccctccatgccccatgacctccttcaactcgtcttgagggtctggtcaccacggaggggagaagggagacacagaggcccaagtggctgttctgggaccatggaagcctgggtcacagaggcaggtaccagcagtcctgcccccacccccgtccctgctggcctccagccagtgccacttggagtcccctgcaccgtgccactttccatccccacaccattgcctgctcctcccatggggctttagcctcccctgaccatctgctcatgtagcctctgactgggcgcacagtggtgcaggaggaaggaccgggaaccctgtgtggctttgggcaagctgacaaacccgtctggaactcagtttccccagctgtgaaatggggccagtccccatgccctgctgtcctcctcacaggactgttgagaggctcgcagggggatggggtgaatc

SEQ ID NO: 2024 - DNA, 1190 bp, Homo sapiens
agctgggcctggtggcgagcgcctgtaggcccagttactcgggaggctgaggcggacgcagaggttgcagtgagccgagattgtgccactgcattccagcctaggtgacagagtaagaccctgtctcaaaaaagaaaaagaaaaaagaaaaaaaagaaaagagaaattaattatgaagaggtcttagaaaataaatctccaaacccacttatagtcacagataataattgggcgtacaggtatatgtctttccagtcattttttctgtgcattttatagctgtttgcgtggcttttatgccattcgagtcacgttggacaagcagttttgagccctgcatgattatataatgggcgcttccccaggtcattggaatgacttgtgggtgtcttgatcagtgtgtggttttctgtcgcatgaacagattgtggttcatgggcctgtttctgtactgttgtgcgttgaaggggtttccatggattcacacactggcgtgtgtctgatgcgccacccaacctgcatgggcaggaggaggtctctttgcctggggtcggggtgggggtgccctgttctccctctagtgggcgagatggggtctgctgggctgagtgagaggccgccctgaattcctcggtgtggatttcaggaagtggcatgacttgttctaactgaacgtttatttgatacgcccttggtacatgtgttttccagaagtgtaatactggcttccccttccatttttgtatcgtattaaaaaatacgtaaattctaaagtaagtgtttatgataaaacattcgataattcacagaggtgaaaagctacccccagaatccctttctgcttgaattccacgctctggagaggaccccgtgagggtccaggcacagctctgcccccggcacccctcttctctctgctgcttccacactgaaaggcggaggctctgctgcctgttttcttttgttgctccccattttaactaaacactaaagaaagtcaagtgtgaacgtcgcggtcattcatttcgcctgtgccgcactttcctgccccggcgagccctccgccagcactgaccggagggcgcttccttcagctttctgggttgtctcactggaacagggtcagccccattccctcccatcctgccccctgcctggtctgtagccacgtggtgccaggagtgagctct

SEQ ID NO: 2025 - DNA, 2008 bp, Homo sapiens
ccatccgcaggcgttctgcatctggaagtagttctgatcgttcacgatctgctactcctccagcaacaagaaatcattctggttcacggacacctccagtagcactcaacagttccagaatgagctgcttcagtcgtcctagcatgtccccaacacctcttgatcgctgcagatcacctggaatgcttgaaccccttggcagctctagaacacccatgtctgtcctgcagcaagccggcggctccatgatggatggtccaggtccccgaatacctgaccaccagagaacatctgtgccagaaaatcatgctcagtccaggattgcacttgccctgacagctatcagtcttggcaccgctcggcctcctccgtccatgtctgctgctggccttgctgcaagaatgtcccaggttccagccccggtgcctctcatgagtctcagaaccgcaccagcagccaaccttgccagcaggattcctgcagcctctgcggcagccatgaacctagccagcgccaggacacctgccattccaacagcagtgaacctggctgactctcgaacgccagctgcagcagcggccatgaacttggccagccccagaacagcggtggcaccttcggctgtgaacctggctgaccctcgcactcccacagccccagctgtgaacctagcaggggccagaaccccagctgccttggcagctctgagtctcacaggctctggcacaccaccaactgctgcaaactatccctccagctccagaacaccacaggctccagcctctgcaaacctggtgggtcctcggtctgcacatgccacagctcctgtgaatattgccggctccagaaccgccgcagccttggcccccgcgagcctcaccagtgctaggatggctccagcattgtctggtgcaaacctcaccagccccagggtgcccctttctgcctacgagcgtgtcagtggcagaacctcaccaccgctccttgaccgagctaggtccagaacaccaccgtctgccccaagccaatctaggatgacctctgaacgggctccctccccttcctctagaatgggccaggctccttcacagtctcttctccctccagcacaggatcagccgaggtctcctgtgccttctgctttttcagaccaatcccgttgtttgattgcccagaccacccctgtagcagggtctcagtccctttcctctggggcagtggcaacgaccacgtcctctgctggtgatcacaatggcatgctctctgtccctgcccctggggtgccccactctgatgtgggggagccacctgcctctactggggcccagcagccttctgcattagccgccctgcagccagcaaaggagcggcggagttcctcctcgtcgtcgtcgtcctctagctcctcctcttcttcatcatcgtcgtcgtcgtcctcctcctcctctggctccagttctagtgactcagagggctctagccttcctgtgcaacctgaggtggcactgaagaggtgagggagcttgacttttagaaatcttcagtgggggaggtattggggatgggttggggagtggggagggagaaaccatgtcacaggtgcttggctcttggaggaggtatggggaccttgaccctcaagctgggggtagaagagaatgctggggcagggggcggagggaggaggaatgggacagataaaagtctccgaaggttcattctctagaggataatgataagttttccgtctctacagaggacagaactagaggaaatggacttaattttacagcaggagggatggcagttagacctcaagaggaactccctgggctggaaggatcttcagaggtcatcccatccctctccctgcctccaggcaggacggccccttccccagccaacctgcactcacaggggcctccccaagctgcggctctccgaggaaggagactacccagcttcagcttccacacctgagcccagaggccttattcctccatcaggg

SEQ ID NO: 2026 - DNA, 1175 bp, Homo sapiens
tgtgcatccatccatccctgcctctgtgcatgcatctgtccatccatccccgcctctgtgcatgcatctgtccatccatccccacctctgtgcatgcatctgtccgtacatccatccctgcctctgtgcatgcatctgtccattcatccctgcctctgtgcatgcatctgtccatccatccatccccgcctctgtgcatgcatctgtccatccatccctgcctctgtgcatgcatctgtccattcatccctgcctctgtgcatgcatctgtccatccatccatccctgcctctgtgcatgcatctgtccattcatccctgcctctgtgcatgcatctgtccatccatccatccctgcctctgtgcatgcatctgtccattcatccctgcctctgtgtatgcatctgtccatccatccatccccacctctgtgcatgcatctgtccatccatccccgcctctgtgcatgcatctgtccgtccatccatccctgcctctgtgcatgcatctgtccgtccattcatccctgcctctgtgcatgcatctgtccattcatccatccctgactctgtgcatgcatctgtccatccatccatccttgcctctatgcatgcatttgtccgtccatccatccctgcctctgtgcatgcatccatacctgcctctgtgcatgcatctgtcagtctatcaatccccgatcccttctttgtaatggtgttgagcgctcacaactccctcatcctaagacgctcgttggatccattccctcccctcaccccatgctgctctctgccctcccttcccggtcaagttctccagccagtggtctcaactcaatcttcacttcccccgctcctctcacacctatccccactgcattctaaattcttccccaacgcgctgggcctacaggcactaaaaaggtcactttgtccctggatgaccaaacacaggccaatgtaacttactgggcttgttttgccccagccacagctgaccacttcctccttcactcttgttgttgatcacctttgggcttagtctttctccatctctgttgagtccttctcccctgccacctactccttcatgctggggttctctgtagctctgtacctgacagtcacgttccaccctttcctcccagaagctcgccaacccccgtggactgctggc

SEQ ID NO: 2027 - DNA, 1230 bp, Homo sapiens
ttcccccagcacaaatctccccccatcccacaaaatgcttaaaaggtaaccggactctttgttcaagcctcagtcctttggatgtgaatcccactgggtcagtgcacctaaataattaaataattccaccttaacccctcggtctctctgattccttaattatcccactgcagaggtgggtggatcacctgaggtcaggagttcgagaccagcttggccaacatggtgaggccccgtctctactaaaaatacaaaaattaaccgggcatggtggcgtgcacctgtaatccccgctactagaggggctgaggcaggaattgcttgaatccaggaggcggaggttgtggtgagcagagattgcgcgactgctctctagcttgggcaacaagaatgaaactccgtctcaaaaaaacaaaacaaaacaaaacaaacaaacaagaaaaacatcagacctcgtgagaactcactcagtttcaccagaacagcatggtggaaaccacccccatgatccaatcacttcctaccaggtccttcccttgacatgtggagattacaattccagatgagatttgagtgaaatagagccaaaccgtctcaattgcaccccggatgtgctgacccctgtgatttccccaagtgtgggacactcgcctgcataatttgtggtagtgggggactgcattcataccttcccctgaaaacaataaaataaaataaaataaaagttgcttaaatagaatcaggtgcctgtctccaggcttctctgacaggcgggaacagggaggcggggggcccaatagtgacagcagagaccgtggctctgatggacctacccacattccagatgtggaaaagcaaggccaggcccctgactttcttattgataatgtgcatgggtctccatgccctggtgggttggttgaggactagaggatttcagcctggcgtgtccttgattacagagccggaagcacagaaccgctccctgatcgccacccctgggcccccggcctgaggggactttggccctgcatctttcttgtcatgactccctcttctgtcctcatcccccgggcagggctggggccgcaaaatctccttggttttctcccaagatcaagggccccaggggctggggcagagcggactcaggagtcccccactaggccctggtttcaggggagaggcaagaaggcagaggtcaaatctctgggcctgaggcctcagcac

SEQ ID NO: 2028 - DNA, 1146 bp, Homo sapiens
ggaagtcctcgcggggctcgctgggaaactacgctacgcaagcattccccagctcccagaaagccgttcgtccactgagcccgccttctccatgaccgatggccaatgaacaggaagaattctcaggctgcctattagaagacagaaactccatacgcgtcatacacctgcacccgggaggaaaggcgaggctctgcatctagatttacctcgttctcttttgtctccgcttttttttcacatttccttgcgaccctggcccttgagcgacaaaaaggggaagccaaggctggcccgaggaacggagagggcacatggcctagccacaagtggagcttctgctccgcccgaagggatgcgctggagcggcctcttccttctgccacggtctttctttgccaactagtaggtgagggccgaaaggccgcgggccgtggagctcgggccggggagactcttttctagcctcttgggtcccgctcctcccaattccctggagaggcgtcgagcttgctgggaagtgccctcgggtaaggggcgcggagcctcctgcggcgatcctctgtcttcgggtcgccttagcaggacgcggcaagcgggacactgacctggccggagtcccgcgttctctcaccagctgctttgtccacgagttgctgctgggcgtcaggggtcccacggcccggagggatctagagcaggggggctcggggtcctttccataccctcggatcctctcccactctctccacgcctcgacccggagatgatttcaggctccagatctctttcataaatggaaagagtttttttggtttgttttgtcttaattatgtaggtgttgcatgcttggaagagaaaatttagaaaattaattggaaaaccataaagatagctttctcgtgatagccacaaggcttgctccctcattctgctcatatgtcaccccctcaaggaggccttccccagctctgtaaacaacctgtgctcggcgttaacttttctccctaatgtttatcactacctgacatatacgtgtttcccacgactcaacgataagtgttcatgagggcagacactttttaatgccctatgacaagcacctagaattgtgcctggcacatggtagatgcttagtaaatattt

SEQ ID NO: 2029 - DNA, 1176 bp, Homo sapiens
gacgttcccgctcccgggagctgcaggtgccgcacacacccatgagggacggcagacaggggacacacaccgcaagggacggcagacaggaaacacacaccctcgagggacagcagagaggacacacacccgcgagggacggcggacaggacacacacccgcgagggacggcagacaggacacacccccacgagggtcggcagacaggacacacccccacaagggaccgcagacgggacacacgcccgcgagggacggcagacgggacacacgcccacgagggtcggcagacaggatacacccccacgagggtcggcggatatgacacacacccgcgaaggacggcagaccgcacgggcctggcggcgtcctcggtccgcgccgagcttagggctctagcgctcaggatgtagcatgtctcatgtctcggatccaggactcatccccaccaattttatatagaatagggaagttcgggagagctccaacagaggtgtgggaaaccattttcctcatagccgcccggctagctcagtcggtagagcatgagacccttaatctcagggtcgtgggttcgagccccacgttgggcgtgagattttgtcggatggattagacttgcaacttggaagaaagtaaactaaataagaaaacgtggaagtgactccgtataccttgcaaatcgggaattgttggtcaggcaaacgcaaaacgctccaccaaccaactggcttcaggatcccctttgtcttgtttcataaaaaaaagaggccgagcgtcgtggttcatgcctataatcctctcactttgaccctaggagtttgagaccagcctaggcaacatggtgagacccccggcccttaaaaaaaatacaaattttcgccaggcttggtggtgtgcgcctgtagtcccagctattccagagactgaggcaggagaatcacttgaacccgggaggtagaggttacagtaagccgagactgtgccagtgcactccagcctggacaacacagtaagactccgtctcaaaataataataaaaagaaattggccgggcgtggtggctcacgcctgtaatcccagcactttgggaggtcgaggcgggcggatcacgaggtcaagagatcgagaccatcctggctaacatggtgaaaccccgtctctactaaaaaagag

SEQ ID NO: 2030 - DNA, 1159 bp, Homo sapiens
actgcagggacccaggctaccagccctgccagcctgccttcagggtggaacagcggtttcctctaaaatcctgtctttttgtttgtttgtttgttttttgagatggagtgttgctctgttgccaggctggagtgcagtggcgcgatcttggctcactacaacctctgcctcccgggttcaagcaattcccctgcctcagcctcccgagtagctgggactacaggcatgcgcctggctaattttgtattttagtagagatggggttttcaccatcttggccaggatggtctcaatctcctgacctcgtgagccaccgtgcccagccaaattctgttttaaaaacggaaaaatggccaggcgtggtggctcacgcctgtaatcccagcactttgggaggcggggggatcacctgaggttgcagtgagccgagatcgtgcctctgcactccagcctcggcaacagtgagactctgtctcaaaaaaaaaaaaatgaaaaggtgccccatgcccctcataatgggtttctcctcttgcctttcagatatacgagaacgccatgattgctgctggacttgttgacgaccctagggccatggtgggccgcttgaatgagctgcttgtcaaggccctggagcgacactgacagccagggggccagaaggactgacaccacagatgacagccccacctccttgagctttatttacctaaatttaaaggtatttcttaacccgagtgtgtgttgggctttttttctgggtcctgtggcaggatgggtcctctcttcctgcagttcaactggtgtggggaggggctgctcacttcagcatcacctccactggatagtggtcactgatggcttgggcctgcaggcaagtgggcacagggtctgggctgagcctacctgagctcctgtgtcccatcctcatgtggctgtgcaagggaggacacataccagttggtcactcaggccataggcagcctggaagttaaagggaagagccgagtcgggaacaacggcgcctcggagcagcatccctgcaaccacgatcctgatgggtgttgggaagagaaagtaggttcccctttcacacatgggcctggctcagcacccgcaggaactaaactaagagccctgggacctgccagtgcaggtctgt

SEQ ID NO: 2031 - DNA, 1099 bp, Homo sapiens
atcctcccacctcagccccctgagtcactgggaccacaagtgtgtgccaccaccgtcagctactttgtgtattttttgtagagatggcgggatccctctgtgttgcccaggctggtcttgagctcctgggcttaagtgattctcctgccttggcctcccaaagtgctgggattacaggcatgagccatggtgcccagccagactttgtttctgtctgcttctttctttttgttcatgatcttaaatgtgtgggaggccgaggcgggccaatcatgaggtcaggagatcgaggctatcctggctaacatggtaaaaccccgtctctactaaaactacaaaaaattagccgggcgtggtggcaggcacctgtagtcccagctactcgggaggctgaggcaagagaatggcgtgaacccgggaggcagagcttgcagtgagccgagatcgtgccactgtactccagcctgggtgacagagcgagactccgtctcaaaaaaaaaaaaaaaaaaaagtttaaaactcataaacttaagctttctttggaatgtgacgtagcgtattcttgcacaaaaatagaagttaaactttgttggttgtgtctgtgtttcattactaggttccacttccaaacatgagttccaggccgagacaaagaagcttttggacattgttgcccggtccctgtactcagaaaaagaggtgcgttccctgctaaccatgcccgatgctagcaaagtttcttttcacaaagctggtttttatgccattctggagaattgccagataatatattagctgtgagaaagcattaaactttggacaggtcctcatcttaagctaccagtgagaggagttttaccagaatctgttttggtttcctggataagtgtatccagatggttctttgggctggatcaactctgggaattaattgaattttgccaataattttaaaagttcccgaaatacaggcctggtgtggtggctcatgcctgggaactcagtgctttgggaggtcgaggcaggaggatcacttgagcccaggagtttgagaccagcctggtcaacacagcaagactccgtctctacaaaaaattta

SEQ ID NO: 2032 - DNA, 1169 bp, Homo sapiens
cccccagcaggagtgcgctgtccagcgaactgtccctggtcggggacaccacgggggacacgctagagaagtttgtggagggcttgtagcattgtgagagcatcaccttttccctttcatgttcttggaccttttgtactgaaaatccaggcatctaggttctttttattcctagatggaactgcgacttccgagccatggaagggtggattgatgtttaaagaaacaatacaaagaatatatttttttgttaaaaaccagttgatttaaatatctggtctctctctttggtttttttttggcgggggggtggggggggttcttttttttccgttttgtttttgtttggggggaggggggttttgtttggattctttttgtcgtcattgctggtgactcatgcctttttttaacgggaaaaacaagttcattatattcatattttttatttgtattttcaagactttaaacatttatgtttaaaagtaagaagaaaaataatattcagaactgattcctgaaataatgcaagcttataatgtatcccgataactttgtgatgtttcgggaagatttttttctatagtgaactctgtgggcgtctcccagtattaccctggatgataggaattgactccggcgtgcacacacgtacacacccacacacatctatctatacataatggctgaagccaaacttgtcttgcagatgtagaaattgttgctttgtttctctgataaaactggttttagacaaaaaatagggatgatcactcttagaccatgctaatgttactagagaagaagccttcttttctttcttctatgtgaaacttgaaatgaggaaaagcaattctagtgtaaatcatgcaagcgctctaattcctataaatacgaaactcgagaagattcaatcactgtatagaatggtaaaataccaactcatttcttatatcatattgttaaataaactgtgtgcaacagacaaaaagggtggtccttcttgaattcatgtacatggtattaacacttagtgttcggggttttttgttatgaaaatgctgttttcaacattgtatttggactatgcatgtgttttttccccattgtatataaagtaccgcttaaaattgatataaattactgaggtttttaacatgtattctgtt

SEQ ID NO: 2033 - DNA, 1190 bp, Homo sapiens
gcatttctgagaaatgaagtgacttttagaagaaccgagtaaatacaccgcagtagtcctgcaagaagcaacaactcagtaaacagcacaggtcatgggtctgggtgaggtcagtcgtagctagcagtaatgcgaatataatacttcacttcctctggagcggtgtgagctacatcagtctctgcacagcccaaatcaccctaacttccttttaccttttccacaaccctttgagatggccctgaggttcacgtcaccaaaaagacagtctgtccagtaactaatttgccaagttatcaaaaaattgtgtaaatttttgtttatgttcctttttttccctctaatccttagaacctgtaaatgtcgtaagtattcttgaagaatacatatgtatatatcaacagtattcaagaagagtattctaaaaactttaagtttttagtaaattggtaattctcttgaacttggtcattcgactcctggtctggtccagcagtcactttgaccgtaggaatagatctggtgccttctatcttctatcttgcaggttgtcttttttgttgtttctttggttggttggtcgggtgattttttttttttaagctggggtctcactgtcaccccatttggagtgcagtggtgtagtcttcagctcactgcatcctcttcctcccaggctcaagcgatcctcccacttcagcccccgagtagcttggaccacaggcacgtgccaccatgcacagcaaattttttgtattttttttggtagagacaggtttcgccatgttgctgaggctggtctcaaactcctgagctcaggagatccacccacctgggcctcccaaagtgctagcatcacaggtgtgagccacctctcccggccaccttataggttttctttgtgctgtaacaagtaactcccaccccttctaggtagaatgctgggttctgaaggctgtggctgtgggtccaggaagagagtggggagggagtggcaagtccctcgcccttggccacatttcttaccctgagccttggccttgggctcaggctttcctgctccccttagccatttgctttctactttaaatcacagctttaagattacttataaatcattctggattatttccctattgaatttagatgttttgttttttttgttgttgttgttgttgagagagagtctc

SEQ ID NO: 2034 - DNA, 1753 bp, Homo sapiens
atatctgagtttgccctcaacaccacactatttaattattgttttagaatatgataaatatagtagggctgtccttctcatctctgtttaacttttctgtcttcagaatttgaagggtattttttctttattttcccaaacaaacttgtaaatcattttgacattactctttttttttttttttttttaattttttttttttttttgagacggtgtttcggtcttgttgcccaggctggagtgcaatggcgtgatcttggctcaccgcatcctccacctcccgggttcaagctattctcctgccttagcctcccgagtagctgggattacaggcatgcgctaccacacccagctaatgacatgactcttaagacatgctagtgttcgtgctgaatgccccattaggttaagatcatagaaacgtggcagttggagagctgtaaaggttgcttagtttctcatttccatttctgtttaatttctagattttggatcattgtttgacttggaaaatgatcttcctgatgagctgatacccaatggaggagaattaggccttttaaacagtgggaaccttgttccagatgctgcttccaaacataaacaactgtcggagcttctacgaggaggcagcggctctagtatcaacccaggaataggaaatgtgagcgccagcagccccgtgcagcagggcctgggtggccaggctcaagggcagccgaacagtgctaacatggccagcctcagtgccatgggcaagagccctctgagccagggagattcttcagcccccagcctgcctaaacaggcagccagcacctctgggcccacccccgctgcctcccaagcactgaatccgcaagcacaaaagcaagtggggctggcgactagcagccctgccacgtcacagactggacctggtatctgcatgaatgctaactttaaccagacccacccaggcctcctcaatagtaactctggccatagcttaattaatcaggcttcacaagggcaggcgcaagtcatgaatggatctcttggggctgctggcagaggaaggggagctggaatgccgtaccctactccagccatgcagggcgcctcgagcagcgtgctggctgagaccctaacgcaggtttccccgcaaatgactggtcacgcgggactgaacaccgcacaggcaggaggcatggccaaggtaagtgaactgaagcactttcaatacttcctacctaaccgcgggctttccctccgagtaatgcgtaaaatgggaccacgtggcccactcctgtttttcctcttgggctctccacgtgccactcatgcttggaagagacagatttctttctaggataaagatctctgccccatttctgtctttaaaatgagaattcttaaagaagtaggacagcttgcaggtcaggcagttggaaagtacagggcctaatgtgtccgtgaacctggtagaggttgctttctgcctgtgtactgcccactgaggaggtgatcactggtctgtatgctcctctgtggccatccagtgaagtatctgttggcacagtatccatttcactgaatgagaaagctgtgttccagggttgtcagctcactccctgctatgttaacaaggaagaggtggcagagccggggagaagcacaggcattcgggtcccagaggaaacaccagtgcagtggttcttcaagtggggtcccctggaccagcagcagcagcagcatcccctagaagcttgtt

SEQ ID NO: 2035 - DNA, 1175 bp, Homo sapiens
ggaattctgttccggaggagagactgctccctgtgaggaaagccagggaggggatgggtttttgttgttgttgttgagacaaggtcttgctctgttgcccagactgaagtgcagtggcgtgatcatagctcactgcagcctccaactcctgggctcaagcgatcctcccacttcagcctcctgagtagctgggactacaggcatgcaccaccacacctggctaattttatttttttgtagagacagggtctcactacgttgcctaggctgatctcaaactcttaggctcaatgatccttggccttgacctcccaaagaactgggattactgtgcctggcccggggtgggttctgagcggactatcttacccgcagccagctgattcagtccgccccggtgtcccagagagcacccctccatcactctctgggggtggcctggcatcttttgcagcaggggagggatgcagtttccactggggccctctggagatgaatgatgaagagggcgccttggccgagcctgtccctgtcctctctggcagccttgccaacattccactaacccccgagactcagcgggaccaggagcggcggattcggcgggagatcgccaacagcaacgagcggagacgcatgcagagcatcaacgcgggattccagtccctcaagaccctcatcccccacacagacggagagaagctcagcaaggtgggtgagagcagggagggcttcctggaggagccggcaggttcccgctgggagaggaaagtgagctctggtaaacactgccagcctgactctcggcttttccacgccctcaggcagccattctccagcagacagccgagtacatcttctccctggagcaggagaagaccaggctcttgcagcagaacacacagctcaagcgcttcatccaggtgcgccctgtccttcatggctccctctccctggcatgggcatgccttggacccagccatgggcctgggactcaggtgtggctgcaggccccttcttgcccactgacaagtacttccaggcactttttttcctgccccggcctcagtttccccatcggtcaagtgcggtggagtgggctctggaaggagccaggtgactgttatgtaaagcagcccattctcctggcatttggctggtttgttggacttgca

SEQ ID NO: 2036 - DNA, 1169 bp, Homo sapiens
ttgggcccaggtactttgttccttagccacaaacaccagcccttcaccctactcagttgcctgagtgggagagaaaagataggccctgtgaaaatttgtctccactttgaggaacatggttccaagggtaaggacatgtttttactcatagaagacacagggaaatatggtagttaaagttgtggcattttatagcatgtcactgtcctgtaggtggaggaagtgctggtgagaaggtggcaggcagggagagctctgcagaggaccttggcgctccatggggaggatggagagagagagccaggccggcagtggtgacaggaggttccctttcccccacgaggggacttggaaatagattactcaaaatggaaatgtgcccctttctaggatcccacaaaaagtttctgtttctgtctctgcctagtcaggagtctccaagccacagtctctgtgggaggtggtaaaggctaccttgcaatacagtgcagcagaggtggaggcgcctagggcctgggccagaacctccccatgcccagagggctgtccactcttggagacactggtctggtggctcctgaacccgtgggcctgatggccccggtcaccacttctcctactctgtgagtcatcaggcagtggtccatgacattggtggtgtcctgggaccagggctgcctagacgtggagacctctctgtcatgttgaagctgtgtgacagacaggccttgctggccgcgtctgtgataggtgaagagcatcacccaggccacaggaaggcctgcatctgctgttagcgctgaagagatgaagggtccctgacggcagacaaagcaaaaccaatacagagcctgcagtgcagggtgagggggtccaggagcattctgattctttccttgaaagcagttgtgatgcatttttggtaatactggaccatttttccaggaaacatttcttgtcaccttttcagtgctcctgatttgtgggtgagacctggcttggtctgtacattgagtgattcagtaccatcgattcttactgcaaggaggtgtaatgggggttcagtaaacactgagggtcttcctgagatgtaattgttcaatcaatgctaattaagtctgaattcagatctagtcccagtgtctgggtttttcccccaagaaggaaaa

SEQ ID NO: 2037 - DNA, 1124 bp, Homo sapiens
gcatctccagagacagccaaccctcctgtccacccccacttcataggctgtgaattggttcccctttaatgagttattttccattcaaagttgcctcaaatgggtcccagcctgattacagtgtgccagccttggggtcagccatacgccatgggtttccttggtcccttttcccccaacacaccccagtgcatcccagcaacagccccccgacttggaagccttcacggaaacaaccttggtgggttattatttatttatttatttatttatttatttatttatttattttttgagactgagtcttgctcttgtcgcccaggctggagtgcaatggcgcaatcttcgctcactgcaacctccgcctcccgggtttaagtgattctcctgcctcagccacccgagtagctgggattacaggcatccgccaccatgcccggctaatttttgtatttttagtagagacggggtttcactatgttggccaggctggtctcgaactcctgacctcaggtgatccgcctgcctcagcctcccaaagtgctgggattacaggtgtgaaccaccgcgcctggccgttagtgagttttttgctttttgcttgtttctttgctttctttttttgagatggtctttctgtgtcacccaggctggagtcagtgatgcagtcacagctcactgcagcctcaacctcccatgctgaagcaatcctcccacctcagcctcccaggtagctgggactacaggcatgtgctaccacgcttggctaattttataattttttttttgtagagacagttttcttctgttggccaagtcttgaactcctggcctcaagcaatcctccctcattacaggtttaagcctctgcacccaaagtactaggatcacaggtatgagccaccacatccagctaggtttttttgtttttgtttttgttttttgagacggagtcttgctctgtcgcccaggctggagtgcagtggtgggatctcggcttactgcaagctctgcctcccaggttcatgccattctcctgcctcagcctcctgagtagctgggactacaggcgccagccaccacgcccggctaattttttgtatttttagtagagatggggtttc

SEQ ID NO: 2038 - DNA, 1193 bp, Homo sapiens
tctgttggggaattgctttctatttttttcagaaaaatttatttttacttttttgaaattttcaatttcataaccattccagaaaaattaatttatatttaaaatttacaggccaggtgcagtggctcacgcctatatttccaggactttgagaggctgaggcgggcggatcacctgaggtgaggagttcgagaccagcctggccaacatggtgaaacccccgtctctactaaaaatacaaaaattagcctaacatgatggcgcacacctgtaatctcagctattcaggtggctgaggctcaagaagcccttaaacccaggaggcagaggttccagtgagctgaaatcatgccactgcactccagcctgggcaacagagcgagactgtctcaaaaaaataaataaaatttacatacagtaaaattcattttggtgttcagttctgtggtttcataaaggcatggagtcacagatccaccgtcacagtcatacaggtctatcgtcccccaaattccctctctgccccaacctccaaccctttaattttgccttttccagaatgtcatgtaagtgaaattatactgtaggcaggcttcttccatttagcgtaaatcatttgaaattcattcacgtgttgcatgtcaactgttggatccttgtgtttaatgctgagtagcatccattatatggatgtgccaccgtttgtttatccattcttttatgtatcataatagcagcctttttagatatgtccccgttagacagtgaggcactagggattggagttgctaagtagcagagctgcttttttgttgttttttttttttgttttgtttttggagacaaagtcttgctctgtttcccaggctggagtgcaatggcgtgatcttggctcaccgcaacctccgcctcctcagttcaagtgatgctcctacctcagcctcccgagtagctggccttcatgcccagctaatttttgtatttttagtagagacaggatttcaccatgttggccaggctggtcttgaactcttgacctcaagtgatctgcccaccttggcctcccaaagtgctgggattacaggtgtgagccaccgcaccgggtccaagctgaattttgatcaaaccccaaatccagggttcttccccaccacatcaaggaactgattgggttaaacaacccaattagcatt

SEQ ID NO: 2039 - DNA, 1186 bp, Homo sapiens
aacatttcctttagaccctccccgaaaaccccctagactcattaccagagtctctacctgtttttccctcagcctctggcaaccacaaagctccttcttgtctctgtgaatttgcctgttctggaaagagtttgcttgtttttttaatcatgcttccgggtcaatctggtgctacatctgggagccactggcccagaggcatcctgaagtcccccgtctgccgcaatggggtcctggggctggctagccacggagccaggggatgctcttgtctccctgtggagcatgggcctcggtggctgagtgtgcagtgggtccaccactcctcgtggcgaatctgtcccttctccggtggtgtcccagctctgcagcagtggcacatgggagcagtgggcggagacaccaggactcaccactgcaacgagagtggagaagaccagctgcaccaccaggcttggcgccagcctcgaggggcagtggcggtgcagctccctgggccagtggccttagttggggaggaggcagcttgcttggggccaggactgagtggggtgcgttctggcaggtgcccgtgaacttggaggacgtggctgtatacctttctggggaggagccaagatgcatggacccagctcagcgggacgcgccgctggagaatgaaggtaacttgcaagtgattgtgtcctctagggggcttgccaaaaataggaactgtcaggcaccagctccggggcttggttctgttggtccagttggcctggggcgatcctccgtggacagggctacccgtatccctgcagagtcccacctgcagggcctgcacagccactcggccgtgactcaggcagatgcccagcactgccttgccatcctgttcttctgcctctgccccctacatgctggtcctacttcacttcagcttccctgtgccctcctctcaagggcagagctgctcccacaggacctggttctccagcctctccccatcacactgagcactgccctgcctgttacccagcaccgtcccctaagctctttctctgtccgtttgtctcttcctgcctttcctgatgctgctgaagccttttctggttttttgtttgcttgtttgttttgagatggatttttgctctgttgcccaggctggagtgcagtggcacaaccttggctcactgcaacctccacc

SEQ ID NO: 2040 - DNA, 1228 bp, Homo sapiens
ctcttttagagaaaagacctttgtagattcaacaattatgataggatttttacagacacctattttgggctcagttttcatcattaccattaaatgcattggatagaaggggactgttcttcacacatcatattataggaagacataattccagtgcctttatggtggagcagaattcgacaacacatgtccattcagccctctgaatggatctgagacgaagacctttttaaagatatgtctgtattgaagagaaagccagttttgagttttttacacttgcacatcattatctgtgccgtcctgactagaaggttgtctgggcccccaaattccaagtcccagtatagccagggctcccattttgtttttccagagttcgtggaggtggactgcagagcccagagcccttcatctctctgagggtcaaggataccaggggtcccaagtcacagatagacattccagtttgtattcttaggaatcattcttaggcagtgcggcagaagcaggcctctgtgaagtgtctgccgggtagaaataggccttgaagtcctggggctctccaggcagtggggttatgtgtcgactgaagggtgatgtgcagaagagcttggagagtggatcagagagactaggacagttactgcagagctcctaagtcaccactcaaccagtggctgtttcacaaggatttgagggcacttgcctgtcttgtgaggtctgtgccacaaggtgagtctgaactgactgctccagctaagtgatcaggcacgttgagagtatacggtgtcctcagcacatacacctgtgggaaaacggaccgctcttggctcctgactcccagggtacagcgcccagtaactcatccttcattcagaggtttgctggccttcccggtttcccaaggagcaagacctctgtccgccctttggcccggcctctgctctgtctcctttttttacataagaaccaatccgtgtttcacattgggctaagtggattccttatccctttgttatatatattttttgcaacttggatttccagtttgtttacagagtagtcttaggtagtagcaaaagagccaaagaagagatttgtattgctgagctcaaagccaagcagaggccggcagtggaggctgagcagggactctccaggcttctctgcccataaacacccgggtcccaggccctccttcctttccctttggtgctccctcctc

SEQ ID NO: 2041 - DNA, 1099 bp, Homo sapiens
gatttctgtctacgacgtcgcccccactaagacctagggcttaggtgtcgaggtgggaaagatcttgaggcttttcttctcaaaattaatcagaaacgatgtgaattttatatctctttctgaggttttccccataagctaatcgggattagtagacttaaaggtgaatgaccaactgtatccctggttcactggttaggaagagtacatagtctttgtgtataggctattttcctcggtaaccttgggcaacatgcttgacttctccaagccagtctcctttgtgaaaggtgatatacttacaagacattatattaaatgagaacccaggcaggttacctaccctaccatgacactggaagtattctttgccttaagaaaaggagaattgctggttggttccaggtccggtgggtaccctcatttcccctgggcaattttactgtaaaaatagaccaaggatctcaaggcccagtggcttttgccttctgggatacttttttacctccctgtttagtagtaagggtcacattttaaattgcagctatcacactggagggatcagatcatttagaactttgactgcttaaatattactcttgctaagatcttgagcttgtctcatgttgacagactagtgaagttggttacgttgtctgtctcctcactggagggagagattcagagttgccctgtccaacccagtgctatctctggaaagggttggattgaaatctagtctgccttcattctgaggtataatcatgagggttaggtgaaagggtcccgagtgagaagatggcatgggtcctagggtggggagcccgatgccaagtcagacttcactcggtatgtttattcaaagccccactttcactcgtagcatatcataggtggtctctgcaagttgctgaccctgattcagactgttccataaaagtcagacacttggttttagttcccaaactgattttgatgacattcttgactgcagggcttggagttaaccccactgggcctgagttgtctctctgtaaagttacacatcatttcagactcaaaggcctctagcatgcagggtctggtgtcataataggca

SEQ ID NO: 2042 - DNA, 1200 bp, Homo sapiens
ttttttttccgagatggaatcttgctctgtcacccaggctggagtgcagtggtgtgatctcagctcactgcaacctccatctcccgggttcaagcaattctcctgcaccagcctcctgagcagcagggattacaggcacatgccaccatgcccagctaatttttgtatgtttagtagagatggcgtttcaccatgttggccaggctggtcttgaactcttggcctcaaatgatctgtctgcctcagcctttcaaagtgctgggattacaggtgtgagccactgcactcggcctcatatatcacaaattttgatatgatgtattttcattttattcagtgtaatgttttaaaatgttccttgacactttctatttgaactttgaattacttagaaatgggttgcttacttttcaattgtttggagattttcctgttattgatttctagtttgatttcattgtgattgaaaaacacaactgtaagaattaattcttgttcagttacttgaggggttgttttagaacccaagacatggtcttcttagaatatgttccatagcactggaaaaaatgtgtattctgttgttggtggtggaactttctattaatggtgattagatctgatgggttgagggtgttgttgtgttcctctatatctttgcacagcttctttctacttactctgtcaattgttgagagagggttgttgaagtctccaagtgtagttgtgcatttgtctactttcatttccatcagtttctgctttatatattttgcaggtttatttttttggtgcatttacatttaggattactatgtcttcttattttattgacactttcatttttatataatgtttatctctgtttctattttttcctataaagtctgatttattggatatgtatattgccattcctcctttttacttttactaatgtttacatcgtatatattttccaaagctttttttagacagggcctcactctgctgcccaagcagtggtgtgatcatagctcactataagcttgaacccctgggttcaagcaatccttccacctggtagttaggactgcaggtgtataccactatgcttagctaattttttaatttttatttttgtagaggtgggtgtctgtctatgttgcctaggctggattgaactcctggccttaagcaatcctcctgccttggcctccc

SEQ ID NO: 2043 - DNA, 1312 bp, Homo sapiens
tcccagcactttgggaggctgaggcaggtggatcacaaggtcaggagttcaagaccagcctggccaacatggtgaaaccccgtctctaccgaaaatacaacaaaattagcccggtgtggtggcaggtgcctgtaatcccagctacttaggaggctgaggcaggagaatcgcttgaaactgggaggcggaggtcgcagtgagccgagattcaccactgcactccagcccaggcgacagtctgagactccgtctcaaaaataaaacgattcaaaatcgaggcctgtggcatggtagggaggctgctttacgcgtgcctattattaaatgctcctggaggcatttaggtatttagatcagtctaaatatagctccattcagttcgtgcagatgacagttattgggcagtacctgtctgtgtaacacccagaaaacatgtctgtggaggggcccatggtcccgacagtaaatgcggtgagagggtcccatagagctggagttttcaagctttaggggttcccgtgctgcttgggacaggctgattcagagggtctgggtgaatgatttccaggtgattttaagactgtgctgagaaatagggcttttggggccttgtccttcaggatcaaagcatgatgctgtgtggcaatgcagaccacccaggaaccatcccaggagataagctctttgcacctcattgtctttttctgcttatgttggagcaggatgctgggggctgtcctgggatggggtgtgggacctcgtgctatttaaatacttttgcacttgaccttctgctgagtggagtggtggtttgccatcagctcagttccagtggagctgaagagacatctggtttgagtagttttagggccaccatggatatctcttcaatgcaggattggctctttccatctgctctttcattcatttgtttttgacagatagtattaaatgtttaccatgttccaggcactgtgtgaggctctgaaaatacaggggtgagcaaatccagatatcctccctgccatcatgaagtttggagtctatgagataggaccccctccctatggagaagccaccaatgcagtacagggtgacctggggccagagacaggacaaatgtcacctcctgcctccatgagatactctcactagtcatattgtgggcaagaatgtggcttacacccctagggttaacaggatgctacccaagctcatggaggaagttgaatcttaagttcccttgaaactttctaccttggtggcttttctataattttcttttttctttttctttttttttttttttttt

SEQ ID NO: 2044 - DNA, 1205 bp, Homo sapiens
ggttttatgtgacttgcccaagggtttgctgaataaaaagctaagaagaggcagaatcagaatttgaacccagacagtctggcactagggctcatgttcttgaacttgtttggattgttgtttgtgccttgtgtgacatcacactgtcctgttttcttcattggcttgtgacacacatcactttgcattgatgtctgtttgttctgtgtctaccagctgacacgggagctttggtgtggggagtttgtataattgattccctgtgtctggaatacctggtgaatgattgttgtgtgactaagcaagcagtctgttccttggtcaggttcccctctggatagcggcttccgcaggcagagcctgtctctcatttgtctgtgtcctcagtgcgtggtgctggaccaggcacacagttgtggcctaaagagctgtgtcaaaggcagctagcaccccatgtgcaggttagagaggggaggtgttcacccttgtgcaccgtgaggctcatacatgcccctcctcttttccagacccttcctggatatggtgtaccacgcgctggacagcccggatgatgattaccatgccctgttcgtgctctgcctcctctatgccatgtctcataataaaggtaagcacccttgccttgcctgacttccttgctgggccctgcatacccatagcatccttcccctctgctgcatggaggacaaagaaaggtgctttctgtacagaatttcctttctggttttggtggtcctttttggttttgactcccgctcctctttagcttctttagaatttctcaggtgtttttctaccaactgaagccacaggaattggttactcaggcaatatggaggaaggtgacttgagtgcctaacccaggatgactatattcaccctgtggttttcttttgaccccttgatttacaactgacttagcgtctgacctctttcctaacatcagaactgaaatcagtcaaattgtaatcttggttttgctatttataacacttggtgttcttattctgtgttcagagctgaaatagaccctgggtggacttggtggaagcataggtttcctttctgaagaaaggtgtggttctctggcttcccctattaaggctacttggccaggatccaactcccatggggttgacaggttttgttgggattcattcattcaccgccttgctgccgacccc

SEQ ID NO: 2045 - DNA, 1188 bp, Homo sapiens
gctcgcggcaacctctgcctcctgggttcaagtgattctcatgcctcagcctcccaagtagctgggattacaggtgcccaccacaacacacccggataatttttatatttttagtagagacagggtttcaccatgttggccaggctggtcttgaacttctgagctcaggcaatccacccacctcggcctcccaaagtgctaggattaagagcatgagcccctgcgcctggcctgtagtttaactgatgttttatttagcatgtgctaataaagcaaaaaggggataggaaagaatgtacctttttctgcagtatcttattcaccctcctttaacactaaatactttataatcacacaaatattatactccatgaaaaaaaatgaaagcttcacacataaggataaggtccctgttgatgttcgttctccaacatcaaaccactttcattatccttttagattctttatacatttctaaacatatgtgcctgtaggggaaaaaacatatatatatatatatatatacacatacatacatacacacacacacatacacacacataacttttataagtgtgagttctttttttttttttgttaacatcaaaagtctactctttcagcctctgtttgtggtgtatagtcctgcctcattgtttttaacatttgcagaatgtttcttggtgaatatccttgcatgtgactcctaacaaacatgtggatgcttagcagtggaaatcccagctgtgtccattcttgtagtcggtacagcagctgctttcctgagtggctgtgccgttttgcctttttccaccagcatcacatcaaatactcatttctttactttcatcaatacttgatgtttcctttgtcttaaattcttggcaatttgagggtcaaaagtagtcttttgttttaatttgcttccttttgggatagtgaggttgagtttatttccagtaattattagccatgtatacatatttccttttctgtggtttgtccatgttaacaattttccttgttgatttgtataagtctttatatatgctagatttgttcatttaataaatattttttgacctcttaactatacaccccggcacttctgtaggtgctgggatactagcatgaaacaaagtctctaatttcacagaaattacagtcagaagaggaaattgggccgag

SEQ ID NO: 2046 - DNA, 1080 bp, Homo sapiens
ccctggccaatatggtgaaaccctgtctctactaaaactacaaaaatggccgggcacagtgtctcacgcctgtaatcccagcgctttgggaggccgaggcaggcggatcacctgaggtcaggagttcgagaccagcctgaccaacatggagaaaccctgtctctactaaaaatacaaaattagctgggcatggtggcgcatgctctaatcccagctactcggggggctgaggcaggagaatcacttgaacctgggaggcggaggttgcggtgagccgagatggtgctgctgcactccagcctgggcaacaagagctaaactccatctcaaaaaatatatatacaaaaagtagccgggcgtggtggtgggcacctgtaatcccagctacttgggaggctgaggcaggagaatagctggaacctgggaagcagaggttgcagtgagccgagatggtgccactgcactccaacctggccagagcaagactcccatctccaaaaaaaaaaaaaaaaaaaaaaaaaaagaagaagaggggtgggggtgccgggcacgacctaggctctgttgcccaggctggagtgtagtggctccatctccactcactgcaagctccacctcctgggttcacaccattctcctgcttcagcctcccaagtagctgggactacaggcacccgccaccacgcctggctaattttttgtatttttagtagagacagggtttcaccgtgttagctacgatggtctcaatctcctgaccttgtgatctgcctgcctcagcctcctagaatgctgaaattacaggcgtgagccacagcatccatccaaaaaagttttattattaccctttaactctcaagacagccattatttgtgttgtattttgtgccatgtgagtataaaaatgaagtaataagggagctcattatcacttaacacacagtgatattggcatttgtagttagtctttctgtgtagtcaacttgccataaagttctagatggtataattgactgcgtttatataaaagctctaagggtttgaatcaaaataatacattctttcagttttattttattt

SEQ ID NO: 2047 - DNA, 1117 bp, Homo sapiens
ctaaatcctttcatatttctcgtgtgtcacgattttaaactttcctttttttcttactatcagggtgtctcaacactggaataactaggctgttgggaatgttagaactcttgtttgcattttgtttgccattatgaaaatgaagctttgctaaaatagcaatctcagcctgtgagtcagtgccctctgatgtgataccagcagtgagtctgccttgaaagctgtcacccatttctgctatgaaagaggttttcctgcttatgtgtcactaggcattaggaaatggaactacatatgcaaacttccatttgttgttttaaagctagtgtattttaaagtatagattgtaagtctttttcagaatactaagttaaaatgtctttcttcagtagaaaatggagagacagaaatgtctccagaagaatcatgggagcacaaagaagaaataagtgaagcagagccagggggtggttccttgggagatggaaggccgccagaggaaagtgcccatgaaatgatggaggaggaagaggaaatcccaaaacctaagtctgtggttgcaccgccaggtgctcctaagaaagagcatgtaaatgtagtattcattgggcacgtaggtaagctgctctcatagcaattaaagttactggatacataaaacatagaacatcctttttagctacctggagatgtttagtgaaactgaaggaaattaattgaaaatgtcttgatttttaacttgctgattttttttagctggcaaaaaattgcaagtacttttttcctgaagtttaggcaaatgaataattctgtaacggcatagatgctggaagaaaaacttcagtatattgtacgtaacatataattagtctattgaccattgatggtagttcagcatagtattatatatcagtatcttagaaaatgtgcccttttttatgtgaacctcagttaacttgttaattttaatgggattgaccttaccagataattttgtgtgaagcaggaaatcaataatttggagtaacttctggatgcttgccaggttgctggtttagcaaaaaacaaaagaacaaatttatttaatttactcagatattctctaattatctggcct

SEQ ID NO: 2048 - DNA, 1201 bp, Homo sapiens
actaaaaaaattttaatttgaagaaattcaagaactgagtcttaaattataactgtcagggtccagtggtgttattacactgaaactatttaaaataaattctctcatgaaaatacatatatttcttaaatgaccccaaatgtttcatgtacttttgagggttatataaatgtcaattaggttcagttgattaataaagttgttcaagtcttctatacctttattgattttctttttatttgttctaccaattagagagtaatgttgaaaactccaaccaccaacatggattatttctcctaaagtctactctgttttatattaatagcccctctaagtatcatgtgcttacaactacatgaaatatctttttctcatgcttttacctttaacccatctgcatctttatatttaaagtgagtttctggttggacattgtggctcatgcctgtaatttcaacactttgggaggccaaggtgagaagatcgtttgaacccaggagttcaagatcagcctgggcaataaagctagaccctgtctctacaaaaaaattttaaaaattagccaagcatgatgacacacacctgtagtccctgctacttgcggggctgaggtgggaggattgcttgagcccaggagtttgaggctacagtgagctaggatcacactactgcactctagcctggtgacagagcgagactcatctccgtttttgaaaaattttttaaatgttaaggataagcttgctgttaaagtagaaattaaaaaagaaattttaaaaataaaatggatttctcatagatagcatagagccgaatctttttaaaatgtagtctgacaatctcttacaattttaattgcaatatttagatcatttacatttaaggtaattattggtatatgtggtataatagttatctattgctttgtagtgaatttctttaaaccataacagccaaatgcagcatgcatttattatctcacagcttctgtgggtcaggaattcaggcatgtcttagctgagtacctctgcctcagagtctctcaggagtctgtaatcagagtgtcagccaaggccagagtttcatctgaaggttcaactagggaagggttcatgtccaagcttacttactttgcttttagcaagattcagttcttttaggactgttggactcagagcctgagttccttgctgaccat

SEQ ID NO: 2049 - DNA, 1199 bp, Homo sapiens
aatgaagactatcatgtgcaatcttttacagtggggttgatgatacatttggaaggatttgcttgtttaatatgtacattttttgtgttaacagctttttgacacaattactgggtaatttctaatataggcagcagactgttttacgggttgctgttttaacatgggtttttgtcagatccatggtcttaggacttgactgatgagctttcagtgaagaatcctctaagataaaacttctatttaaagactttaactagaaagtgtttattttggctacattgttcaccttctgctgtattggtatttgtctgttgggatttcaagggagtgtagagaagacagaaggaaagctgagagctggcccgacatggtctgggacacagagttggagctggcactgaagatctccagggacttcagagaccaataaaagcccatagggaagagagagaggatatagggaaacagaatcagatgtgtaatatacttggcacagcgaaaaaatggatttaaaagacaaaaatggaggtccaggtagatgtaattcacacagactgaaagtgagttcgggcttgtgtaaaacacatgagattggatttgaccccttggctctcaagtgtccccttagatctagaactgctccttggtggccattagatcgagtcagttttgatctgcatcacttagttattgggaatttctttgttggaaacaggaaaatttttttagattatttggtgtacggttttgctcacaacaataggtggaagttgctagtgcagtcttggtctgatggctgtgtgcatcgcacattcggcttggtgaaatccttctctaaagcctctttttgtatttttataactaaacagaggaagtcttcagaagacctcgctttaaaacaaatttgtgcaaacactgctagagtcattttgaagctcaagcattttcactttgtttcttacatgtgtacttttttgtttacttgtgaaaatggccatctttaagcatatttattttctgccactttatttaaaggcaagcaatattttcttgatcataaatattttgtaatgaaatacttcctcttttccagggctttgtatgcacttgtataattacattgatggcaatgtagagtttgaatttcagtctgtaaatacttttttggaaaatagaaatttttattgctttaaagt

SEQ ID NO: 2050 - DNA, 1310 bp, Homo sapiens
ctttctcttttctctacccttttccttcctttttcctccctctccccatcatccccctcatcttcgtcctcatccccatccccttccccctcccccctccaccactctctctccagcttccccctttcttctgcctgcacctcgctctctgccccctcaggttccccctttctcccagcccccaccctccggctccccctttttgcctgcccccaccctccctctgcctccctgtctctgcactgacctcacgtctgtctgcaggagacctcatccacctggccagctcagacgtgcgggcaccacagcgctcagagctgggagccgagtcaccatcgcggatggtggcgtcccaggcctacaacctgacctctgccctcatgcgcatcctcacgcgctcccgcgtgctcaacgaggagcccctgacactggcgggcgaggagatcgtggcccagggcaagcgctcggacccgcggagcctgctgtgctatggcggcgccccagggcctggctgccacttctccatcccctaggctttcagcagggccccggctaacctcagtgacgtggtgcagctcatctttctggtggactccaatccctttccctttggctatatcagcaactacaccgtctccaccaaggtggcctcgatggcgttccagacacaggccggcgcccagatccccatcgagcggctggcctcagagcgcgccatcaccgtgaaggtgcccaacaactcggactgggctgcccggggccaccgcagctctgccaactccgttgtggtccagccccaggcctccgtcggtgctgtggtcaccctggacagcagcaaccctgcggccgtgctgcatctgcagctcaactatacgctgctggacggtgcgtgcagcgggtgaggcacacgcggccccctggccttgttcttggggggaaggcgtttctcgtagggcttccatgggtgtctctggtgaaatttgctttctgtttcatgggctgctgggggcctggccggagaggagctgggggccacggagaagcaggtgccagctctggtgcagaggctcctatggcctttcaggcccgtggcagagggtgggctcaggagggccatcgtgggtgtcccccgggtggttgagcttcccagcaggcgtgtgacctgcgcgttctgccccaggccgctacctgtctgaggaacccgagccctacctggcagtctacctgcactcggagccccggcccaatgagcacaactgctcggctagcaggaggatccgcccagagtccctccagggtgccgaccaccg

SEQ ID NO: 2051 - DNA, 1156 bp, Homo sapiens
tagactttggcttactggaagatttaattaaaaggtagaggagaagtaaatttgctgtaataattttgctgtaaataaaacaaagagtttattttattagataaagaatgtgaagtaagcatgaagagacaggctttgggagaaataccagaaagggatttttcaaagatggcattgtttaatctccgtgtggccctcggttgtgcaatcacagatgagccagaagagggccagccccctacttgtttgggctccgaaactcttaccaaacatcaatttttattcttgggatagaaaaatagtatgtgctatctctaatacgctacttcgatatttattaaagaagtatttttaatgtagtgtccacaggctcatttcattgaaaacaactgactatgatgatagacagctcctgattggcaaaagttcgatggtatattcagaattaaattttgcctgcacacctaaacactgacaacatttagcttaaaggttttccatggagaagagtggtaagagctgtagttagcaaaattggcatcctctttagggtgtcaattctgtgctgctttgcaaattgttgaaacttttgattttctgtttggcaatgctagtcagtgttcacttcttacagattagccaagaatttttatctaaatgcagaaacttattaatgaaatccatttaaactatacttacacaacattttgggaggccctgctggtaaaattatatatggatgcagaagtattgcaagagtccattttccatttttaaatctgcaatatctgattacattgatgaattccgttgtattgtatgtgtgaatataaatatctgaattctcccgggggacttggttttcgtccaaggatgttggcagtggacacttagtttacctcaggaattgcaatcatgtaagactatattcggaaaaaatgctggagtatataattttggatactgatataaaatcatcaagatggaagttaagcagaattgtcacgtgtagtccatagcgcttttatatgcattattctgtaatttgtttgtactgcggcaactttttatactttcaatgtatcatttaataaaaaaaataagcaagtcactttggtgcaaagggtgttcatatcactgttctctcatcaaaagc

SEQ ID NO: 2052 - DNA, 1180 bp, Homo sapiens
agtgctggtattacaggcatgaatctggcctgtattcactgattttttaatcttttgctacatttgttttatcatgagcttttgttctctctctctgtatgcatgctataatttattttttctgaatcatttgagaatggatgcaccttgaaacatatcccacccgtagagggctctcagtaaatactggttgaatgaatggttgtcgtggagggctttcttgtgcagtgcgccggagttgcagctagagatgagctgtgagctgagctcttgagtgttcaggcaccggggagcatggtgaccagacaaacagtcctgttggaggtagtggggcgtagcaggctgattacagaccatcacgtgccggcctggatgccagctcaccataccgaggacttgtccttattccagtggatatgtgccatgtcctaggactgtggctgatcatttgaaggctggctggttctcctatccctggggctgagctgttcgtgcaggccctgggggaggttccagggcggtctgttgtaggatatgtatgtgcttctcttccaggccttgggatttttgctgtggatcgtctgctgggcagacctcttctactctttctgggaaagaagtcggggcatattcctggccccagtgtttctggtcagcccaactctcttgggcatcaccatggtaagtaggagctggctgtgacccctgggccatctgctgggctcagtggagaccaaaagtaataactcgtaagactagaatcatagttttttaaggcaatgatcagctggagctgggatataaattaaatgtagcctttttttttttttttttttttttaaagacatgagatctcgctttcatccaggctggagtgctatggtaccatcatagttcactgcagcctcaaacttctggcctcaagcaatcctcctacctcagacttctgagtagttgggactacaggtgtgtgtcaccacgcccagcttatttttggctaattttaaatttttctgtagaaatgggatctcactgtgttgtctaggctggtcttagactcctggcctcaagtgatccttccagagcactggcattataagcatgagccactgttcccagccccagctgcagtctttggatggggcatgtgttgtccagtttgccacagtccccaccatgc

SEQ ID NO: 2053 - DNA, 1192 bp, Homo sapiens
agttgacaggtggggctaaaccctgtgcctgtgatcccatccttggtggtggtggagctggggcctggctccaggtttgtgcaggcgtgacctcatgccttcagcatcaaacttaaagaagaggaggtgggtgcagctctgcagggccttcacccaggacctgctgtgtcctgagcaggctctatgcctttctttctttcttgtttaaagagacagggtctcattctgtcgcccaggctggagtgcagtggcccagccatagctcgttgcagcctggaactcctgggctcaagccatcttcccactcagcctcctgaatagctggaactacaggcgcacatcagcaggcttggctaattttttcttttcttttcttttctttttttgtagagacagggtctccctatattgctcaggctggtctcaaacccctggtctcaagcagtccttccaccttggcctcccaaagttctgggatcacaccacactcggcctgcttctacgtattgtgagtctcaagatttcccaggaaacccactcctgtgtgtgtctctccccagggcgtgaacctgtctgggggccagaagcagcgcgtgagcctggcccgggccgtgtactccaacgctgacatttacctcttcgatgatcccctctcagcagtggatgcccatgtgggaaaacacatctttgaaaatgtgattggccccaaggggatgctgaagaacaaggtgcctgctggcggggtggggcttggtgttgggccgtctcgccctttggttaagtcagaacgtgtcccctttaggagtcctttactttctctggctttctttgtttttaattggactttaaagaacacatttctcatgcttgtcttggaagccttcctaagacagccgtcttgtacttgtctttataggggtaagtcctccgcgcagagttaaattcattgcctctccatggccaagggaggcctctcttcctgattaagtcacagggctggcttcttagcggggaatcccactccaagacattgcctgtgacctagcaggctgcattttcttacttgcagaggtgtctgtgggtagaggggtcggaaaattgccacaacaccttaacataataggaaatagttcctgtgttctttttatagggcagttgtggtaatgggtacacactggctcttttttttctc

SEQ ID NO: 2054 - DNA, 1182 bp, Homo sapiens
tgctgggatactaggtgtgagccactgtgcccggctcttattttttttttattttattttttttaagagacagtgtctcactctgttgcctaggctggagtacagtggattgatctcggactctaactcctggactcaagcaatcctgcctcagcctcccagtaactgggactacaagagcatgccaccacacccagctaatttgtttatttttgtttttggagagatgggggtcttgcttttttgcccaggctggtctcaaattcctggcttcaagctatcctcccacctcagcctcccaaagtgctcagattgtaggtgtgagctgctgttttgagaatgattctgaacctgcatcttgctgaataggagatgtgctctgattgattagtgatgtctgctgcagacacagatgttgggagtggacatgctttcctggtcaagcaacatagagtgtctcctttcgcttctcccagcctgggcctaggttcagggtcaggggtggtttgacccaacactatctcctggtttttttcttccggtcaagtgtcgggcagcgccagcttgtgtgcctagcccgggccctgctgaggaagacgaagatccttgtgttggatgaggccacggcagccgtggacctggaaacggacgacctcatccagtccaccatccggacacagttcgaggactgcaccgtcctcaccatcgcccaccggctcaacaccatcatggactacacaaggtgatgccactggcacagtggcctctaggctttgggagtttgccttactcactggctcactcattaattcattaattcattcaacactgtccttatccctagtgacagccccagtgggtggatcctctcttcatcctggatggtaccagctatttctttttttttttttttttttgagacagagtctcgcttcatctctggagtgcagtggtgtgatctcggctcactgcaacctctgcctctggggttcaagcatttctcctgcctcagactcccgaatagctggaactacaggaatgtgccaccacgcccatctaacttttatatttttagtagtgacagggttttgccatgttggccaggctggtctcgaactcctgacctcaggcgatctgcccgcctccgcctcccaaattgctgggattacaggcatgaaccgc

SEQ ID NO: 2055 - DNA, 1169 bp, Homo sapiens
atattttacaacaatgttggaaaaatgggtttacgttctctgagaggaagatacccaaagcttcaagctcacctcaagggaaaattgagctaggttcccatgctctccacttggatctcacgcacatgaacacacatacaaccttctcctcaatattcacaagaggcctctgttgtctgcttctccagagagtggaggtgaatttacctgaagctaatgaggcttgggcttcagggtcttttccttgtacctgtctctttaaatgctggacttggggaaggctttaggtgagaagggaaagctgggtttcaataatgaagcacctctatgttcacatttctgattaattgcctacacagatcccagaagaatggaatggaaatagctaaaggctccagaattttctctttttatttttttgagacaacatctcactctgttacccccaggctggaggctggagtgtggtggcaagatcatcgctcactgcagcctctaactccctggctcaagcgatcctcccacctcggcctcctgagtagctgggactacaggcacacaccaccacacctggctaattttttgaatttttttttttgtagagatgggggtcttgccatgtcgcttaggctggtcttgaactcctgggctcaagaaatcctcctaccttggcgtctcaaaaagctgggattacaggcatgagctaccatgtccaggcagctacaggaatattatacttaatttctcattccaaaataacattctcttttgtgcctaattttaaattcataattttgtattctttttcttaaacagagatccccatattatataagcttcagtccccacaaaaactggatctggttctgccaaaatgatatatcctttatgatatttatagagacgttctgattatttctgaacatctcagactttctggaaccaagacaggttcgattatgaacatctgttgtctaattttaaagaccaagggggaagccgggtccttatgaaggccataaaggctccaagctagatggatattgggggagtgggttagcagagatgtcctaaaacaatgtattacactaatgggaagaacaaaaggtaagtctaatcacagatgtcttggttttcaagctagtcagacttcagataactgtcaaatc

SEQ ID NO: 2056 - DNA, 1209 bp, Homo sapiens
ccttccatcattctgtcagatttgtttggaaaaatttgtctggggctgtaggacattgtttcttggaaatatgtaacggtacttcattggtgggagcagcgttcttagttcagtgcctggacagcgtgttccttagatattctaataatttgtagagcttcaggatttgagaccctatgattttatttcagccttattatgtaagaaagggttggctgtagtctctcttgtcgagacttgatctctaggctatgtaaaatctgatcatcctggacagctctccagccaacagggagcacgccagtggcctgacactgccatgtattgccttgttccatctctttgcatgcctttgctttttctcctaggcaggcgtagtcttacttaggtgtattttttgaaaagtatgtcaagcattgtgcacagaataagtacccatctgaatgctgggttggttggtttggaggactgtttatttatgaatgtcatcttgtgttactcagtttttctgttattggtaaagtgaagaatgtttttgttgttgttgttattttatagtgtggggtgatcagccccagatttgacgtgcaactcaaagacctggaaaaatggcagaataatctgcttccatcccgccagtttgggtaagttggcctttccttaattaaaagaagttaatgctaagaatttctgtggtgcagtttgacttaagggtttttttctttttttctgtttaaaacaaagcagtggtaatttgtctactcttaaccattttgacctaatagctcaagtgttatccatatttcttttctctctctttaaaaagagacagggttggccaggcacagtggctcacgcctgtgatcctagcattttgggaggctgaggcaggcggatcacctgaggttgggagttcgagaccaccctgaccaacatggagaaccccgtgtctacctaaaatacaaaattagccaggcctggtggcacacacctgtgatcccagctacttgagaggctgaggcaggaaaatagcttgaacccgggagagaggttgcggtgagctgagattgtgccattgcactccagcctgggcaacgagtgaaactctgtctcgagaaaaaagagagagagacagggtttcactttgttgcccaggctggagtgcagtggctgttcacaggtgcggtcataacacgctacagccttggc

SEQ ID NO: 2057 - DNA, 1246 bp, Homo sapiens
tgaccctcccggtgtgtcccgggcctgctctgggggacacagcggcgaatacgttgaacgaggcccctgtttcacggagctaaagatccagtaaggacttcacccagcgagaggcaactacgccgggcttcgatacccaatacctctgcagaaaggtggagtggcaggaatctcctgaagcctccaacgtccaggaacgcggaaacccagggcctccagtgcaggtgtcatcccggagggcgcatgcggagtcccaagagaggcgcgtcccattggacaatgctgagcggaagagcccaagatagcggggggagttgtgacaggctgctgcagacgtacttagaaaaggggtgcatactggatattcaggctaggagaagaacgcaaaaagcagtgacgtacattattctctgcatatatttacttgggaaattgtgcgtctccctattctgagtcttggaggaattggactggtccaaccttataaagagagcagtagagcgcggcagtatagagagtacctcacgaaggggacgtgggaaagtgttagcggggaacgctgggaaactcccggcctccgccaccatcttgctttcctttaatccggcagtgaccgtgtgtcagaacaatcttgaatcatgaagctactaaccagagccggctctttctcggtgagctcaggtggcgggtttgggaaagggctggggagcagtgtgtcgacaaggtgatacgaggcggaggtgtctggtctggggtctgggccttgggattcggtctgcccttcagctgaaccctgcgggccaagtgggctgcagactgggtcaggctttggaggcccagctcatgctgtgagcacaagagacctaacaccgggaaacctgaagagaggggcaggacgtgagagcggagttgaagcgagtccttggagagacttctgaaggtcactccggtactcaagtgctggagaaagagaccgtgaaacccagggggagcgggaggacggcgcacttagccccccaccttcactttatccgctgcagcctctgctccttggtttatcacggagcgtcagtttccccagcgaataaaagtataagaaaggagctaatgcagatagaacacttattacagtacctggaacttcattgttaaatactatggtgtcttagtagtctaacgttgcttttcttgatcgtatgttagacggttcctccaagacgtctctgtttgtcctcaaaagctcctt

SEQ ID NO: 2058 - DNA, 1237 bp, Homo sapiens
cgcacagcttatgaaagcttaatagtttttgatatgttaggagcccacacatgcaaagaatctgcaacaacgttcaatggttttcctccctgaactcttgattcttacatcgcgagggcaagggctaggacatgaggccactcagggctacagaggggccttgaactggacagagcgtctgcaccttggggacccaacatacaaactggggctccacgcaagatcccggcccacccgggaggaagcggcagcacgggagcgcccctacgtggctgtaggcaggatcacgcccaaggaaaactcaaaatcaaatccaaacacacttgtgaggatttaatattaaaaatattaatttttgatatgtaggcactcttcattttaatagtgcgttcctagtgtgtttactgctgctgatcgcgagagcactgtgactccaagtctccgtgagcaacgcaggagacagcggttctatattgagcatgcgcaaactttgagggcggggcgcctccgtcatcacactaatatgccggcataggaagccctacgatcgggaggtagcgtggccgagtggtctaaggcgctggatttaggctccagtcatttcgatggcgtgggttcgaatcccaccgctgccacacctcagaaggtctcacttttctatccataaaccatctctttatgtagtcctttgccaacttctcttccttttttctcctttctgatgtatttcttttttaaagctttagattgcttataatggattttttttaatggaagggggaagggaagagaaaaggcagaaactgcagtgcaggctctttcactgtctagcccaatacacaaacctctctttcacctacccatccagctccctcaaaacaaaacaaaaaaacaaaacacatctccccatttccaggggaaagcatctgagctagcttgaaaagttcccaacagcctgtctgggtcttcctggggttagttgggggtggttgtaatcatgacctgagttagggacgggggtccctttctggcctgctccgtgtactttagagggctccagggaccccataaacctctgttgtcaggtgaccctggagtagtaggggtctggccctatgtgggggtgccaaccttgaggtctctgcttcattgattcacctcttacttggttttcaggcttgatttaggggccttcatttataaacagttgttgagctgtttatgaagggcctactat

SEQ ID NO: 2059 - DNA, 1121 bp, Homo sapiens
ttaatgtgttcacagaacagaaagaaacccagtgtacctggagagcagccagggccggaggagaagtgggcagcacgctagatgaacgcagctcttgcagccttaccaaggcatttggattttattatgaatgtgaaaggaagctgccaggggtgggcgttaagcagaggagtgcctcgatctaattgatgtgctaaaaagagcactctgcttaagaagccattcctttcccaacctggttccaacatttgcaaacactgagttcttaaaagtggaatgacgactgggtcagcgggtttcgaatttaaaatgtgcctgggtgctgccaactgcctccccaaaagatagctctaggttttaccccaagggtgccagctcctgcgatagcctgcagcatttggggtgagggtcgggcgaattcgcagccctgggccccagcacccactctctggcccttgctttccttgtaggaccttcgcctctgcatttgtccagtaactctggctgtgccggatactgcttgggtaaaacgggcaccccaggaacatggcagacgaagatctcatcttccgcctggaaggcgttgatggcggccagtccccccgagctggccatgatggtgattctgatggggacagcgacgatgaggaaggttacttcatctgccccatcacggatgacccaagctcgaaccagaatgtcaattccaaggttaataagtactacagcaacctaacaaaaagtgagcggtatagctccagcgggtccccggcaaactccttccacttcaaggtgagtgagccacctattccaccttccccacctggcttagctgctgtaagggatggagggttggagtcgctggttggggacttcttcgtatttccaaaccctggacagtgctctaaactctgagctgaggatatacttgttaagcagggagggtattattgatttaaaataaatttcattaccttggaactgggtgtttttcaaatagtagcccaggacacactacggagttgtgaaaaccttttgctgagttttgtccaatgttttgttttgtttgtttatttattttagctttctttagagacagagttctcctctgtcacccaggc

SEQ ID NO: 2060 - DNA, 1180 bp, Homo sapiens
tttgtaagtttttcaattagagttctttcttcctttttaaccacattgatttgagttttaggagcttgccaagtagatggtttttggttttggatgggctagatggttgttaaagttgggttttcatttcccaggatgaaatgagttgactagctcaaccttgatatgctgtaaaaaatgtctctagccattacctttatcctttctcttttcacacagattttttgtttgtttgtttcctactcttagagcactggttttcaacacgggcacttttgcctgtcctcaccccaccctgcccccaccccctgggacatttgtcgatgtctggaaccctacttggttgtcacagctgggatcagggtgctactggcatgtggtggtagattccagggatgctgctaaatgtcacacaatgtgcaggacagccccccttactaaagggttttcaccccaaagtgtcagtagtgctgaggctgagaaactgtttggaggaaagtttggagactcagcgcaagtttccttttacttccccagcctttaaaatggttaccttgttatctctcgcgctctctctttctctctctctccccccccccaacctctccctctctctttctccttctctgtctctgagtgtgtatatgtgtttgcagcagcactagggtaaaacttgggcttcactggcaggacccttgcatcactttcctagtaaaatagtgagagtaaataaatcactttgaatacataatatgccattttaaagggaatcagcttattgctttcataggagcatgggtgccccagattcttacaaatgctttctgagttttagagctcagagccgttttgcagcaagtaaaaagatggatggtcatctttcaagcaagaaagataaattttatggcagcagtttttaaattgtgctggcaaagaacagctagcacagagtgatctattgataaaagaattgtggggactccttccagatttgcagtgaaacaaatggtaattgatgaatagaattctctctcccatttttttttccttgaactttggtgccttgtggtgcttatttattagtgagaattctcaagtcacaaaaggaataaacttgtataagagactagtggtgaacaacctggcaatcagaggctcacacttgctgagtttcccagcc

SEQ ID NO: 2061 - DNA, 1177 bp, Homo sapiens
caagactctgtctgaagaaaaaaaaaaaaaaaaaagaaatattcttcttaagaaaaataaaataaagtcaggcatggtggctcatgcctgtaatcccagcactttgggaggccaaagtgggaggattacttgaggccaggagttagagaccagcctgggcaacacagtgagatccttatctctacaaaaaaaattttttttaattagccaggcatggtggcacatacgtgtattcctagctacttgaaaggctcaggcaggaggacagcttgaacccaggaggccgaggctgcagtgagccatgatcatgccactgcactctagcctgcatgacagagcaagactctgtctcaaacaaaacaaaacaaaacaaaatcctaagaatgaattaggttagttcaaggaaaaagaacaaggatggagaaaagtgctttaaccaacaacttgaatgacatgacccggtataaggaattctctccaaccttagtcaaattcattccagcaaatgactgatgaacatctgaagagtgattcacaactatagtaaaaaataaaatatggggaacgtgacactaaaccactcgtagatgacctgcttctaggttggggtttcgtacatagcagagcagctccctcactgcaatctatttcaatagctctctatctgagtgctattgaaaatcagccctcaacacaagggtttggagaaaaaaaataaataaataagaaaaaaataaataaaataagccacactagaaacaggcccagtaagtcattactgcaaagtaagacaggctcttcccctgcttacaagaggttctactgtgcctcctgtctcaaggcaagagaacaacggtttaaaacctttatggctggaaatgcctagagacttgaggaaagtaaatgatggatagttgccacttgaaacaaagttcctctgtctctcctcactcctagtcagggggtacctttaaaattatctcttcccctacttcttggtgtatcatgagaacaagggagactcacttcaggtaggtaaattttacctgaagtaaagataaaaacattcctgttcattcgaacaccacctgacgaggggcctcctgcttttagatgggaagaaaatggccttcaggaattccacaggctcccttgctggacaacaggcggcattgtc

SEQ ID NO: 2062 - DNA, 1153 bp, Homo sapiens
gcttgggtctttcagctggttcatctcttcagcactgctgaataaatttagccagatgattggtgttttgggagacagaagctccctaaagacagaagcaagccaccatacttacatttcaagtccctggtggcagatggagaaaaaggacctaccccttcatttttcacccctcacgcctctttcaggtgttggtagaaattgaccaagtgaagtccagaatgcaacttgctgccgaatctcttcaggaagcagataagtggagcacgttgagcgccgatattgaggagacatttaagactcaggtaggtttcttgtttaggggatgttatgaaaggtatttaagcaagaacttgaggtttggagaaagcaaaagagatacaaagttgatagccaatagcagcattcagaaaccttcagactcagggtggggaagatctgaagctgctcggtgtgtttccagcctctttagcttgcaccctctgtgtgactgaagcctcttagtcacagaatgagttcaagagaagccttgataaagatgtacaggcaccaggcactgtggctcatacctgaaatcccagctctttgggatgctgaggtgggaggatcacttgaggccaggagtttgagaccagcctgggcaaaataatgagacccccgtctctacaaaaaaattaaaaaattagccaggtgtggtgctgcacatttgtagttccagctactcaggaggctgaggtgggaggatctcttgagcccaggagttgaaggctacagtaaactatgatcataccactatgctgagggacagagcaagaccctgtctcaaaaaaaaaaaaaaaaagaagaagaaaagaaaaaccagcacaggcagagaaggttgggggtaaatggacgagagggtggaacatggggaaaggggagccttatataccttggggacttggtgggttattgaccccttctgaggctgcaaagtgtggaaaatagtaacattttccacctgggatgtaaggatgaagtaagatgatgtcttatgaagaactcttactcaattgtaaagcaaaatgaatgatttatcagtcagtttttttaaaaagttacaaatgcacatgggaacaaatttattacacaggaataaactgcaaaaaataag

SEQ ID NO: 2063 - DNA, 1129 bp, Homo sapiens
agggggagacctgcaggggcacccactgatagcaaaggagggatgtggttgtaacgtagttttgctccttaaagatggaggagaatgaggaaggagaagagagaactttgaatttggtaaccaaccagttatttaatgagacatccttgagttaaacagtagagacagaaggtagtagttttaggaggcaatggagaacagaaggcttagactggagttgcaaaaattagaaaaaaaggctgttcatgcctgtaatcgcagcactttgggaggctgaggtgggccaatcctttgaggccaggagtttaagaccagcctggccaacatggtgaaaccccgtctctactaaaatacaaaaaatagccatgtgtggtggcgcacacctgtaattccagctacttgggaggccgaggtgggaggatcacttgaacccttggggcagaggttgtggaggtggagccaagattgcaccgctgcactccagcctaggtgacaaggcgagattctgtctcaaaaaaaaaaaaaaaaagtagccggagtaagagaaagtagctgcctcaggtggaggagataaaaggagtgcctggaactgaggctgcccaaggacacagttcttcaactccagctttttttgaaacagagtctcactgtgtcacccaggctggagtgcagcggcatgatctcagctcactgcagcttacccctctcctgggctcaagcatttttcccacatcagcctccccagttctagctttttttaaatgtatttttatttatttatttatttatttttgagatggagtcttgctctgttgcccaggctggagtgcagtggtgccatctcggctctctgcaacctctgcctccttggttcaagcaattctcctgcctcagcctcccaagtagctgggattacgggcacacgccaccacaaccggctaatttgtgtgtgtgagagagagagagagagatggagtttcattcttgtccaggctggagtacagtggcacgatctcagctcactgcaacgtccgcctcccaggttcaagcaattctcctgcctcagcctcccaagtagctgggattacaggcattagccaccatgtctggctaatttttgtatttttag

SEQ ID NO: 2064 - DNA, 1180 bp, Homo sapiens
gcagggctaaggctgtttacaggagcctatgaggttctgcctcatctacttttccttttatatttctttcctactgtttctgccctaactacaagttaaagtccttttttttagaagtctatctcattcattagaggttctcatttcaaagcccaaaacatagttttctattttcctactaaccctgaagccttccttcctgttaactctttttctccaggtccttggtaaagaaaacctgttttatagaggcagagtggtacaagaacttgccttttatttttaaatggagtttcactcttgtcacccctggctcaggtcactgcaacctctgcctcccgggttcaagtgattctcctgtctcagcctcccgagtagctgggattacaagcacccaccacaacccccagataattttcctatttttagtagagatggggtttcatcaagttggccagtctggtctcgaactcctaacctcaggtgatctgcccgcctctgcctccgaagtgctgggatcccatgcgtgaaccaccacgcccggccaagaacttgccttttaatttgttttcagtccttgggcttgagagaactctgctgcaattttaacaacaaccagacacacaatatcaaggtgccacctgtggcttgtccgaagcactttgtactaggtcgtattggttctactttacagatgtggacactgaggttcaatccagtagaccaagatattctctctacaataataccctcttatttctatttattagctgatttataaagtattccaccctatgtccttgaatgtaccctctggtagtagggtcacccaactccaccatcctgaatagggtttattagtatgttgacttctaaggtgtgaataaagcaagaaaaaggataaggaagaggagaaccagagtccggaaattccatgtcgtaccccaaacttctgcctccaacccatcagccaagcagtcctggccagattgaagtgaacctcagccggccttagaaaggaatacagattatcataccacattcagtgaatgagatctctcaatctggatctaggctctctttccaagcagctttgtctaggacacagatgtgtgcccaaatctagccctcccatctgctgaactacaccaaatgttagcacactagagatggagaaaga

SEQ ID NO: 2065 - DNA, 1207 bp, Homo sapiens
ctgtgtttgctgctgctcgggtggctctcgaggggcaggggcggcctggagccccgtgggtaaaggttctgcagacattgctcggtgtgcgcgtcacctcaaggggccatggtgaagaagagggctgtcaccacagccatgtctgcgtttgaggggccggactcaggagcaagtgtgctggtctcttcagtgtgagctggggccagcttcttcatggtgcagcgctttggtctttctgtccttagactagtggttctggtagggcttggtggcagccttgtggtgaggactcagtgagttgatgtctgtatgttgattgcagcagtgtctggcacccgagaggccctagggacgtattcctcttgttctttttctcccacagcgcctggcacagagtctctgtgacacgcagtgcaacagtgaatagaagttttgagttttagaaagtgctcccctatcttcagtgcacactctgggatggaagtagctgttggggtctggtgggtgggtgacctggtgtgttgttggctgcagctatgcccctgccttccaggacctgccctcattcacccagaatgtgcacaggctggtcaacgacctgcgctactacagactctgcaacgacagcctgccccctggcactgtgaagctctaggcctgctactgcctggggacacggacttctgctgctgccacctgcgccagccctaccttccaccacagatgtctcccagatgggccttggtcacactccttggcttctcccaccgcaagcaacgctgcctgcctctgccgctcctccacatcttgccgctgcccagcagagctggcttctgggtccacctgagcactggacggtgctcccagggcgttggagcaggcggaggggtgtgtggccaggtactaggaggcaccaggaaatcccgcggggtggcccatgcagaccaggcgcacgtggctcatggggcagaattgccaaggacagctcacgacagtgccaccttctcaccattccagccaaggagagatgtgacgttggaactgctctggcacttctgtcaagcctcccccgccccaattgccttgagatctctgctctttgtcagagatttgcaaagactcacgtttttgttgttttctcatcattccattgtgatactaagaaactaagaagcttaatgaaaagaaataaaatgcctatgttgtt

SEQ ID NO: 2066 - DNA, 1100 bp, Homo sapiens
atcaaatatcagttgttttgactttaatcataatgtagtcacagacaactttgttgtggcttccatttggatggtatagaaatgtcattatggattgtctatgtactgatgttgttacgtgtaacttttgtgctcttggttttacattttaatcctgtgcttcctattgccctgtgaaagctgagaggtgcctgggagcagaaaggtgacataaataatgctgtgtgcttgcttcctggctctgggtcccctaccactaattctaaacagctcagtccattctcagttgtttaggagctgctaaccagatccttggcttctctttccctctactgccttttcccctaactttctactgttcattagcacctgtaccagaaggtgggcaagggaaagaaaatgaggtgaaataaaatctgtagttttagctactgaacagccttgtttgtatttttaaaaaattgggttagatactaaagtaaaattgagattgttctgtatttagcccatggcttttttttttttttttttttttttaaatgggtagtagggaattgagtgcaccttcctaaagaacagtcagctgggtggtgactttgaatatccatgtaaaactatcatgcggtacataagtgagtgaggaaggagttcctactcttgagtattagtgattgatgacaccagagagaagtgtctttgtatgttcctgtctctaaaaacagttgattttagtgccttactgtttttcgagtacttggccccatgatccacagagacagccattctctttatcaaaacaaattaatatgtattttttaaaaagctgcaaataagctcggccgcatagaggtcaggcaggcaggctggccaccctcagggagataggtcccaggagcaacatgggacattttatttccgggccagttttgcttttctgagtagtagttttctctgcttttattatttcacatatctctgttttgaaaaatagcttttgcagtaatgagcttcagaattgcttttagccattatttcattttcagctaaggcctagtatgtctttacctttttgtgttggtctctgaaatgtgatttatgaa

SEQ ID NO: 2067 - DNA, 1222 bp, Homo sapiens
ttttccagaatggatgctaaaaggaaaaaaaaaaacaaaacatctataataatacttatggtaaaagcagtaacagccaccatctgctgtgtgactacttgcttggccctatactgaaaactatatatgcatattctcatttaatattcacaactctaaggtgggcattattacccatatttacagaccattaaaataactaaggcacagacagaccaagtgtttccccaagtccctctgctagcataaggtagaaatgaaaccaaaccagggtctggcctcaaaaccaatgtttccttccaaaaaccaagttaactggaaagattatgcaaccaggaaaaatgagcaataagaaagctaatatttaaatacagaaaaatattcctaattgttctcctctgtattaaagtgaaaaaataaatatggaaaaatatgtatggcctaaaatcatatgtaaaataatagcatgtgtataccatgactacaagcatagaaagacaaatatgtgaagacaaagactgaacaagattatgcaaaggcaaaaactgtttaggtggatatgaatgatctgcgattacttttgtcctcaaaagaaagaaaatagcaggaccatggtcatggaagtcagcatctgctaaggagtgtaccacaactcatttgcctaaaaaggttggggtgagggaaagaacctgttaaggctatttctccataaaaacgattttactcaaatttaaatgtttcaaggtattttagtggatggcggaagtgtttttcaaaaattacaccgtaatcaaagtggaaggaatcagcacaaaacagattctgcttcatgcagcagcacttccaatgcaaacctaagagagctttatcaagttctctatggaagagggtagcttgattacaaaacctgtgaccctggcagcgatacgcaccaatgcccacagagctgtgtagacaactctggtgcatttactgacttagaaggaatgaagacatggttggcatatttgtaattttttttttttttttttggagacagggtcttgctctgtcgcccaggctggagtacagtgatgcaatcatggctcactgcagcctcaacctcctggactcaagccattctcccacttcaaccctcccaagtagctgggactacaggcaggagccaccatgcccagatatatatatattagagatggggtctcactatgttgccaacaca

SEQ ID NO: 2068 - DNA, 1177 bp, Homo sapiens
aagtgcaatattgaccggcttttagtatattcttgaggttgtgcaaccttcaccgctatctaattccagaacattgtcatcactataaaaagaagcatcatacccattagcagtaccctcccccaccccgccccattctcctctcccccaatccctggcattcactaatctacttagtctgtctctatggatttgccttttttggaattctcataaaaatggaagcatacaatatgtgatcttttgtgtctggctttttcacttaacataatgctttcaagatttattcaggttttaatatgaaaaatttgagaataagatattttcaaaagcctttgtgatcaccttatgttccgggttctgtacgggtacaaagaggaagaaaacacagttcccaccctcaggtaatttacacttgagtggggagacacaagtaaacagttaaagatgttttaagagctaaatagaggtatgttttatgtgcaggaattcctgaaggaggtgacagctgaatggaattttgagcgacagacaggtggcatttagtctggtggaaaggtgatgttgaaattgggaggaggagagcaggtcagaggttgagagggacacatgtagaaggaacagcagacagttgagcatagcaaggccgcgtctgtcgggtgagctgaagcctgggtcaggtgaggctagatgaggtcagcagaagccaggatttccagcctgtttcctgcatgaggaacgaaaaaggattggtggcaggtttgtggggaacgaaaagttgagtttgggatatgcacgtagcattgtccaggaagcaggtggacatgcaggtctgttactgccttgccttgtttctgaagcccccatcgtgtgaggcagagcttggtgtatatagtcaaggtgagtttgggccaagaacaggagacttgagaggcttcagaatatattgaagccatagcagtggatgagtcactctagcagtgagagtgaaatgagaggagaagcaggtcagtcagggaacctggggaaacgtgtgtttaaatgactcatgggcagaggatggaagtaatagtgaaagggatagaattgagttcaaagaaaccagagaaaagccaggaaagagtggtgctaccagctcagagaagggtttaggcaatggcctgtaatgccacagtgt

SEQ ID NO: 2069 - DNA, 1142 bp, Homo sapiens
cgctgtggggccgcccggcgctcgccacttccggcgcgttggggctgttggtcgggggcggccgcgcggtactagcgggcggctccagggcgggcgcgcgcaaggatgctctagggggcggcggcagtggccgtgtgggttgaggctgcgaggacagcgcgggcccccgggcctctcccctgagccggccgcctgggccgcgcggtcgaggcctgtcagcctccgcccgttcagcctcggggccggggccgccgccacctctgcccgcggaggccggggagcccctgcctgggcccgcagcctcccccgcgggggtcgggcccgggcgggggtcccgagcagctgccctcctcgccggcatccgagcctcatttcctgctttttcagtttccttggggaggggcgggtgggtctggatgaattgtctcggggtcccccgatgaggcgacccgggcggccctgccctttttagagggtcccctcggggcccggtggggaaggggttgtctttgcatgggtgggggacttcccgagtctgccgggaccatgacctgaactgtgcgagcgggacgtgtccgaagcccaagaaccagctcatctgagccgccccctccccggccagcatggtaagtggaattggagcccccttccctcctggggtgccctaccggaagggtgggaatgggccccggggctgctgagccatcgctgctctccccatggcggggagaggcgcgtgcggagcctggccggtgacacatgcgtgcagagtgtgcagccccggccctgcgctcccatccccccagggatgatggctcaggcctgggagggccctgggagcgcagcaggcacaacccttgcatctggtgtttgcctcctgcagctcctccggataataactatcgtttattgagggcttactacttgccaaggccctgcgcgaagtgattgacagtgcagtagtatttaatgatcacaccagccctctgttcggaagtggggagactgaggcacggagcaattaattccccagctcaaggtcaagcgactttttaacagtgttaagatttgaacctaggcatctgactttgaacctaggcatctctaatacacttagagagctgggtgattgtaggagaaac

SEQ ID NO: 2070 - DNA, 1215 bp, Homo sapiens
cgggctggtgttgagattttatctagacctggcagccctctccttcaccagtaactcctaaaaccagggacccctggaggggaggccacctctccttccctgccccgccctggtcccaggcttagcctctccccctgttcacagtgcctcaacctggtgttcctgctggcagacgtgtggttcggctttctgccaagcatctacctcgtcttcctgatcattctgtatgaggggctcctgggaggcgcagcctacgtgaacaccttccacaacatcgccctggaggtcagcattggccgggcaagggctgggggtggcctgtccagggacacccagggcagggatgtctgggactgaagcctcacccctgctctctgccctcccagaccagtgatgagcaccgggagtttgcaatggcggccacctgcatctctgacacactggggatctccctgtcggggctcctggctttgcctctgcatgacttcctctgccagctctcctgatactcgggatcctcaggacgcaggtcacattcacctgtgggcagagggacaggtcagacacccaggcccaccccagagaccctccatgaactgtgctcccagccttcccggcaggtctgggagtagggaagggctgaagccttgtttcccttgcaggggggccagccattgtctcccacttggggagtttcttcctggcatcatgccttctgaataaatgccgattttatccatggacttcttatatcgtttttgtctctaaaaagaaacttttattatgaaagtaatacatgcccactttcctatatatagacagcataaagaaggtatgtcagcagatttctcccttttttgtttgtttgtttgtttgtttgtttgttttgacagagtctcactctgtcacctaggctggagtgcaatggcgtgatcttggctcactgcaacctccacttcccggttcaagcaattctcctgcctcagcctcccgagtagctgggattacaggtggtcactaccatgtctggctaatttttatatttttagtacagacgacattttgccatgttggccaggctggtctcaaactcatgacctcaggtgatccgcccaccttggcctcccaaagtgctgagattacaggtgtgagccactgtacctggcctctgccatctttgaggccttacgtattcattcattcatgcattcattg

SEQ ID NO: 2071 - DNA, 1154 bp, Homo sapiens
ataagaatgacctgaagctggtcgtctttgttcgcaaccagaaacagtcctgcctcaaaaaaaaaaaaaaaaaaaagggagtaggcaggtggccatatttgtttctggcaagtgagtgctgaaggaaaggagctgaagcctcccacagtcataactggtgctggcaggctactgtctcggtcttgggcgccactgatctaaggtcacggctctgcttgctgctcccacccgctccagtttaaaacctgcggttccagggttctccagcccctccctttttcacgctccgaagccgagaaggcccaaagcgaagacagagaggacccggaagtagggaaaacctctgagcacgtgatgggggaacacgcgggtgctgtcacgtgatccgacaaacggcctctgcatagtgcagaacattctgctgctcttaaaggtacaggcctcagggtccctgctgtagacggggcgggggagagtacgatgggtggggcgtggtgggtcgtagggcgctcgagatggagcccccagcttccttgatggatcgcggggcgcgagtgccctagacaagccggagctgggaccggcaatcgggcgttgatccttgtcacctgtcgcagaccctcatccctcccgtgggagccccctttggacactctatgaccctggaccctcgggggacctgaacttgatgcgatgggaggctgtgcaggctcgcggcggcgcttttcggattccgagggtgagtattcccgcccaccctcatggaacgaccacctctggctcgcagcccacctgaggggaatgagagctgactcggccccgggaggacacgcaaggagcggtcgtgcacctgagagtaggtgggggtcatgccctcttctcgctctcccaggggaggagaccgtcccggagccccggctccctctgttggaccatcagggcgcgcattggaagaacgcggtgggcttctggtgagtggcctgagacttcagcgagtgacaatggcatgagaagagggaagtgaccggaggaaagggggaagaaagagttaagctgcgcaaaggagctgaacccacaaatatttactgaatccactggtttgccccaggggcagcatgtaaaatttccaaacttcactccttatcaccttccgg

SEQ ID NO: 2072 - DNA, 1172 bp, Homo sapiens
tttgtgatttgtctccaaagcctcacccagctctctggccctctagtgctgcccagattgagctgctgcaactgctggttcagattgcagcggaaaacaacctgggagagggcgtcattgtcaagatcaagttcaatatcatcgcctctctctatgactacaaccccaacctggcaacctacatgaaggtgagagcagtgaagaggctcatctcagggcatcgctggtgggttgggggaagaaggtacctagcatcttaagactcaggggctatggaggcagtcttggtggtggaaggccccatgattcctgctgaagggggaggcatccgcttactctaccttcacacctctgactctgatgtggcctgaaatcttggcagccagagatgtgggggaagtgcctggactgcatcaatgagctgatggatatcctgtttgcaaatcccaacatttttgttggagagaatattctggaagagagtgagaacctgcacaacgctgaccaggtaaagggaggagttggcaggataactggaggtgtgtattttatgctttgggaaggctcagtgggacccgagggttgaggtttgagactgagatctgggctaatttgttgactcctccttcgccttccttttcagccactgcgtgtccgtggctgcatcctaactctggtggaacgaatggatgaagaatttaccaaaataatgcaaaatactgaccctcactcccaaggtgagcctgagcaagcgtgggctttgctgagaggaaaattgtggggaatattactaggtttagagctttgtgaggattatactaagtcagagtgcttgaaaagccagcctttcaacttacctagcgttcacacggaagggcctgatgagatgctggctcccagtcccatcgtttctgattccataggtctgagtggggcttgagaacctgcacctctagcctgctcccaggttgctggtctcagggctatactttgagaacctttggggtaaggcatctattcacttctcttgtttagcttggatgagaggcattggggtgtgaaagtgcagcatagtttactcagtaaaagtgtgaatgtgcccatcaagtcaagggtgtagtgattaacaaggcagccaaaagcttaccttttgtgctggatggagaaaggca

SEQ ID NO: 2073 - DNA, 1172 bp, Homo sapiens; identical to SEQ ID NO: 2072

SEQ ID NO: 2074 - DNA, 1153 bp, Homo sapiens
ctttaaaaagtatttttatttatttatttttattttattttatgtttgagatggagttttgctcttacccaggctggagtacaatggcgtgatctcggctcactacaacctccacctcccgggttcaagcgactctcctgcctcagcctcccgagtagctgggactacaggtgcccaccatgcccagctaattttttgtatttttagcagagacagggcttcaccatgttggccaggcttgtcttgaactcctgacctcaggtgatccacccgcctctgcctcccaaagtgctgggattacaggcttgagccaccgcacccggcctaaaatagctttccagcagtccttttggtcccagtaggtaaagcctcaaggcaggctgtagagtgccaaccctctctgacccagaggtgagggttaatgttaataggatccctttcagcgaaagttagggccacacttctcatgtccctaagccatttgtacttgttttttttctctgacccacctgtgtatgtggtgagtatgtgtgtatgtgttgctttttttttttttttttttggaaagtgattttcagtaacagaaagggatgtgctctctgcaagggtgaacctattcttgcccctgtgtgtaaggcaagaaggagaagttgtgttctctgaacaggcagaccctgctgagagacggaggtgtgttggggttcaatcattctggtgggaaagatattagagatagttatagaaatagacacaaatcttggaaggccgagaagttggcataactttggtaattagctctggctgaaggcggcctgatccctttacctttagttaaacaaataaacatagaaataaaagaaaggcagagtagtttacctagctagcttgtttactcatataatcttaagaccctgggtgcttaaatgctttttactcgggaagtccacaatgtctgttacactctaatggtgttgactcaagcttttgttaattaatcatactgaataaatgcgcgtctgactagctgatcagggccaagtagcaactgtttacaggactcagcagggagcctataagcggctgggaccctcagctggactggcagagcagaatatctgtgtgtctgtactttattcatctgtcacggggtcac

SEQ ID NO: 2075 - DNA, 1215 bp, Homo sapiens
ctgccgccgctgctgccgccgtcgctgccgcgcccccggcccctgccgccgcctctacggtggacacagcggccctgaagcagcctccggcgccccctccgccacccccgccagtgtcggcgcccgcggccgaggccgcgccccccgcctccgccgccactatcgccgcggcggcggccaccgccgtcgtagccccaacctcgacggtcgccgtggccccggtcgcgtctgccttggagaagaagacaaagagcaaggggccctacatctgcgctctgtgcgccaaggagttcaagaacggctacaatctccggaggcacgaagccatccacacgggagccaaggccggccgggtcccctcgggtgctatgaagatgccgaccatggtgcccctgagcctcctgagcgtgccccagctgagcggagccggcgggggagggggagaggcgggtgccggcggcggcgctgccgcagtggccgccggtggcgtggtgaccacgaccgcctcggggaagcgcatccggaagaaccatgcctgcgagatgtgtggcaaggccttccgcgacgtctaccacctgaaccgacacaagctgtcgcactcggacgagaagccctaccagtgcccggtgtgccagcagcgcttcaagcgcaaggaccgcatgagctaccacgtgcgctcacatgacggcgctgtgcacaagccctacaactgctcccactgtggcaagagcttctcccggtgtgcacggggcctcggccgcccgctaggccgtggggagggagggacgcgacggaggtggcctggccgtggctggcggggagggaggcggctgctgaggctggggaaggggagccactcccagggcggagggaggaagcctctcccggttaccagggagcaaggggtggtcctttgtcgaggaggtgggccttggggttgacggaagcttcgcgtgggaggaggcggcggcggcggcagcggctgctgggctccaggggagggatttcctgcttaagtgtcgctgtgacggcctgggctccgggaggaggcgcagggatcctcggaaaggcctgtggtgcggtttggtggatttggggcgcaccacctccgccctaaccccaaccccaacgtgtccccaggccggatcacctcaacagtcacgtcagacaagtgcactcaacagaacggcccttcaaatgtgaggtaggaagccc

SEQ ID NO: 2076 - DNA, 1583 bp, Homo sapiens
gggatctcaggaaggcgagggatgcccatgtaccactcaggctagggagacttctgggcacagggaggatccttgagaactgctctgtctgggtgaggatgcaggctgaggcctctggggtccagataggaagtgagcaacggctgtgtcccaggggaagcaggctgggaaggtgtggggtgagggcaaggctcttgccattcagatcgcgctgtgatccgtggtgtttctcctgtgcaggtactggtgaggtttgtccaatggcggcggcagcggcagcggcggcagcggcagcagcggcagcagtagcagcccctcccacagctgtgggctccctctcgggggcggagggggtgcctgtgagctctcagccacttccctcccaaccctggtgagctccaagttggttgcgggggagaggggagaatggagtagagtcccttggtacaagctcctctcccccctcttttcccaccaactcctatttccctaccaaccaaggagcctccagaaggaaaggaggaagaaatgttttcttaggggaattcgctaggttttaacgatttgtttctcctgctcctcttctgtcagacctgaccccacacaaacctgtcccctcggttgtgttgaagtcccctggacagtgggcaggggtggcagaggacacgagcagccactgcccgtaccccctctcctctctgtaagcccatgccctgtcttcccagggacttgtgagcctcttccctcgacggtcctcttctctccttccagtcctctccccctgctgtctgcagcccctccccggggagttggtgctttcttttccttttttttttttttccagggggagggaggagaggaaggagggggatcagagctgtcccaaagagggaaagcggtgaggtttgaggaggggcagaagcagggccggcaaaggttgtaccttcataaggtggtatggggggttggggtcaggccctgaacatcgtcctacttgagaatctgtcaggggaaaaagtcaaggggagcaggaggaagagccaggagggccagaggcagagaagagatggagtcttaggggccagggtgagcgaggggtccagggcctagaggtgcttcctgggggcgggggaatgcagccagtgtccccctcccctcttccaccccagctccagccctggtcttgtcttttcatccctcttccccacgacagaagaagttgtggccctggccatgtcatcgtgttcctgtgtcccctgcatgtaccccaccctccaccccttccttttgcgcggaccccattacaataaattttaaataaaatcctgtttctggctctggattgaatgaattgccctcactaagaactgccgccaaccccaagggtttcttctcggcctggtgtccgtcaatccagccttgctctgccctgtgaggctgtgaggttctggctccgccctccccaggggcagccttactggcggcagcacagatacagggcggggccaaggctgtggctgtggagagcaagttccaggtctctggggaattcccaactcggacaggcccagaatagcccctgg

SEQ ID NO: 2077 - DNA, 1235 bp, Homo sapiens
tcccctgcccagtatgttcctccctgttcttcacattacctgtgccttcctgtcaatcaagatctttgcttctcaccctctctgaggtccaaccctgaacctcaggtcctccaagacagaggcctggggacctgcatgtttaaccagctccccaagtgatgagtgaggtccaggcaggtatggtgtacaccacctccatcccttccatgtatcttaccttcctcttctccaggaagctcagcccggagccagaaacgggaggcccgcctggacaaggtgctgtcggacatgaagagacacaagaagctggaggagcagatccttcgtaccgggagggacctcttcagcctggactcggaggaccccagccccgccagccccccactccgatcctccgggagtagtctcttccctcggcagcggaaatactgattcccactgctcctgcctctagggtgcagtgtccgtacctgctggagcctgggccctccttccccagcccagacattgagaaacttgggaagaagagagaaacctcaagctcccaaacagcacgttgcgggaaagaggaagagagagtgtgagtgtgtgtgtgtgttttttctattgaacacctgtagagtgtgtgtgtgtgttttctattgaacacctatagagagagtgtgtgtgttttctattgaacatctatatagagagagtgtgtgagtgtgtgttttctattgaacacctattcagagacctggactgaattttctgagtctgaaataaaagatgcagagctatcatctcttaaaaggaggggctgtagctgtagctcaacagttaggccccacttgaagggagaggcagaattgtactcacccagattggaaaatgaaagccagatgggtagaggtgccctcagttagcacctgtcccatctcgggccctccaactcctcccagtcccactccagtgcagccagctggctccaaggtagaaacccatgagcactcagggagcagtgtgccttcagctgcagcagaagcagcccggaggataaaatgagaaccagctgcacacgggccctttaactcccaagccccacccctgggcttggcctgccttgccctgccgggaagtgatccccaaggcagggtgagagttccccatctgaggcgtttgttgcagctacctgcacttctagatgtgagtacattgtactagccccccaaaccccaaatcaggggcagatc

SEQ ID NO: 2078 - DNA, 1235 bp, Homo sapiens; identical to SEQ ID NO: 2077

SEQ ID NO: 2079 - DNA, 1196 bp, Homo sapiens
gggcgaggcaggctaacgcacgactgcgcgatgtggcccctatggtgacacgcgctgcagccgcgaagaccggaagctggggcggccccgggccgcgcgcgctgggcctgggaggcgaaactcagcttccttcgtttccgacttttccatccgcgtcctccacttccccgttccgccctcccccattgccaacattctggctgagtcacggcgccccagagcgcgccaggctgggggaaaggagcagaagggagggccctagcgacccgcgggatgtggtccgagtcacgtccgaggggggtggggagggatcgtgttctcggcgcccgccccttcctagcgcggcctctgggctgcgcctctcgggggcggcccgtagcccagtccgtcgcctgccattggacgccgcccgctcctcgtaaaggaaaaagctcggcggagggcggagtggtgcctttaaaaggccgggcgccgccttccgcctgcccgcctcctgcgccgccccttccgaggctaaatcggctgcgttcctctcggaacgcgccgcagaaggggtcctggtgacgagtcccgcgttctctccttgaatccactcgccagcccgccgccctctgccgccgcaccctgcacacccgcccctctcctgtgccaggtgagcgcccctcttcacgtgcggggaccagggaccgtggagagggatcttgggggcagtggcgggttgggcgtccgcgtggaggcctcccccatcccatgccagcgtctccccactaccaggcacacacaggctccccggcccctccagcctgaggtcctctaactgcgcaatgcagcggctgcgcgcgctgagtcatggcgggggaggaagccggacgagatgaaggaccattctcccccttttcttgcagggacccctgtggcaaaggattagggccccttagccctggcggggatcctaagaggcagtgaggggtgggggccggcccatgtacagccccagggttctcgcaagtgggagcttggtttctgtcctgggaaacggggcgcccttcgcgaggagggaaacccctccgcggtgcttgatgcccccttaacactttccctgtctctccttatcgggcgaccttgattctgagcccggaacagctgcagccatgcgaagcgacgggagcatttttcaggggaaggcgcttgctcct

SEQ ID NO: 2080 - DNA, 1138 bp, Homo sapiens
agtggcagtcagaagagctgggttctaatctcagatctggctccggggttgctgtgtggcttgaagcacagacctttcccatatctgggccctttcccacgagggtgttgggccctctgcttgattcacgatctttacattctaaaatactccggttcggttttgttttcaggcaaggtgaccccatggcaaggcgcaagccagaagggtccagcttcaacatgacccacctgtccatggctatggccttttcctttcccccagttgccagtgggcaactccaccctcagctgggcaacacccagcaccagacagagttaggaaaggtacaggggcaggcctagcaaagggaagttgggcgtaagagagagctggggaccagaagtgccccagggcctgctgggtgtggggcaggggaggtagggaacatttccctgacctccaggagaggggccctggtcatcgggagatgatgggaaaccctagctaactagtccttcccctctgtttcctgtatccaggaacttgctactaccagcaccatgccctaccaatatccagcactgaccccggagcagaagaaggagctgtctgacatcgctcaccgcatcgtggcacctggcaagggcatcctggctgcagatgagtccactggtgcgggcaggagacagaatgggtggagggtgcagggttgggagtggcaggctgatcccctaattcccatgtgacactcccagggagcattgccaagcggctgcagtccattggcaccgagaacaccgaggagaaccggcgcttctaccgccagctgctgctgacagctgacgaccgcgtgaacccctgcattgggggtgtcatcctcttccatgagacactctaccagaaggcggatgatgggcgtcccttcccccaagttatcaaatccaagggcggtgttgtgggcatcaaggtaaggggagggcctccggacgtgaggtttgagatggaagtggaggaaggaaatccaggttagtgaggcagggaatgaatgctggattggtggcctagagacttgcatggagcctgcttcaggcttagggcatttactcgacatttttaatcctcacaattctgagagaacagtatcattcccacttta

SEQ ID NO: 2081 - DNA, 1117 bp, Homo sapiens
tctcctgatctcgtgatctgcccacctcggcctcccaaagtgctgggattacaggcgtgagccaccatgcccggcttaagtaactaaatattttaattgtaactaagtgaaaatatttgccagccctgagatgcagtttaagggattaagtaaatgtgggggaagactggggctaaagaagaggaaagaggggcacgcccagctacctaggaggctgaggcgggaggatcacttgagtccaggaagtggaggcttcagtgagctgagattccaccactgtactccagccggggcgacagtggaaagggtgctagaggtcatttcctgtgtcttaatgttgttaccctgaccccaacaggtagacaagggcgtggtccccctggcagggacaaatggcgagactaccacccaaggtgagaactgtttgattctctgccctacgaacccaaccagagcaggtttgggtgctgggaggagtggaaaccacatgcccctccccaccgtgctctgaccccttcctcttctcttagggttggatgggctgtctgagcgctgtgcccagtacaagaaggacggagctgacttcgccaagtggcgttgtgtgctgaagattggggaacacaccccctcagccctcgccatcatggaaaatgccaatgttctggcccgttatgccagtatctgccagcaggtgggcctgcaggtcctcaataggcaacctcctacctcatttggttccagtgttgttaatttgcctattacctgccatgatgcctacctccccaaaagcaagcattagctttggcccgtggaggacactcaagggctgttgaaggcagaggggccaaggagggatggtgggtggatctgaggcggctcttgtctcctgtaatctgagggctttgaagcctgagtccctggcatcatcaagatacggtcttgaccagtggctgtggagagatgtaggtgggactctgggttaggaggcctcacagtgaccctgtccctcgccctgcagaatggcattgtgcccatcgtggagcctgagatcctccctgatggggaccatgacttgaagcgctgccagtatgtgaccgagaaggtaaatggctacctg

SEQ ID NO: 2082 - DNA, 1202 bp, Homo sapiens
tgcctcaaaataggtgcgatttgattcattcatcctccccggaaacaagatgccctgtggcttgggacacttccaggtcatgccggctgtcttggcataaacattaacggggccacctttctttctttcttttcttttcttttttttttaggcagagtttcacttctgttgcctgggctagagtgcaatggcgtgatctcagctcactgcaacctctgcctcccaggttcaagcaattctcctgcctcagcctcctgagtagctgggattacagttgcccaccaccatgcccagcttcgccgtccaagagcctggggccgtggggggcggggctgcctgctatcggccccgccccgccgacaggacccgcctctctccccaggcccggcggggccgaccccgcctctcgctcccagcttgccgtacgacagcggcggcgcggcgggcggagccgggaggcggggaagcagtggccgtgtgagcgtgaggagctgccgccaccgcctgctcctcgtcctcctcgtcctccggggccccagcgtcgtgggccgcgcacggccctggaagagacgtcgcctcgccttcatccgcctctctcaccgcgccgctccctcgtcctgccctgcgggctcaggcggaacccggaacggccgtcctcttcccccgccctccgccgccgcctcctcctcctccttctcggcttcctcctcagccccgggccggagcggggtgtcggcggcggccggttcgggcggcggcgcttggccatgtcgtgtcggggaaggtaatgagccgcagagccccggggtctcggctgagcagcggcggcaccaactattcgcggagctggaatgactggcaacccaggtgggtgaccggcccgggaccccgccccgacctcccgggctccgcctcgggcgggccgaggcctagggccgcggggctgggaggcgcggcctaggccctccacccaccggagccgggcgcggcttcctgggtctcctcctccccggctaggggaggaaggccgcggggaggcgaggcctaagtgcctctcccctccctgcttgttcagcccggggctgaagccgagccccggggctcccggcggtggcactgacctagggtcgggaccaggaggtgagaaagaggcgggggtggtggggggggcattccacttaccgcctccccctgaccccgag

SEQ ID NO: 2083 - DNA, 1166 bp, Homo sapiens
cccatgaggctcagctggggtctctgtcgctcctgccccagttccctctgggtcccctcctaggtgctgtcctgaatggcccgttgtcatcccaggggtgactcctggtgatgggagtcagcagtttcagattcttacactccatagctccccttaccatgaggtggagctggcttccttttccctgtcttcagccctccctgtctcccccacttcctggccagggctctcattctggacctgtgttgtaattgtgtacagaggatggcgttggcctggggtgggggtgctcgctttgtcttctgtcctttggttctccttccataatgctcctgtacccagtttatttaaggggacatgcactggaataggaaatgtcccccatctcccttcctgcaccctgctgtgctccctccaaacccaccttgctctgtgttctcaggcccccctgcttttgtctcaccaggacccatacctttcaccttgttcccttccacccctccagttagtccctatctgggtaagggtcttcccttgagctccagggggtggaacccaatgtttacattctcttctgtctctgcccccaccccatgcagcgctttgaggaattggaaaagaacctgctgttgtacctgggcctgttttctgccttgttatttgatgagggggggatggggtaaggacgagggagggagggacagagccaggacctgggtctctgttgaagcagtctgctgtcttggcaagtaggtacctcttagctttgggtccatctctcagtcactcatcagacactggttgagctcctgctccatctttgcctgggatctgctgtctccattgtcactggctgcctggagctctctatgtaccacgtgcagcacccggatctccttcccaaagtgctcatgcaactcctggaagctggagggggtactcacagtggctagaaagccactgtcctctggggatgagatgggttcttggccagttgcctggcacagctcccagtattgggttttggtggggggggaggggggacagcagcccagccagccgcctccagctcgcgccagccagtgcccacagccaagtctccagctcttcctgggtttctgcagccagcttgtaggcccgcccacctgtgccctccaccccagggg

SEQ ID NO: 2084 - DNA, 1880 bp, Homo sapiens
tttttatgggcaagaaatggaggtctgagctgcgaatggctgtggaggtggagaggagcaggcaggaatggaattcagggtgcagcgctgcttaggcttggagtaaggggctcttttctgatgtggggctgagtgaatagaagtcctggacacggcagtggggcaccctcaagaagagcagatctagggtacagattttattcttttggatgcagagacaggagaaagggctgaggcacagctggcttccaagccttccccaagaaccatgaaatccagtgagaccgataaggcaggccctgccctggggagctactgctttggggtgacaaagacatttagtgctagaggagggctgatgctgcagctgtggaaagcttcctggagaaaatgacctggaaggtttctgggatgtggctgaggaaggagggcgagggtgcagcctgtgctgggatggccaggagcatgtggagtatgtagccaaaggcggagccccggggcctggagtgctctgctgtgggctgagcctttagctgaagctcgctcagcaggactgggcaggtggatggaggagcctggtgataaactctgggacgaatctggaactgggtttggggacagagctctcagcccgtgactgccctcacagtcttccccaacccccacaggcaacaggacctgtaccgaatcctgaaggcctacaccatctaccggcctgacgagggttactgccaggcccaggcccccgtggctgcggtcctgctcatgcacatgcctgcggaggtcagcgccctggtcctgggccgggaggggcaggggggatctcaccctacagtggtgatgggggagctccctgctccctgcttctcaggccccacccctcctccttgttcttgctcttctcagcaagccttttggtgcctggtgcagatctgcgacaagtacctcccaggttactacagtgcagggctggtgagtgtctggaggctgggtgcatccggggctgtggcgtttcctccaggctgcaggcaggtccttgccttgccccaccctggccttcccggcttctgcccacagggccggccagttctcccctgatgggggcacagctgacttggccctcttctcatggcttgtcccacctgcaggaggccattcagctggacggggagatcttttttgcactcctgcgccgggcctccccgctggcgcatcgccacctgcggcggcagcgcattgaccctgtgctctacatgacggagtggttcatgtgcatcttcgcccgcaccctgccctgggcgtcggtgctgcgtgtctgggacatgtttttctgtgaaggtacttctgtggccctccaggccatgaggggctggggtttctgtggtggctaccaggggttctgtcatatttctggtggtccatggacaaaaggtacttgttgggtggaggtttcaccataagcagctgggggctggagaaacaggcctgattttagttctgccaccaacccagagcctgctctccctgccaagatcctgagactgatagcagctcatgtactttcacagggcctcagtttcctcatctgagattggcagtagatggggatgggggctgtgagtctatcctgatcaggacaggctgagatcttgggtctgaccaccccatgctctctactctccacccctgcaggcgttaagatcatcttccgggtggccctggtcctgctgcgccacacgctgggctcagtggagaagctgcgctcctgccaaggcatgtatgagaccatggagcagctgcgtaacctgccccagcagtgcatgcaggaagacttcctggtgcatgaggtaggcctgtgccctcaacgcagcccctgcctg

SEQ ID NO: 2085 - DNA, 1134 bp, Homo sapiens
ggtatctcactgtggttttgatttgcatttctctaatgactaatagtgttaagtatcatttcatgtgcatgttggccatttatatgtcattggagaaatgtctactcaaaccgtttgctcatttagaaacttaggtaggttggtctgagtgcagtggtgtttaaaactaatttttttttgagacaaagtctcactctgtcgcccaggctggaatgcaatggtgagatcttggctcactacaacctccatctcctgggttcaagcaattcttctgcctcagcctctcaagtagctgggattacaggcatgcgccaccacgcctggctaatttttgtatttttggtagagacgggggtttctccatgttggccaggctggtctcgaactcttgacctcaggtgatccacctgcctcggcctcccacagggctaggattagaggtgtgagccaccgcaccaggccgtttaaaactaatggagcacaaccagttaccaatatctttgttccttctccactccctctgcttcacttgactagcctaaaataaataaatttaaaaaactgggcacagtggctcacacctgtaatcccagcactttgggaggccgaggcaggaggattacttgagcataggagttcaagatcagcctgggcaacatagtgaaaaaccatctcaaaaaagaaaaattagccaggcatggtggcatgcacctgtggtttcagctacttaggagcagaggtgggaggatcgcttgattctgggagttcaaggttgcattgagctgtgatcgcgccagtgcactctcgcttgggtgacagagcaagaccttgtctcaaaaaatttaaaacaaaacaaaaaaaactggttatttgtctttttattgttgaattataagagttttaaaaaatatattctggaaacaaatcccttattagagatatgatttgcaaatattttctccaattttttttttttttaaagacaaagtttcactttgtcgcccaggctggtcttgattcctggcttcaagagatgctcttacctccacctcctgaagccccaaagggctggaattacagccagtgagccactgcacccagcctccaattctttagattttacattttagaacc

SEQ ID NO: 2086 - DNA, 1197 bp, Homo sapiens
cggccactcgctgggagaggaggaggatcgcagagggatccagcggaaatagcctcccaggaccgggatccccgtggatcccgggggatctcggggcataatctgcagggacaaaggcctcgggaggctcgggccgcgggagaactggggccgctgcattctgggttctggcggcaggtgccaggcagggcgcgagtgatccgctgatcgaggcggtggcagcgggaggacacccgctccgggcgaccggccgggggcgccctttcgcgccccagggctgcggccgctgggctacggggagccgcgggcggaccatgaagggcggagccccagggaaggggccggccctcaccccccgctcccccgctccccccttaccccaggccgcagcctgggattccccagggacccccccggagccgccgcgtctcccatggacttgcccggggactccaggtgagagcgtacccgggcggcccgcctgtcttgaccccgggagatggggatcctggcgaccgtgccgggaaactacagagccagcgacaggttcgggcgaccgtcctctgcttctttcaccctccagcccgcctggccagccgcgtctgtgccgccagcctctgactcgagcattatggggagccaggagcccgaaacggccgaggctgcagctcccgggggccccttctcccctggaaaaggcctctcggcgggtcctggccgtggtgctagaagatgtcatggctgttcacatggtgagccccctgaaccaagagactctctattcccccatgactttcctcactaccaaactcgggccagatccctactgaggataactgaagtccaaatccatcattgttgtactcagccctcaggcagcctccctcatggtagagtcctgcttggctcccacttactccaacctagaattgggcagtgcccattccacccaccaacgattttgggctggaaccacatccctgtaactctgagaaactcttctgcttctttttttctatcttttttttttttttagagacagggtcttgctatgttgcacaagctggtctcaaactggcatcaagcgatcttcccatctctgcctcccaaagtattgggattacaggcgtgagccacggcgctgggccgaaactcttctgctttcttcccagcccagcctccttaggaagcaggctg

SEQ ID NO: 2087 - DNA, 1167 bp, Homo sapiens
acctaggggccctggcccagctcgggctgacaggtgaggggaacgggggggggtcggggcaaagctccatctccccttcctttaaccaggtcctagggctgaggttttaagccagggctggagggcaaaggtcataacctcaccagccacctctgaggtcatggaacctgggaacagaagcctcaacccccacaagaccaagcatcacatggagtgtagggtcactgggagagcagaggtcacagcctctagagaagggagaggggcgtgtgcatgggagtgtggctcatctcgggggccatggggcctcctgaggtacacctttgcccctgtaagggcctctaggccctgggcctgcctccccaagggctcactaagccagaggccaaagtgccccctcccgttcacctaccacccaagtcctcatgccctccgagggctgggggaggaggggctcaaggaaggggggttccatgtacatatttatcacccctttcacatagccccaagaccttttgtacatttttacaggggtgcccctcccaacagttcccttcctggttaattaaaccctcagactggtgctgtgttcctagcctctggcctctctgtggggaaaggggactgcagggggaagagccgggaagggacagtcaggcttctccctgggaaggtggggccagcaggagatgaccaacagggggcaggacctggggacctgggctggagggaagggcagaagcttcctacttggctgacagccccggttcccccaacatgttcccgttcactctgcccccacccccaaaggctcagcctctaaatctcagactccaccacctcttaatggctcagtccccttcaccccatttccaagtgcccccaggactcctgggccctgcttccctgaaccctgttctccaaaaccctgccccaggctaagggtggccagagaaggtcaccatgtaccacacaccaaagaagggggtcggcccaggggtgggcgacacaggcagcttcttcggcagcctcacggcagcaaccccagccttcccaaagcagcaggcgcctccaggctggggcccaacctagaaggcaggggtcaatctaacaaaaccctaacgttgacttttttccctggtggggcttcttctgtaacatgacttg

SEQ ID NO: 2088 - DNA, 1213 bp, Homo sapiens
tccgttcccttccccctcagctgttggaagggccttccagcccctctcaaaccccctcatctcatgatagtgacacccgagatgggcctgaagaaggtgctgaagaagagccccctcaggtgttggaggtataggcagaaggagcagagggagggttcagagggggaacagagggagaggttcagggtctgagttccgggctgtgaggttggttatgagttttaggagttctgctagtaatggacatttgggctctttggggatgactggggaagaatctgtttggggcaagttgcattttgtgattggcaggttttggcgctatagtggaagagcgtattgcactttcctctttaaattgctgtgtggtcttgaaaaagtacttcctctgaccgttacttgccacttctctgaacatgccctaatgttcccttattggcttacaggttggaagctggcatggtacccttaagtcttttctgtttctccatatgtctcaagtgcatggggaagtgttgggtgcctttatttgttacctggcactttcacagttccttccccaggcagtggggccaggatttggtagctggtgctgagagaaaacccttgattgtattcttgccctgggattataccagtggcaactgtcactcaatgggacagtgattctcctgtgacacctttttcaagtttgtgccattcttctgctactgtaaccttagacccttcccttttttatcttttgccatacagataaagcccccaccctctgctgtcacacagcgcaacaaacagccttggcatccagatgaagatgatgaagagtttactgccaacgaagaggaaggtcagggctgttcggtttgtcctattgccccttaccccttgaatgaattgtctggacctaacctttcaggctttctcatctgtttcatttggactgtgtcctgtgcctctagcctctatccctattaatcttgcttctgtctctttcctagcggaggatgaagaggatactatagcagctgaggaacagttggaaggggaggtggatcatgccatggagctgagcgagttggctcgagaaggtgacatttaccagacattttactaagcatccacttggtgtctgcggtgtgcagtaccaaggataaagagatgaataaggcactttgtatccaccctggaggaattccatgtctaatgactaaga

SEQ ID NO: 2089 - DNA, 1213 bp, Homo sapiens; identical to SEQ ID NO: 2088

SEQ ID NO: 2090 - DNA, 1206 bp, Homo sapiens
cccactctggtgaggcctcttctcaagctggtccacagtccttcacctgaagtcagtggtgagtccaggtggctgaggccagaaatccttgccaggaatggagacgagatggggtcgcctcaaggtttcttagttttagtacaggttttttcatatcagcgtactgccttgatttgtagtgggccccagaactgggctgcctgagccctgacctaatttcaagatctatttgctggaatcttggaggggaagaaaatctaaagttgtcagattacttggatgtttgacttcatgttgtgggagtgaatgccttctgggaaatgggaagcttgggggtatgggaaagatgggacagggagtagaaaggctcaggaaaagaattctggggctaactcatcctctctctccacagcttcagcccccggagctgcccccttgaccatctcttctcctctccacgtgccatcctccctccctgggccagcctcttctccaatgccaattcccaactcctctccccttgctagtcctgtgtcctctacagtctcagttccattgtcatcttcactccccatctctgtccccaccacacttcctgccccagcctcggctccactcaccatccccatctcagcccccttgactgtttctgcttcgggcccagctctgttgaccagtgtgactccaccattggcacctgttgtcccagcggctcctggacctccctccttggcaccatctggtgcttccccgtcagcatcagccttgactctaggtttggccacagctccatccctgtcttcatctcagacacctggtcaccctctgttgttggctcccacctcttcacatgttccagggttgaactcaaccgtggccccagcatgctcacctgtcctggtgccagcttcggctctggccagtccttttccgtcagcaccaaatccagctccagctcaggcttcccttctggctccagcatcttctgcatctcaggctctagccacccctctggctcctatggcggctccacagacagcaattctggctccttctccagctcctcctctggctcctcttccggtcctggcaccatcgccaggtgctgctcctgtcctggcttcatcacagactccggttccagttatggctccatcgtctactccaggaacctctttagcctcagcttcaccggtaccagctcca

SEQ ID NO: 2091 - DNA, 1229 bp, Homo sapiens
gaatggagacggagcactgctcgccatcaccccacctgctgtgaaacgtcggagggggaggccccccaagaagaacaggtctccagcagatgctgggagaggtgtggatgaggcaccctcatccaccttgaagggaaaaaccaatggggctgacccagtccctgggcctgagaccctaattgttgcagatcctgtcctggaaccacagcttattcctgggccccagcctcttggaccccagccagttcacagacccaatcccctcctgtcacctgtggagaaaagaaggcgaggacgaccccctaaagcacgagatttgcccatccctgggaccatttcctctgcaggggatggcaactccgaaagtcggacacagccacccccacacccatcacccctaaccccactcccaccactgctagtttgtcccactgctactgttgccaacactgtcaccactgtcaccatttcaacgtccccacccaaacggaagaggggccgacctcccaagaatcctccatcacctcggcccagccagctccccgtcttggaccgtgacagcacttctgttctcgagagctgtggattggggaggcgacggcaaccccagggccaaggggagagtgagggtagttcctctgatgaggatggaagccgccccctcacccgcctggcccgccttcggcttgaagcagaaggaatgcgaggacggaagagtggagggtccatggtggtggctgtaattcaggatgacctggacttagcagatagcgggccaggcgggttggaattgacaccacctgtggtctcactaaccccaaaactgcgctcgacccggctgcgtccagggtctctagtccccccactagagactgagaagttgcctcgcaaacgagcaggggccccagttggtgggagtcctgggctggcaaagcggggccgcctacagcccccaagtcccctggggcctgagggttcagtagaggagtctgaggctgaagcctcaggtgaggaggaggaaggggatgggaccccacgccgacgtcctggcccccgccggcttgttgggaccaccaaccaaggggaccagcgcatcctgcgcagcagcgcccctccctccctggctggccctgctgttagtcacagaggccgcaaggccaagacgtgagtgggctgcccctccacctaggctttccaccgtggccactccctccatgaccaggcctgac

SEQ ID NO: 2092 - DNA, 1188 bp, Homo sapiens
ttctgaggctgctgtgaagccagggtgagctcctaagcttgttgccctgtgatccagatgggtcttcagagtctggcacagcgggcatgaggatgctgaggccccagcctgtgcggaaatgtgagcacagaggccctgacttgtgctattttccggctcttgcagaggagtgagctctgtggtccgccgttgtgttcatcgagctactggccacgagtttgcggtgaagattatggaagtgacagctgagcggctgagtcctgagcagctggaggaggtgcgggaagccacacggcgagagacacacatccttcgccaggtcgccggccacccccacatcagtgaggctgtcttccttgctcctgttagcagacgaccccccacctcctgctggccctgcccatagcccacttccgccaacattgcctccacacctctcctcccttcattccactaaagagtggccatccgttgggcgcccactgcctcctctggttctcctttcttcccagtaacagcccgctgctgtcccagggtggccaagccccgttaatgtgcatccactcctttccatctctgtctctctgcctctcttcctctctccctagtcaccctcatcgattcctacgagtcttctagcttcatgttcctggtgtttgacctgtgagtatctccctgccaccatctgagaagcctcctccccacctccatgtatggcccagcatttgtggtgcagtgggctggacccatcctgctcacaccttcctgttccagctggggctctctatcacctgggcctgcctgctagcgcatggctctggccttctcccttggtgccatgattgaggcaaattctttaatagtgactagtggctgggtgcagtggctcacgcctgtaatcccagcactttgggaggccgaggcgggtggatcatgaggtcaggagatcgagaccatcctggctaacacagtgaaaccccatctctactaaaaatacaaaaaatcagccgggcgtggtggtgggcgcctgtagtcccagctactcgggaggctgaggcaggagaatggcatgaacccgggaggcggagcttgcagtgagcccagattgcgccactgcactccagcgtgggcgacagagtgagactccatctcaaaaaataaagtaatagtgaccagccagacgtggta

SEQ ID NO: 2093 - DNA, 1094 bp, Homo sapiens
ccttgttccttgtttgagactgggctgcaggccccaggaagactttccttcacccaccatccccctaacctcggcagggcttctgtcctgtggagttccctggacaccttggtctggctcttgtgccaagggctgaaggaggtaccctcttggcagatgggggcatcacttgcttcctttgggaagctctaaggttgctgcagtcaccttcctcatcttgcaggtgctgaaccaacatcatcagtttctattctaatcaggccccttcccaatctccatttctctgccaagcccatttacccccacctcatgcatcccaaggctctactgggtccctggacctaaccctgctttcatcctggtggccttaactacagtggaggtggaacttcccaggaggggaagggacagaccagccccagccgctgggccaacttccaatcattccagctagaagagcttccccctgacaccctgtgactgagcctgtgtcctgtctgcctgcccagccatgctccatcggctgtgagggcagtgcccggagaggccagagggttggagctgcagggacccgtttggacccacagcctctgttctagagatgcttgtataggctgttaattgtgatgaataaacgttcaaccctcggcctgcagccagagtagccaggccgcgcaccccaaatgtagtcccccgattttagctgcagcagctgagcagcactttgctggcttggtgtgagcctgggagggctcagacttaacggccggcagggatcccggactgggcctgaaggggagagcgtggtggtcgtcgcggagccgcctgtcctgctcccaccgaccccggtctgaccacgtccttggctgtcatggccgggggatgccgggactcctcgggctgcatcctgggaagtgtagttcctggtccgcacatggttaggaggttctcggagagagagctagtttcccggttgcgctggccaaaggccggcctgaactggatcctgcggaccgcttctcagcggcttcacccccacaccactcgaatgcacagatcgggacacctcagctgggtgacttccctcgttgcaa

SEQ ID NO: 2094 - DNA, 1099 bp, Homo sapiens
tctgacatttctcacgaggctacctcgaggcattttcagaaatatcaaatatcaggttcgttcctccacacagtgtcactgtcgttgttgtttttggtgcctgcttcctctgcatcctgggcatctggccctgggcttgcctcccgggcccaggaggggaggggagtggaggctttggagaaggcagaggctcagaggctggacgcctgggttctgtggagctcacgcctgtccacccttcctctccaggcccccgaagcttaccctgtctttgagccagtgccacctgtccctgaggcagcccagggtgacacagaggactcggagggtgcccccccactcaagcgcatctgcccaaatgcccctgacccctgagaagccggcctgcctgtcctgttgccccaggggcccctttggctttttacaaataaagacccttttgtaattttgtgtcatgtcatttccccgtcagggctggggagggtctttggagacagttttgtctcatgcaccattgctcagatgtggtcactgaggctctgagaggaccttcctgtagtgacaccacaaggcagagtggggtgggggcttgagccaggaccctgcctctcagtacttcccaggtctgtcctatctcccgaccttcacctcctcctctgggaggcccaggacccctcttcctgctcagccctcgcctgggcctaacaattatcaaaactctgggtagctaggccatgattcttttttttttttttttttttttgagacacagacttgttctgttgcccaggcaggagtgcagtggtgcgatcatggctcactgcagccttgacatcccacctcagcctcccaagtagccgggaccacaggtgtgtgccaccatactcagctaattttatttatttatttatttatttatcactatttttttttagagagttttgctcttgttgcccaggctggagtgcaatggcgcaatctcgcctcactgcaaactctgcctcctgggttcaagcaagtctcctgcctcagcctcctgagtagctgggattagaggtgcctgccaccacgcccggctaatttttgtatttttagtaga

SEQ ID NO: 2095 - DNA, 1248 bp, Homo sapiens
ctcacacgcccttccatccgcagcctaactgctacgccaaggtcatcaccatcgagtcccagaagaagatcgtgatctactccaagcagcccattggcgtggacgaggagatcacctacgactacaagttcccactggaagacaacaagatcccgtgtctgtgtggcacagagagctgccggggctccctaaactgaggtggggcaggatgggtgcccacacccctatttattccccctggtgccctgagctcccagcacccccccagccttagtgggctcagcagggcccacatgcccccatctccaagcgtggggttgggggccccaagcccagcgagggagcctcagtccctggaggcagcttctgcctctcctgtcacccctgcccaccaccccctgattgtttttctttgcggagaagaagctgtaaatgttttgtagcagccagcagctgtttcctgtggaaacctggggtgccggcctgtacagattctgtcctggggggctacacagtcctcttgctttgtgttaatggggacttccccttacgccctgcgtgtacccctccccagtttaggggtctctggggcagtggccatgttctccccctgggggggctctgcacccccagtcctggggactccgtgcctggaaccctgcctcatctgttcctgccagaccctgagggtcacccttccaccctggtgtcactccccggctcagccaggccaggatggcggggtgggtcccttttgctgggctggactgtacatatgttaatagcgcaaacccgacgccacatttttataattgtgattaaactttattgtacaaaagtgtttggtcggtgtatttgggcaggagcgaggggttgggggtagagggcacggagggttgtgcaagttgaagagagggaaaagtgggtacctgaagtgtggggcaggtaaaggggccttcaggcaagagcccagacctgcagagacagtccgagactgtctcggaccccctgacaggctgcagcagccgcacccgcaccaggaataccccaccagtgcccgccagggtggtgccaaggtcaggcctccccttcctacaatcacagctgcagctggacctccggcctcctgggaagcccagcaggagggaaggcctgaggtcacactgtgggatgaggtcaccgctggctccacccacagccccagaccccttcagcccactctgcaagttcgagcttcatccccaccaa

SEQ ID NO: 2096 - DNA, 1205 bp, Homo sapiens
ccactgcactccagcctggacaacagaataataccctgtctcaaaaaaaaaaaaaaaaaaaaagaaaaaaaagaaaagaaaaagactttgcccttgagtcaagactttacccttttacccttggctaagatggatgtaggaagtgacatggtacaaaatgctgcagcagagcgtgtgtatgtgctggaagaggagttgactagggcagtgattgacatctctgttccagatatttgcttaccttccctgctgggcccctccctataggagcattatatgctcattccctacttacaataggtttggctataggacttgctttggccagtggaatatgggtaggaaggcaaaatatcggccgggcgcaatggctcacacctgtaatcccagcactttgggaggatgaggcgggtggatcagctgaggtcaagagttcgagaccagtctggccaacgtggtgaaaccctgtctctactaaaagtacaaaattagccaggcatggtggcacgggcctgtaatcccagctgctaggaaggctgaggcaggagaatcacttgaacccgggaaggaggaggttgcaatgagcccagatcatgccattgcactccagcctggacaaaaagtgaaactccgtctcaaaaaaaaaaaaaaaaggtaaagtatcacttctgcatagaagctttagggcaccattgagtactctagcagcttccagtctcttctccctctgctcaggctcataaacctggcagtttccagatctagacttctctttcagcctgcaacccagaatgacaatgacatgaagctgggctacagcctacctataaaatgatgcagaatttaagaaataaatctctcttgctgtgagccattgatatatggaggttgtttgttagcacatccaaatgtttaaacaaactgttacagaattaatacccagaagtggtgtgctgcaacaataaaaattgagcctcagccgggcacggtggctcacacctgtaatcccagcattttgggaggccaaggtaagtgggtcacctaaggttaggagtttgaaaccagcctggccaacatgacaaaaccctgtctctactaaaaatacaaaaaaaattagccaggcatggtggtaggtgcctgtaatcccagctagaggctgaggcaggagaatcgcttggacccaggaggcagaggttggcagtgcg

SEQ ID NO: 2097 - DNA, 1563 bp, Homo sapiens
ttgctgcccaagctggaatgtggtggcatgatctcggctcactgcaacctccacctcctaggttcaagcgattctccaccttagcctccccagcagctgggattacaggtgcccatcaacacacccggctaatttttgtatttttattagagatggggttttgccatgttggccaggctgctctcgaactcctaacctcaggtgatccacccccattggcctcccaaaatactgggattacaggcatgagccaccgtgcccagctgaatttctaaatttttgatagagatcgggtctttctatgttgcccaagctggtcttgaactcctagcctaaagcagtcttcccacctcggcctcccagagtgtttggaatacgtgcgtaagccaccacatctgccctggagcctcttgttttagagacccttcccagcagctcctggcatctaggtagtgcagtgacatcatggagtgttcgggaggtggccagtgcctgaagcccacaccggaccctcttctgccttgcaggttgcctgcggacacgctgggcctctgtcctgatgctgctgagctccctggtgtctctcgctggttctgtctacctggcctggatcctgttcttcgtgctctatgatttctgcattgtttgtatcaccacctatgctatcaacgtgagcctgatgtggctcagtttccggaaggtccaagaaccccagggcaaggctaagaggcactgagccctcaacccaagccaggctgacctcatctgctttgctttggcatgtgagccttgcctaagggggcatatctgggtccctagaaggccctagatgtggggcttctagattaccccctcctcctgccatacccgcacatgacaatggaccaaatgtgccacacgctcgctcttttttacacccagtgcctctgactctgtccccatgggctggtctccaaagctctttccattgcccagggagggaaggttctgagcaataaagtttcttagatcaatcagccaagtctgaaccatgtgtctgccatggactgtggtgctgggcctccctcggtgttgccttctctggagctgggaagggtgagtcagagggagagtggagggcctgctgggaagggtggttatgggtagtctcatctccagtgtgtggagtcagcaaggcctggggcaccattggcccccacccccaggaaacaggctggcagctcgctcctgctgcccacaggagccaggcctcctctcctgggaaggctgagcacacacctggaagggcaggctgcccttctggttctgtaaatgcttgctgggaagttcttccttgagtttaactttaacccctccagttgccttatcgaccattccaagccagtattggtagccttggagggtcagggccaggttgtgaaggtttttgttttgcctattatgccctgaccacttacctacatgccaagcactgtttaagaacttgtgttggcagggtgcagtggctcacacctgtaatccctgtactttgggaggccaaggcaggaggatcacttgaggcca

SEQ ID NO: 2098 - DNA, 1185 bp, Homo sapiens
ctccagtgaaaaccaatgaaacagggtcaaaccctgtgtctactaaaaataaaaaaatgagccaggcgtggtggcgctgagacaggagaatcactggaactcaggaggcagaggttgcagtgagctgagatcatgccactgcactccagctggggtgggggacagagcaagactcaatctcagaaacaaacacacgaagccaataaagttgtttcactcaacgtgtcaggctcaggtctcttgacaggatacatccggcatccggggaaacgtcgaggggtggggtggaatctattttgtggcctcaagggaggttttgagagatagtcttgcaaacgtgatggcctaaggaagcccctctgcccaagaagccatattcatttgtatcctgtagccacccacgagggagaatccggctctctacagacaccccaacccccaccccaccccaccccctgcctcgtgaaatgagctctcgctccatcaggctctattcacaccgtctggttttgtaacctccagcgtgtgtgcatgggttgcggggtggggtgggggcggctgtggacagagaaggggataaagcggcggtgtcccatgggtgcccgggacgtgggacatgagtagagtggccagagcctagttaactcatcgcctgtcaggacgtctcccctcctggtcccctctctgacctacgctccacatcttagcagttcagtggggaccttgtgggtggaagttgccaaccctttgtactttagccgacgaagactgggctcccaagagtctccccggagtcggggccttgggcaggttcacaaggatcctgatggcgacggttggtgatggtgatgtaagttggaagcctcggaccaaatcagaggtatccatttgacctcggtgggacaggtcagctttgcggagttccgtgcgtccttccagagattcatccagcgctagcaagcatggtcccgaggatcccagctcccagcagaggcaattttgttcacacagaatcctgggcaggaaagttctcagcagatttaggcctcctagccaaaaagtcaaagccacttctgggattttttttcaaagagccaatggttccacaatgggccatgggtagttgtggaaatggagagacgtgtttgcagatacatatttgagacagaacggacagggctcggt

SEQ ID NO: 2099 - DNA, 1529 bp, Homo sapiens
gagtccactttaaatcctttaacgaagatccattggagggcaagtttagtgccagcagccgcggtaattccagctccaatagcgtatattaaagttgctgcagttaaaaagctcctagttggatcttgggagcgggcgggcagtccgccatgaggcgagccactgcccgtccccgccccttgcctcttggcgccccctcgatgctcttagctgagtgttccgcggcccaaagcgtttactttgaaaaaattagagtgttcaaagcaggtccaagccgcctggataccgcagctaggaataatggaataggaccgcggttctattttgttggtttatggaactgaggccatgattaagagggacagctgggggcatttgtattgcaccgctagaggtgaaattcttggaccggcgcagtttggaccagagtgaaagcatttgccaagaatgttttcattaatcaagaatgaaagtcggaggttcgaagacgatcagataccgtggtagttctgaccataaacgatgccgactggcaacgtggcggtgttattcccatgacccgctgggcagcttccaagaaaccaaagtctttgggtttttaggttccggggggagtacggttgcaaagctgaaacttaaaggaattggtggaagggcaccaccaggagtggagcctgcggcttaatttgactcaacatgggaaaaatcccccgggccggacagggacaggattgacagattgatagctgtttctctgttccatgggtggtggtgcatggccttagttggtggagtgatttgtctggttaattccaataaccaacgagactctggcatgctaactagttacgtgacccccgagcggtcggcgtcccccaacttcttagagggacaagtggccttcagccacccgaaattgagcaataacagatctgtgatgcccttagatgtccgggactgcacgcgcgctacactgactggctcagcgtgtgcctaccctacgtggcagaggcgggtaacctgttgaacctcattcgtgatggggatgggggattgcaattattccccatgaaggaggaatttccagtaagtgcgggtcataagcttgcctgaagtccctgccctatgtacacactgcccgcctctactactgataggatggtttagtgaggccctctgatcagccccgccgggtcagcccactgccctggtggaacgctgagaagacagtcgaacttgactatctagaggaagtaaaattcgtaacagtttcggtaggtgaacctgtggagggatcattaacggagaagagcctcgaagccgcggcggcgaagccacggcggcgccgccgcgtccttcctccttggcagaccctgttccccgtgtggcgcgtgcgcgggcggggtcgtgccctttgtttgttgcatggccccgcctgccctgagagccggagaactcgggagggagagggggggagagagagacacgcgtgcggggacgaaaccttgtgttcgtgtcgtggggcaggc

SEQ ID NO: 2100 - DNA, 1176 bp, Homo sapiens
aagaaatacctgagactgggtaatttttaagaaaagaggcttgattggttcacagttctgcagactgtacaggaagcatggtggtatcagcttctggggatgcctcaggaagcttccagtcaaagcggaaggtgaagggggagcacgcacatcgcatggcaagagcaggaacaagagagagaatcagggcggggcaggggatgccgcagactttcagggtctgctcccttgacccaaacacctcccactagacccacctccaacatggggattacatttcaatgtgagatttgggtggggacaaacatccaaactacgtgaacagtcgtgatctgtcactcaaaggaggatgctcagtcaccagctacagatgttcccatcagcttttggggaattaatttggcccagcctcgaaaggtacttgggagacccctctccagcctttggggcctgtatcaaagccatgtctcatgtctcccccagctgtgccctggcttctctaatgccatttatgacattcccttctcctgcgccactgttcatgcacttatctgttcactggctcagcgggcatgctctgaggcgctggagagaactaagttctgcccttatcctcacgctgtgtgtaacagcagtattatttgcacacactgggtctcatttcctttactgggctgaagtctttttaaggctctggttcttgcttagtcacttgtgtttcctttagcatttagtgaacacagcttttctggtgctcaaatcctggtttgcattccaacaggataaagtttgtggcatcacaagcatggaagggcaagaccaggaggaattacaggcaggttctgctgtcctcagaaaccagcccttctctgtctgtgagaatagtggctggtttcttatagaagctggggcctgccaccctcctggcatcccagaaccctgagctttttaaataggaagcctagttggtgctttcttggcagaagaaaagttggtccgttagtaaaggaattggttcattgcttagctagttcaagatagaaattctaatggaatcatgccacagtcttacaaggtacgtgtgtatgttttttccaggcatattttttatatttttccatagaccagaatataggtattattaacaaaaaggtaagatactctatatactgtttt

SEQ ID NO: 2101 - DNA, 1434 bp, Homo sapiens
attacacaccacacacagacacacctcaacacacctatacacacaccacacacagatacacacacactcatacccccaccacacccacacacacactacagactcacacacacaccacatacacacaccccacacacaggctcatatacccaccacacctacacacacacccccatcacacctacacacacacctacacacatacacagacacatacaccccacaccacactacaactacacacacaccacacagacacacacacacccaccacacctacacacacacacatcccaccatgccaacacaccacacacagacacatgcacatgtgagtgtatgcgtgcacacaccccaccacacctacaaataccacaccacacctacacacaaagccttcataaaaataagagccgggccgggcgtggtggctcacacctgtaattccagcactttgggaggccgaggcgggcggatcacctgaggttggcagttcaagaccagcctgatcaacatggagaaaccccgtctctactaaaaatacaaaattggccaggcatggtggcgcatgcctgtaatcccagctactcgggaggctgaggcaggagaatggcatgaactcgggaggcggagcttgcagtgagccgagattgtgccactgcactccagcctgggtgacagagcgagactccgtctcaaaaaaattaaaaaaaaaaaaataagagagccaggtgagaaccccttctccctcgcataactggctgaggagagtcagacacacaggctgctcttctgggcgtccctggaggccgactacaccatcatgcatggcagctggggaggggggcctctgcggggagggtgttctatgggtctcaagggaacacagggcactgagtgattctggatgggcttctgacctggggacaatttaaacagcattacaaccgacattttggttttcttggggattttataggccaggtacaaagcagaaagtgcatagaagatgtgatccactttgcctgggaagagaagctctttctcctggctgatgaggtaagaatgtccccactcagagggagtgggcactagctttctcttctagagggagggacccagcccccattgttctgcagccagagagaactgtcttggtgttggaggaatgattctggcctagggtgaggatatttagttttacaacttgtgggactgtgacttaatttacccctttattggtttgtactcttggttgtaaatttcagaaattcagcccaaatcacttaagctccaaaagaaaaaggaaaaagaaaaaatgccagtggggtcacaggtacgcagctggatccaggggcttggaccttatctttcaggtcctctttcccttttctacccctctgtgttggcctcatacacaggcctgttatcttt

SEQ ID NO: 2102 - DNA, 1147 bp, Homo sapiens
gaaaaacttctttctctgataagaaacttaaacttactggcatcccttataaggcttaattcaaatttatgtccacataagtgagttcttttcatttcttctgtttatttttctgtgtattgtggtacgttgtatcttgaactaagtattagcttcttgactcttcagtttgaatcactcaaaaatatttaatttagtagatagcatatgccaatggaaaagattactatagttctacagagtagcattatttttaatgtaagatacatttatcatgacttgtatagcaattctcactaagacctttgtctatgaagcagttagcagaacagttattctgcttttctcatttgtgtcaatacatttatattctttcttgtttgtgttgtcctgatttgcttactcttattttctagctgctccacgtcaaagaatagagttgacctttgatgaacattattatatagaaccatcatttgagtgtcggtttgatcacttggaagttcgagatgggccatttggtttctctcctcttatagatcgttactgtggcgtgaaaagccctccattaattagatcaacagggagattcatgtggattaagtttagttctgatgaagagcttgaaggactgggatttcgagcaaaatattcatttattccaggtaaagaataagttatcttttaagtggttgggcatctcactctaactctgattttagaatcttaaggttagaaaagagattaatttggtcaagttaatcaaatcaagattttaaacaaattagcaaagtcaaagggaaattagtccatgaacaaataagaagttaatagaaattggacatagaaacgtatcacttgaattttgaagcatatcagagatggtgccacattttcttagatttttttctgtcttatagcacatgctcaggctaacatttaaaatacatttaaaaataaataattttaaaaataattcaacaaattgtcttgttttcagaattcccacaaaaattgttttgtatgatttttctcatttagctgttagaattaaccactcaactgaatgaatactctagaatatattgagcaatagaaagaatactgctctgcacttggatgtcaaagatctgggtttgaattcttt

SEQ ID NO: 2103 - DNA, 1160 bp, Homo sapiens
gccggctctccgggcgcgccgcttccgacccctgcgagtccggccgacgttcgcggggcgcgtgtgggaagagggatcgggtcgggaaggcggccaggaggcccctgggcccagcagggccctccgggctgcgccctcgcgccgcttccgtagaattccgcgcatccctttgcaaagttgtgagattcctgtcgtggagcggaggccgctctttctccagatgtgatggcaaaaagtaattccacgagaacaataaaagccgcggccgtgacgtcgtgcagtggttttcgaatagccccgcggcgcctgcacctcgcggcggggaacggggcctgctgggccagccgggtcccacctgctgcggccacggaggctgcggcaccactgcgggctccgggggcggcgcgcgggcgccgcggacccggcttgtcccggcccccggggagcgctgctgctcgggtgcttcccgggacgcggcgctcctcgcgctccgccagaggtctcagaattccccgccgctggtgttcggttcttactaatttgttgtactgggaattaaaacagttggcttgtccagagcacagagctctaaaacctactccaccggctttgcatttcccaggaggtggtaatttagatgaaaatttatatacatagataattaggattgggatacaaagttgctcctgaaactcggactgaataaatcgtcttttcaatttccagagggaaaacagcaccaccactcagtaaaggacttccctttttccccctgctgatttaaattgaaagctgacgtgtttgtaatgtcgtaacatgttctttttttaaaaatttcgagggtacggctgaggcattattaacggtgttatgtataactcagcactgtatcttaatatttgtagagtgacttttttcctgctccctaacagcacttttttcaaatttgttttattagaaagttcagtgtaattttgcttttgattttaattggacacattgtctactctccacatattcctaaattcgtaattgagatttcagtaattcgaaacgtttaactaccccactgtaaacgtatctacagcttgtactaaggtaacctaggactttctagctgatgaatatttcacaaaccgtaaatccgtagtgatttcttt

SEQ ID NO: 2104 - DNA, 1321 bp, Homo sapiens
attctacattcccttcctttgaatgacaaagtcccaggtgacatggcttttgcctgcccctctgacctcctcacagaattctcctcttcttctccactgctatctttgggtccataagatgcaatctaatttgcactttaggctctgtagtatagctttttaggctctctctaatagctattttatctgcctggaaagctctctatactgctgtttgggtagcttgttccttctggttgagttttaggttcttatcttaaatgtagcctctttagaaaggctttttctgcccacccaatctaagtagcccccagacacatcactcttaattttaattctctgtagtgtccttattattaggtaatttttcccccttcttagttttcctgttcatcttcatccactagaatataagctatataaaagcagagacttacttgttttgtgcatagctgtatccctaaagtccagaagagtgcctggaacataaaaaatgttcagtaaatcatataatatctatcacactggagactgtcctgcttcttttgagagacagtgtcataatatggttattatatagatgttagactcgtacaactaggttcaaatactagtattgaatcttacaaactgtgaactcaatagcaaagacatggaatcaacctaggtgcccaaaaacagtgggttggataaagaaaatgtggtacatatacaccagggaataattcacagctgtggaaagaatgaaatcatgtcctttgcagcaacatgaatacagctggaggccattatcctaagtgaattaacacaagaacagaaaaccaaatactactgcatgttctcctaagtgggagctaaacattgggtactcatggacataaacatggcaacagtagaaactggggattgctagaggggagagtgagggagaggggcagggcaggggttgaaaaactaactgttgggttctttattcactgcctgaatgatgggatcattcacaccccaaacctcagcatcacgtaatatacccaggtaacaaacttgcacgtgtacccctaaacctaaaacaaaatttgaaattattagaaataaataaacaaaatgtttttccccctaaaaccaaacaaattgtgtctaatgttttgcacttaattttccatactatggagtggagataatagtatatccctcataagttcttttgtgaagatgaagtaatgtctggaagtacctagtggtggtagtagtagtactaatgataataatgatttttcatgctatgatgacagcagtgacaactttttaagcagctaatctt

SEQ ID NO: 2105 - DNA, 1099 bp, Homo sapiens
tgaaacctagctgaatattcgtggagtggatggctttggagtatgtgaacattatcttctttccttgagggtttgggggtatgattatttgagaaaaatttgtgtaatgaaacattagcataaggaatgaagtttggatttatggtcccataattagacatatttcttaataactagaatctattgacaaatgactaccacatgagtattagtgacacttagttgtttggaccatgtacacatcagttagttggattgagtgctggaggtaagggtgggaatatcccatgacatttcaagttcttctgtatttattttcaaaggtactttattccccctcttgttcccccagcaagaaggtttacaagtagtaaagtatggtacttcacataaaataatggaagttagattaagcactgcttcttcatttgtttagagtttttctttgtttatctttgtgaaaatgactgaatttgatgggtttttattttttcttttaggctcagtttatgaacctcttaaaagcattaatcttccaagacctgataatgaaactctctgggataagttggaccattattacagaattggtgagtaaaacctgaggaaaacgtgtccttaggtatctgcgattagtattccccttgccctagttaaattatgtacattatgtggatgatattgttctgtcattgggatttggggtactttcagtgcttaagtagctgtgtattccaattgtatgtcgatatcaggactataaaaggaatctggcagatcatatctggcccttgaagaatttgaaaactgtcaccaatatcttctgtgtttttttaatcttcctaaacattaccagatttgagaccttgaggatgtttcttgattaatacacagatatttcatataagtattaatttgctcatttacctaaacatggttcccagatagtcctaaactttttatatccgtttctaattcattgagatacaagagataatcacaagttagtattattaatatcagggcgcttgtgttttgtttgttttattttgtttttccaggaccagccttgcaaattttgtttttcaatgtgagtaag

SEQ ID NO: 2106 - DNA, 1124 bp, Homo sapiens
gtgggtatcgcgccattgcactccagcctccgcgacagagcgagaatctgtctcagaataaataaataaataaataaataaataattagttcgaatcaaaagttaaaaacacttcaagtatatgtaaaaaatcgaagaaaacgttaaaaacacttcaagtatatacaattcaaataagatcatccttccaaatatactctgtaagtgaggcgaaggtcgctgcacgcttgagtgcacgtctttccgcataggtaggacgctcaagtcttaccgggaggctctcctagagagcagcgcgaagccatggcttttgggcccggggacggaccgtagcgcgtagccggaagcggaggcgtggaggcgggtctgaggtttggtgactgcggggcaggccgggggcagctgtctgtctggctctttttgacagcccccagtgcgaaaggctgccagcatgtcatcagtgagccccatccagatccccagtcgcctcccgctgctgctcacccacgagggcgtcctgctgcccggctccaccatgcgcaccagcgtggactcggcccgcaacctgcagctggtgcggagccgccttctgaagggcacgtcgctgcaaagcaccatcctgggcgtcatccccaacacgcctgaccccgccagcgacgcgcaggacctgccgccgctgcacaggtaggcctggctgcccccgcggcggcggcgggcggcgcggcctcctccggggacctgggcccaggccacggcctgccttgagcgcgaggctcagttcggggcggccttcgcggctcggttccgcctctctggtgctatcacttgcaaaatggggatgtcagatacctgccccatgaccatgaatgagatcgttcatgaagtagtgcctgacacctggtgaaactacgcagttccctaccgttctggataatttaatttgaatcctcttccccctctccgcaattcctcgccctcggtcttcagcctcctaggccagtgcttttaactttccaggccctttctttctccccggtgatctctgccttcacttgccttcgcttttcacctttctccccactgccctttactcctatccgcctccccttttctgtcacccatca

SEQ ID NO: 2107 - DNA, 1150 bp, Homo sapiens
agttattattctagccagtaatggacttcagaatcttttattacacaatataagaatatgtatgtaaagacattttggaatttcctggatgagaaggaagtctgggctgggcatggtggctcacgcctgtaaccctagcactttaggaaatcgaggcgagtggatcacttaagctcaggagttcaaggccagcctgggcaacatggcaaaaccccatttctacaaaaaatacaaaaattagctgggcatggtggcacccgcctgtagtccagctacttgaggctgagatgggaggatgagggaggtcggggctgcagtgagccaagatcacgccactgcactccagcaccctgggcgacagagtgagaccctgtctcaaaaaaaaaaaaaaaaaaaaagattgggccaaaatactgtgataaaatagcaggcctgctgataaaagtttatctgaatgcattgagaggaaaagtccagacctaggactagttatggcagttggagagaaagaacatcgggatgtttgaaaatatgccattgactatcttaactactgtaattttatcatttccaacgtcatctaactggggactagaacaaactgtgaattcactttcagcaaccagagggcgctaatccacacccacatcgctctgccctgttccacccagcaggggcaacaaggatataacttggggttctcggtattcttcctttagtcctgacacaggcagccttgcactttgtagcagcaggagggcacttgctttaagcatatctttcgaaaggcatccattgagagaataatgcattctccccttgctgtgtatgacatggaacagtatgaccattgcactagctttgtttttggtttgttttgttttttttttaattccaggggtgggaggttggttggttgaagtctaagctcttcctttttcacctgggttttttttttttggggggggtggggggttaggggtggggcgggtggggaagagccaaaattttaaccatttttaagcatataatttgggggtatcagttactggatctaagcatgtccactctacacgctttttttttttttttttttttttttttttgagatggagtcttgctctgttacccaggctgcactgcagtggca

SEQ ID NO: 2108 - DNA, 1184 bp, Homo sapiens
aagaccctgtgctgagcttatttaattcaagtctaggctctgccacttgctagcagtgggaccttggacaagccatttaacattcctggcacctcagttttctcttgtataaaatggggataatagcacctgtcctacaggcctgggaggggttcaagaagctcacccctgtaggtgtctggctgttgatgatggggacgaggaagacagcattcatttgtctgtggcaggccatcttttaagcactttatcaatatcccatttgatcctcccagccacccagctagggacatattataatcttcattttttgagtgaggaaatggagcccagagaggttaagtgacttacccagggttgcacagccactaagtaccggagctcagcttatctaacttgagcctcctctagtatgtgctaagaacactcccagtagcccactgtttggctgactgtacctatgccacagtgatccctgcctgcgagtgttgtgggggcagctgccacaggaggctgggctggtgtcctgagcttggccctgacagccgtgtctgtgtctagtcttcgtccaggccaacaagttgcagcagcacatctttgccgtgcacgggcaggaggacaagatctacgactgctcacagtgccctcagaagttcttcttccagaccgagctgcaggtgggtgcccacatccgctgcaccacgccgcctgatggtcctcggttcccccgtcagcaccgacggtctcagggttaaggcaagctggtggagtcttatgctggcaggtctgcaatcaggggctgacctcctggctagcaggcatggagtttcagccccctggcctctgccagcccagcgttctcaaaagaaccaactgccactggctgagcccagagcaggagtcagaagcttacatttgaggtgtttcgtggcaagtcctgtctgctcttggggattccaatttccctacctctattgtaaaatgatatttcactgagctttggttctgtggctagaagcccatgatgtctttgtggctgggtcctggggctgtgtgggaacaggagttaggtctggggccttggagcctccagttttgtccataaaagccagaaaagaagagtagtggtgcccgattgccccagcttagaggcagtcaccagaggtcctgagactgatgtggcc

SEQ ID NO: 2109 - DNA, 1147 bp, Homo sapiens
gggctgtgcatttcacttctgaacttgcagtcagaacctgcatcctctctgctcttctggtctattctacgctcccaaccactcatctgttctctatggtgaactggaagtggccttctgaatgtgtctccctgtctggagccttcagtcgctcccattgtccttaggtagagaccctcagtgtaggccacaagtctctgtagagtggtcagacacccccatcctcccctcccctccatctgacacttgcccctcactctgcattccagccacaggcctttgtgcatgctgttcctcttctgggacttgcgctccacgtgtcagacctgccaagacacaggcctgatgccctcggagcagctgcccctttgtctaccctcctgggcatccatctctcaggctgcagttaggtggtgactcgtgtgtacagttggtgaatatcttcctccctggctggactgggagctcctggtgggcaggcaccacccagacctgaggctttatgcacagtaaacatttgatgcttgttttttgaatgaatgaataaatggattaaaaaaaaagatacaaggtaggtgcttagtagatatttattgaatgaataaatggacggcacactatagatgcctagcaaattcttgttggataaaccaaaaaacccaagcaaatcaagaaggctcagcaccttgttggaaaagcctggccaatgactcttccagttaggccttctccagaccagggatactatctgtctgtccatccagccctcctgctcttttcctgttagctcaggaggccatgcatggccatgcctttgaccctcctgcctgctctaccccagcacacgggcaggacctggaggagggtggcaatggggccctagagacctctgctgacacacttgtgctgggggtggccttctggtgagtgatgggatggaggctgccctggcctctggcccctggtatcacgactctctttgcacttctgtaatcttttaaactccagagccgtctggtccagctatgatctggaaacatcttccagaacatctgttttcctcctcaatcaatacactccccaaagagggccaagttgccaaatattatatataacatcaaacatgctatctgaattcaattaagtg

SEQ ID NO: 2110 - DNA, 1162 bp, Homo sapiens
cagatcagctgtgtgttcttgacaatgtgaaaatgaatttgcgaagatttattgcttatcaagaaactgttgagaaaagactgacttcttaaacaatccaaaaaagaaaccagttcttcccccaaagtattcaatgcttagaatactaaaaggttttctttgaatgtatatgtttctgaaagtcattttttaatgattacattctgtacattctgtaaaaacttcaaaacctggccaggcatggtggctcacgcctataatcccagcaccttgggagaccgaggcgggtggatcacttgaggtcaggagtttgaggccagcctggccaacatggtgaaaccgcatgcataagcatggtggcacatgcctgtgatcccagctactcgggaggctgagggaggagagtcggttgaacctgggagacagaggttgcagtgagctgagatcacgctactgcactccagcctgggtgacagagggagaccctgtctccaaaaaaaaaaaaaaaaaaaaacttcaaaacctgtcagaaactctgttgctggtttttttgtgtgtgtgttttgtttgtttgttttgttttgttgtttttttcttttttgagatggagtctcactgctgcccaggctgtattacagtgctgcgatcttggcttactgcaacctctgccattccaggttcaagcgattctcatgcctcagcctcctgagtagctggaattacaggcacccaccaccacaccttgtttttgtttttggttttttggtttgtttttttttttcagtagagacgggtttcaccgtgttggccaggctggtctcaaattcctgacctcaagtgatccgcctgccctggcctcccaaagtgctgggattacaggcatgagccaccgtgcctggccagaaactcttttttaagtgatgagatctgtgtggcatttctagcgctctctaaattatgtctctggcatattttaatcactggaaactcaaagagtggaagagtggaagtgcgaaggaatctcaggtagctcttaactaattcgccagcagtgaagaaacttcaaccaatcatgttttccttgaattttgcaaagaaagaaaatccaaagcattgcttggatgttcttttaaggcattttatatcagttgaaccttaaact

SEQ ID NO: 2111 - DNA, 1214 bp, Homo sapiens
gtgcttttatttcacccctggtgaaactaggggagctaatttttttaaacatgatttttggcccccttgaaccgccggcctggactacgtttcccagcagcccgtgctcaagactacgggtgcctgcaggcggtcagcgtcgtttgcggcggcgcaggcgcggtgcgggcggcggacgggcgggcgcttcgccgtttgaatggctgcgggcccgggccctcacctcacctgaggtccggccgcccaggggtgcgctatgccgtcgggaggtgaccagtcgccaccgcccccgcctccccctccggcggcggcagcctcggatgaggaggaggaggacgacggcgaggcggaagacgccgcgccgcctgccgagtcgcccacccctcagatccagcagcggttcgacgagctgtgcagccgcctcaacatggacgaggcggcgcgggccgaggcctgggacagctaccgcagcatgagcgaaagctacacgctggaggtgcgctcgcgggcggaggggcgcttccggcctagttggcgtgaaccggtgccttccgagccgcgtcgcgcgcctcgagagactctcgggcgggttgcgggctcccagccccgagaggggtggggacttcctctgcgctattccgaggctcttagccgctccgagggctaacccgctctcgccgcgctttcctgcggcttccgaatggggaacgcgtcttgccctaaagtagcacagcaaggctgagatcgcgctggggtcccgttgaggaaaatgggtgtgtgtggcccatctgaccccccgcccgccttgttagtagaatgaactagtgtcgttgtcaagaccacacggacaaggggaggggacttgcccttatttgcaccgcgattaaccgggttgtggcacctgggtctccaggcgtctccgtctgttcgcttccccctgttaaccaaattgcctttgccctggcgttgcgggcgtttgagtcaacgtgctgatgcgttttgggctgtgtttacgtctgtgtaaacaaattaatactcatttccccccaggccagatgaaatgagccctccgccgacccggatgtagacacatgcccccatttgtcactaggatcaggactgtggctacctcgagggctttttggtcaccccgggcattgcacaggactcctgttgttgttgcgatccgggtgtgttaggtcgcagccttcgga

SEQ ID NO: 2112 - DNA, 1229 bp, Homo sapiens
cagaaaagtttacagggcataaccaccctcaccttgcttttcttactgacttttaaccatcacaaagtaattactttccctcctctatccctcccttggaatgggtctttttttttttttttttttttttttttgactcactctctcgcccaggctggaatacaatgatgccatgatggctcactgcagactcgacctccccagctcaagtgatcctcccacctcagcctcctgagtagcagggtctacagcgcccaccacgatacctgactactttgtatttttttgcagagacagggtcttgccatgttgcctagcctggtctcaaactcctgggctcaagccatcctcctgccccaacctcccaaagtattgggattactggcgtgagctactgtgcccatccagaatgtgttactttttaaagtacattgtgaggcaggacagtattcacattgcctttcccagagcccctaaagcatcaactgaagatggtgtccctactgcagtcaaacagaaatgctgagtaatgactggtttaataatgatcagatagacgagaaaaggccttgactaagtcagtgatattgggatatgattattttaattattttaatattgattcttttggtgtcttttggattgtttagctgtcgctttttctcttggcttttgaggtttcaggacacggagtaaaatgatggaaatgtgtttgtttttcagggcagagaggagtgttggtaagtagagaaattacattgtgtcctcagctgccattgatgtccttccaaataggtgaagtttagtttaaaacctgccgttaatttctggcctctggcaagagtggtacaaggttacctgtttgttccagtatgtgtagggaggggctgggggttggggagagagaagggtggcaattagtcaatgacatttatgacccatttataaaatacaaatgaaataattggttacaaaatcatgacaagccttcacttgtcttttacaaacttgttctcaacacactgtgaaacttaatggacaccctttgtagaaagtgaggaacaacagccattctgaagagaccgattcaaagcgttcaacctgagactagctgtggtggcgaagattctctgagtatgtttctcattctcatctcagatacccgcattattatcgcagatccagaggcagggaatttgtagattcctcagccagggaattgccacagt

SEQ ID NO: 2113 - DNA, 1200 bp, Homo sapiens
ctctttctgaatgaggccctaggtaatcatttgcagagtgggatctcccaacccaaggcctcccgtcctgaggagcggatgacaaaaaccttatagagcgtcctccttccaacaataattctccaaaccccgccccctactccgccagtgccccattcacagcccgaaacatccgaccggtattagtaatagttcataataccaccacttgaggctcagagcctgggcaggcagctagaatttagcaacgttatttcgttttcattgtgtttatttctgttgatggtaagggaaactgattttccatttaaattatctgtgtattcagttgaaagcgccagtttgaccacagcagtgagtctcgctgcaccggatgggtttggttgtggataacctaagctgcaggccggactcggaactgcccgggacaccgcctctgggttctgagtcccgagcgtcgttgaagcatgagaggaactacatcagaccccaaaatagtctctcctaggaagtcaggatggccgagcggtctaaggcgctgcgttcaggtcgcagtctcccctggaggcgtgggttcgaatcccacttctgacaagcgctcttttccggtatttcagaagagaaatcttcgacgaccgcacaccaagagaggccctcaaacacagaggaccgtacgttttacacacaatccaaagtctaaatgaatgtctgtggggaagaaaaagtctgacaggacgtggtcgtgtgattctgaactcccaacttcggaggaggttgaggcgggaggatgtcgccaccacactccagcttaggcgacagagcgagattcttttttaaaaaagaaaatgctcgttaataagaaaatactcgttttgtaaaacaattaagattatgcgaacatatacgcacaagacatcataacctcattgatctgtaaaagaataaaaaaagattataagaacatatacacagaacacatacacacaagacatcataacctcactgatctgcggtgttgatgaggaaaagtaattgagctctgtcagaagtgggattcgaacccacgcctccaggggagactgcgacctgaacgcagcgccttagaccgctcggccatcctgactgcttgcagtgtgtggcgcataaagcctcttcacaagttctgcaatatgcgcatgcgtagtgggcagcgaagaccca

SEQ ID NO: 2114 - DNA, 1204 bp, Homo sapiens
gagtaaatgaattataacacatatacaaatgtgaagctgcagctggggcgagtattcggaaggagagcgcggtaagagtgccaggcggccttgcaatacctgggctttacctagattgggcgccagcccacggaaatgtctgcgaatcagtgcaggtatacggacttgattgcattgtgcacaagggaaatgcaaggttgcttgcagatttcaggaatcaaagctgacatgatagtacatgtatgaatgcagaatgaatacaggctggaggcacgaatgcatgtgtattgaagtaacagtcttcggtctcggccttctctagtaggccttgcgcaccctctggcgtcgcctaggtgcatcgcgctgaccttccttgtcccatctctccacgcccattggagcaagtgagtgtatctcgctccacccaacgccgggcggacaactaggagtgggtcttcgctgcccactacgcatgcgcatattgcagaacttgtgaagaggctttatgcgccacacactgcaagcagtcaggatggccgagcggtctaaggcgctgcgttcaggtcgcagtctcccctggaggcgtgggttcgaatcccacttctgacagagctcaattacttttcctcatcaacaccgcagatcagtgaggttatgatgtcttgtgtgtatgtgttctgtgtatatgttcttataatctttttttattcttttacagatcaatgaggttatgatgtcttgtgcgtatatgttcgcataatcttaattgttttacaaaacgagtattttcttattaacgagcattttcttttttaaaaaagaatctcgctctgtcgcctaagctggagtgtggtggcgacatcctcccgcctcaacctcctccgaagttgggagttcagaatcacacgaccacgtcctgtcagactttttcttccccacagacattcatttagactttggattgtgtgtaaaacgtacggtcctctgtgtttgagggcctctcttggtgtgcggtcgtcgaagatttctcttctgaaataccggaaaagagcgcttgtcagaagtgggattcgaacccacgcctccaggggagactgcgacctgaacgcagcgccttagaccgctcggccatcctgacttcctaggagagactattttggggtctgatgtagttcctctcatgcttcaacgacgctcgggactc

SEQ ID NO: 2115 - DNA, 1236 bp, Homo sapiens
cgagattctttccaaggaggacttcagtggccgtctctgggatgcctttcctaggcccctaagcttagcttctgactccgctctcccacatcccacacgtcagacaaaaacaacgactcgcaggaaatctatgtgaattgcagacacgtggtcttctccgccccactgcggctgctgcactttaggcagccagcatcccggaacagagctgcagctcattatcctggcctctgggaggagtttctttttccttacgttccaaatcaccctacctgaggtgccccctctgcagattcccaaacctaatttgcagtgcagcttctgactctggtggctttggtgggtgtcagtctttatcaagtggtcttggtgatccagggagcaacagctcttaccaagcattttctaacatgacgtcacctcttgtttgtattgcagccctgtattgagctgagatggctcgagcctaacattccatgatccaggatcgtgacagatgtgcacaggctgctgctgttgctgctgtgggtaatttggaaccacgaggcaccccagggccagaagacgaggcattctgtctgcctggatgtgtgggaactctctgccaacttgattggtggatctggggggggatccacccccaccccacgaggaaagcacagtttattttgtgggtggggcttcaggtgccagccagctgaaggatggccacccctgtggtcaccaagacagcctggaagttgcgtgagtggttttcatttttctttatcaccccatttattctgttagcggcttgttgctgggaggcctgaacccacagctttgtttcctgttcttggcacaggaggagactcctagacttgggagtaagatagaccattatgtaaatcatgactgtggcacttcttagctgggtgacactgggcaggtgacttaacctctctgaggctcagttttcttatatgtacaatgagatgacgcctgcattctatggttgctgtgaaattcaagtgacaggatgaacccatcctaaagcacttagcacagcatttccagttaggctgacagtggggtgagaaatcctgaaagatgttcacagcattctcagacatctcacaagtcaaacttccccagtcagataaaagcatcttgggcctgggatgggggaaggagtgggagcgaggaggggcgggcagagggatgcagacagggctcggattgtaactgatgggcact

SEQ ID NO: 2116 - DNA, 1201 bp, Homo sapiens
ttcctgctccccctccaatctcctttatcaccccaccccactcctcagccctccctttttttttttaagttgcctgtctggaccaggcaagaggtgcctactggagggtcttggtgaagcggtaactccattcctttcccttgggtcccccaaaggtaataaaagtacctggaggagaatagtcaggtgattgacctctgcctgtctctctgacggtgatgtaggtgcagacaccgcctgcctgccttgtcctggggttttgtaactgcagctttgacacaggcattcttcctttgaagcacacagcttgcttttccagcacctagacttttacctctcttcatgccttagacttagaccataactgggcttgaaatgctcaccccttcctgggtctggtcttggcacctaggctattcctttccaaactgaagtgagtccagtttcagaccatctcttttcctgtctccaaaaaccatttttgtttccaaacctagctcccccgaaattttaagactatttacctagattcggagatggtcttggagagttccaaaaggggtgtgtgtgtgtctgtgtgtgtgtctgtgtgtgtgtctgtgtgtgtgtctgtgtgtgtgtctgtgtgtctaatatttagactaaaccatggtaaatgtacgcacccagtatccttttcagttagcatattctttcttaaactcatctcagtacttttcatttgtttgcttcattatcttaaacaggttaaaagtgcctatgataaggacttaattatttcctaaagaaaagcaaaaaatgtggggaacagggtagtgttatactatcatctcaggtactgcctatgttcaagaacatagacctggtatggtgagaacaaaaggttcctatgccaaatccagatggctatatcatttgttggctacaagtgagcctgactgcaaggtttgcttctgctgagaaatcccatggtgagagtagaactcatgaagtgctgagtcacatttgcacctctggtgtggtggcagttcactctcccctggatgctgtcagctggccttgctttcatcctatccctgtaggcagggtaggtggctgggtaggagaagctattgagtgtatgacgcagaccaagctttcctgggccttctcaccaactagagaagcgctgatgtcgttcattgaggcacttaaacaccag

SEQ ID NO: 2117 - DNA, 1166 bp, Homo sapiens
gcacccaggaggatgaccagggtggcctgggggtgcttttccccatcacagcttagggtccatctctgaaagtgcctgggttgggaaaggccgaattaccctggagtagagcatggtgttgccattcgagtgtggtgggaaaggcctgctgtcaagcacgtagggccctctgaccccgcactggggcccggctgcctgtgtgtgattgccaaagggagaggcgggatgctggcttcacccgaccccctgggaccatgcaggagagaataacttagaagttacgttaggtctcttgggtgcaagtgacagaaaccgaactcagactgatacaaagagaggaagatggggtgtccctggccagcacagtggacacagggccatcggcctctgtctctctctccctcattcctactagtttggttctctggattggttgagctctaagtcaggcccttcctcgcaagggcagtgtggttgctggctcacagaccgtcctcctgaaaaccccattgctggggaagagcttcccctctccaaggattccagtaaaggccttcgagaccgggcccagggctcggtccacttggtttccaggccacccaacccctctgtctcctgcctcagtggcttctcattggctttgctgctttatcctcattgtcttcttctggggctcagtgctgggacatcttcttccctgtcctcattcactccctagatgacctcatctagtctctctatgatgatatctttgaagtgactcctcccaaggttctgaagtacaaattgttttctaaaaactgtattatgtattatccttccctctgttccttctcctccttcctccctttctcttcccttcatttctttctttagaaagacagggtcttactttgttgcccaggctggagtacagttgcctgatcacagctcactgcagccttgacctcctgggctcaagcgatcctcacgcctcagcccccgcccctaagtagctgagaacacaggcatatatcaccacacccagctgacttttaaatttttgtggagacagggtctcactatgttgcccaggctggtcttaaactcctgggctcaagtaatcctcccaccttggcctcccaaagtgctgggattacaggcctgagccaccgtgctaacctgaa

SEQ ID NO: 2118 - DNA, 1245 bp, Homo sapiens
cttcagcctcccgagtagctgggattatagttgtaccgccatgcccagctaatttttatatttttagtagagacggggtttaatcatattggccaggctggtcccgaactcctgaccttaggtgatccaccctcctcggcctcccagagttctgggattacaggcctgagccactgtgcccggccagtcctcttttttaaaaaacagaaaaatatagtcttgtagaaaaccattgtatgtatttgtattgctgctgggcatttgtgttgttaatcacttaaactattataaacaatgctgtcctgaatgttttcgtttgtatcttgtagtattcaagtgcaagatatctttagactctaaatctgtttgtggaatagctgttgtctaggagtctgtgcagtttaaggtcaaattctactgagctgaggcttattcaacaaaattcaagtattttaatttctaaaccatcatttatttcttaggaggaaaaacttctagaaccagcatacagctgtggtcattctttgctcaataacttgggtcattggcttaggaaccagcactatatttaaacctgtggatgggaatattccccattcttggttacgctgtagtgcaaaagaattcctggctctctgttgcacagctgacttgtgccattctgctgttgctgtatagagttaaggaacatggctctatttcgtttttattatctgatagcaagggtggttgggatacataaaagtttccacatactctgtagcaaagtttcaagaccatgttttttaaacagaagtttaaatatagccctaagtcaagaggtaccacagagtagatgggtatatacatgtgtgcatacctgcagccaaaacactctcctatgttagttctgcccccccttagaaaaacagtaaccggagaatcagttaaatggtttgggttttttagaaatttgaaaagaagtatataaacagtattatactatatctcagaaagttatcttggttggctgcagagatttgttaatgacctgggtatactgaagattgcaataggaggctaatttgattatattcctttgtatgcttgctgcctttaaggacttaagcatggctatcatcctcatttaaattaatttagcacttcaaaatagctttgtagttaggtctctgctttaaacctagctaaggttttcagagttgaaaatacttttctaggggaggatagctggcacataactttgtg

SEQ ID NO: 2119 - DNA, 1209 bp, Homo sapiens
tgcagtgaattgatatcgtgctactgcactccagtctgggtgacagagtgagactccatcttaaaaaaaaaaaaaatcagatcggttggtttacttacatgtgctagagaataggaactgatattttttaccttttcccctctattttaggagtgtttctcaggagctatcagaaactatcctcaccatggtagccaattgcagtaatgttatgaataaggccagacaaccaccacctggagttatgccaaaaggacgtcctcctagtgctagcagcttagatgccatttctcctgttcaggtaaatgagtgctacatttgatacatcttcatttgccatagatttggaatagaataagctcctatgtcattaataaattgtctgaatttattacattttagataactgcatgtctagcatccacttattttaaaggagatatgtaaataggcattgtagttaacaatagattttatcatcaaatagaacgtgactctaagaggaaatatacagacaatttatttaggtaaatgaagagggtttctttttaaaatatgaattacgtagactcttgagacataagcactgcctttgaacctgatgtgtcttgtttgtagcttcacgggccaagcaacagtgctagagcataacgacttgttataactggggctcttcagctctcaactgaactgctcttttaaaaacaaggtacatttaagttactccctgacatcaaccacccccttctctctgggagcaacatattgcgcttctattttcagatgcattgaatggcagattgggttttaaggaagaaagaggctaaaagttagtgattcagtggctacttccctataaaaggcatttgcttgtcattttctatagccatgaaggtatgaagtagtgccacacacttaagcctggaagtgcagttattagatattttaaaaatacatattttggtgaatagcataccttgtttttgttttcaaaattggagctgatcttcccccacctcaaaaatccccaaatttcgactaaatttattttgggagattcgtttctaatttctaatacttttatttatgttgaaacttacttaaatttagcttgattgttttaaagtggcttattggaatttgtgaggatttattaatataataagtgtcccatgtcactactaaatgtttagtttagggcagttcatc

SEQ ID NO: 2120 - DNA, 1209 bp, Homo sapiens; identical to SEQ ID NO: 2119

SEQ ID NO: 2121 - DNA, 1125 bp, Homo sapiens
cacacacacacacacacacacacacacacacacacacacacacacacacttttaaattgtagagatagggtctaggtatgttatcccaggctggaatgcaagtggtgtgatcatagctaactgcagtgttgaactcccgcgttcaagcagtcctcctgcctcagcatcacaagtagctgggactgcaagtgtgagccaccatgcctgggttttgagttttttatgattgaaaattatttttctctggacattatgttgagaatagaccataggaagcaagtgtagcagggagatgaagttagagggctagcatagtaatccaggtgagagatatgatgatccttatcatagcttggatattgtgagaaatggttggattctggttatattttataggcggagccaaaataatttcctgtcagattggctataggttttggctataggtattggctccaagattttggcctgagtaagtttaaggatgaaactagcatcaactgagatggggagtgctttgcagggtgtgacatcattaagtggggggaagacaaggagcttttttttgaatatgaaacatttgagatgtgaagtagagattatattatacaaatttggacactatgagagaggtttgggctgaagatagaacttttgagagagttattggtatagatggttttttctttttaaaaaaattttttttattattttattttatttttttgagacagagtctcactctgttgcccaggctggagtgaggtggcatgatctcagctcactacaacctccacctcctgggtttaagtgattctcctgcctcaacctcctgggtagctgggattacagatttacacctggctaatttatggatgggttttttttttttttttttttttttggagacagagtcttgctctgttgcccaggccagagtgcagtggtgtgatcttggctcactgcaacctccgcctctcaggtttaggcaattctcctgtctcgacctcccaagtagctgggattataggtgtgcaccaccacacccggcctacagatggttttttaagccatgagactgttagtaggccagatgcggtggctcactcttataatcccaacact

SEQ ID NO: 2122 - DNA, 1211 bp, Homo sapiens
catctcacaccagtcagaatggctattattaaaaagtcacaaaatagcagatgttggcaaggttgcagagaaaagggaatgctttaacactgtcagtgggaatgcaaattagttcagccattgtggaaagcactgtggtgatttcttaaagaacttaaaacagaattactatttgacccaacaatcccattattgggtatataccccaagggatatggatatcaattattctaccataaagacacatatgttaatcacaacactattcacaatagcaaagatacataatcaatctaaatgcccatcaacagtagactgaataaagacaatgtggtacatatacaccatggaacactatgcagccataacaaagaagagatcgtgtcctttgcagcaacatagttgaagctggaggccaatattctaagcaaactaatgcagaagcagaaagctaaatactgcatattctcacttataagtgagaactaaacaatgagaacacgtggatataaagagaggaacagctttgcccagtggcggcattgtagccaatgaggtttacctgaagtacaattattgctaattgaaaacttttcccaatacccctccatgacgacttgaaatatagtcagcactggcaatttttgaccgtctctacagagactgaaaagaaaaaaaaaaaagaggagaacagcagacaccagggcctacttgaggatggagggtaggagaagggagaggattaaaaaaactacctcttcggtgctaaacttattacctgagtgatcaaataatctacacaccaaactcctgtggcacacagtttacctatataacagacctgtacatgtacccctggacctaaaataaaagttaaaaaaaaaaaaagatgccttatcaaaccacttcccatgggtaaatagagcttaattctaataggaaactctgggcgtcagtgtaaaacttgtgcctctgaatgatctcacccaaggggcaaggtagccaagccattaatacaccaattctgatcattgattggggctgccaggacgaggtatgctgaatacaagacacttgtaaagtgaccttccagttaaacagccacgtgggctccggtggcaaaaaacacccccaggaactgaaatgctggtgctatctatcagtctgcagtagtgagtaagagtgtaggtgggggtgcaaagtcatatgct

SEQ ID NO: 2123 - DNA, 1202 bp, Homo sapiens
caaatcatgtggaatagagttaacagagtgcctacagggaaattgaccttaagtgtctacattagaaaagaagaagtgctgaaaatcaattatctaagcatccacttcaaaggggctgaaaatgagaagaaaattaaaattaaaaagtagcagaaaggtgaaaataagtataggatagaaaataatgaaattgagaataaatgtatgatagtgaaattcaacaaaactaacggctgttcaaaaaatgaataaaattgataaaaccttgcaagggaaaataagaaggcaagtcatcaatatcagaaatgaagaaggaagcattgctacaacttctatagagattcaaaaagataatggaaggatatgagggcgatcaggctgtgacgcctgtcaccccactgattgccagggttgatttggctgatctggctggctaagcgggtgtccccttcctccctcaccactccacgggcatccctcccgaagctgcacgcctcgtggaagaaaatgaccatccccgaggaggaccggtctttggtcaaggatataggagtagctgtgctcccgtgatagattcttcagacacggtctcaagcttcatttgtaggagaacgtagggtagtcgagcttccaagacctcagacacatccaaatgaggtgtgacgtgtggcagtctgcttttaaaaaggaaaaaaagaaaaaagataaaggaaatatttattccaattttaaaagttattggcaaaaatataaatacatttagcataaacacagcatgaactgaacatatttatgtcaaaaacttttaaaatgtattgtgatagaggcgagtttaaaaacgcaggctttgcaaaatggcataaataagaaaaaatagaaaaatatgtctattacttctctattgaataattgaatacataattaccaactctgacacataagttctcatgctcaaatgaactcaccgatataaatttcaacagagaaaagtaaaagagggagcatttcccacttaatgtcccaaagtcagtgtaatcttaatgctaaaacctgatgagaattttacaagataggagaattaacagcctgcttctgatatacaaatcttaggtaacatattagcaaaacaaactcactaatataccaaaacattacactcagggaatacaaggacagattataacatttaaaaatgtttttat

SEQ ID NO: 2124 - DNA, 1234 bp, Homo sapiens
cgcgcgttaccgggaggccaggcccggcgctgcaccctccgcggcccggggcctgaggccgggctcccgcgacttcccggcccaaagcagcgcagcgcccgggcggcccagccccgcagcggccacagcagcatagccgggcgagcggatccagaggcccggggttccttcttgtgcgagtcggcgcggacgactgctagtccagccgttgggcgccgcctggatcccggcgcctggcccttaaagagacccggtcgcatttcatctcagcaagaggagaaatactcgaagggagaggttcgccgctggcagccagaagccttaccactgctaggacgctggcagaacgcacccataacttggcaacactcggaggatggatggcaaataataccagcgactgaagggttaattaatgattgcagattaattgaacaccttctgtaatcagacacctggcacacactcatgatgtcacttattcctcccaacaaccctgcaaatagataactgtctctcccattctccgagcttgtcctcagagaattaggtaacttgttcaaaatggtcagaagcaacagatataactccttgctctactctttccccccttctcactactgcacttgactagtctttttaaaacataaattttttggccaggcacggtggctcacgcctgtaatcccagcactttgggaggccaaggaaggcagatcacctgaggccagaagttcgagaccagccttggccaacatggcgaaaccccatcgctactaaaaatgcaaaaattagctgggtgtggtggggggcacccgtattcccagctactcaggaggctgaggcaggaaaatcgcttgaacctgggaggcagagattgcagtgagccgagatcactgcactgcactccagcctgagcaacagagggacacttcgttccccccgccaaaaaaaaaatttttttttaatgatcagaagcggctgggcgcggtggctcgggcctgtaatcccagcactttcggaggccgaggaaggtagatcacttgaggtcatgagttcaagaccagcctgaccaacatggccaaaaactgtctctactaaaaatacaaaaattagccgggcgtggtagcgcacgcctgtaatcccagctactcaggaggctcaggcacgagaatcgcttgagtctgggaggcggaggttgcagtgagctgagatcgtggccactgcaatccag

SEQ ID NO: 2125 - DNA, 1234 bp, Homo sapiens; identical to SEQ ID NO: 2124

SEQ ID NO: 2126 - DNA, 1133 bp, Homo sapiens
ccctggcaggaaggctcacgcctgtgggcagccagggaatgtgtctgacctccaccctatgtcgggtgcttctgggacagcttcgtgactcagttgaaaacattctgactctcttcaagtttgcagttacatctgtggttcttggaagctgtcctagtgagtcagccttgggttaagcctgaggagaccaagctccaacacctttgtgcactcatgtacgtgaattcttgcttgcagtgaatgagacctgaacaaccctagtgggtgccatgtcctgcgtgtggcccaggcgtaccttttcttgtagattcacatgagaaacccgtcacctatccatgtgctctgagaggtggactgaggtctaatccctttctgtgccagattttctgtgggttggtcttagcacctaggagatgaatagagcatggagacacctgaacaatttagtgattctgcaaggcagtgatgatttaagggttcctattgtctcatctgtgttcaaaacaaaacagtcatgaagtctttgtgccactgcctgactgtcatcttctccagatcttgtttacagagtaataatgacgttaaacaggtatcagaaaggggaaaaagtttctaggccaagagctgctggtggattctcttgagcagaataacaagttgcttcctgctccagggactgccattagcttgtgaagtctctaggtgccttgttatttcctagtgaagttgcagaatccagggttttttccaggtttgtcttattttatcagcacccacgtccaggcccaacagcttggtaggctggtgaggtccacacacggccaggtctgggagataagggaggaagcagtggcctggaacaccccacctgtctgctatcagcactagacagctcaggctgtcttggaaacgtgtactttgttaactgccttcctgtcctcttgtctttgaaagctgtctcgcgttccacagtcagcttgagggcaagagtgggatgctggggacaggtctttcccgtcctgtgggtgagctcctggcatctggctcaggaacatgtgggtccagcaggtgactctgaagctggcttggctgccatctcagacaggacgcaggcctgacaccctcagctttta

SEQ ID NO: 2127 - DNA, 1099 bp, Homo sapiens
taaagctaaatcttgagtaatgttaatattcattctggttaacaaattttttttttttgagacggagtctcgctctgtcccccaggctggagtgcagtggcgcgatctcgactcactgcaagctccacctcccaggttcacgccgttctcctccctcagtcttccgagtagctgagactacaggcgcccaccaccacgcctggctaattttttgtatttttagtagagatgggatttcaccgtgttagccaggatggtctcgatctcctgaccttgtgatccacccgcttcagcctcccaaagtgctgagattacaggcatgagccaccacgcccagcctaaaaaatcttacaaaaccatgttagtcaacttagtgaaatgacttttagcttagtgattaaccactcttgtacaggattatagatgtgggtggttagagtgagtctgaacttgatccaggatatccctgcctgctacccagagttttttggtcatttgcctaatcaaaaaagtagagtacaagtaatgtcatttgagaactctggatgatgatggttttgctctgttttaagtaatattctgttgagtcttaaacactaggagaagcagaattggctgggagcagtggctcacgcctgtaatctcagcactttgggaggtcaaggcaggaggattgcttgagaccaggagttcaagaccagcctgggcaacatgtcaagaccctgtctctacaaaatatttttttaaaaaattagctgggcatggtagcacatgcctgtagtcccacctacttgggaggctgaggcaggaagattgcttaagcctaggagttcaaggctgcagtgagctatgatcaggccactatgctacaaactgggcaacagagcaaaagcctgtctctaaaaagaaaaaagaagggaaacagagttgtcatacttatgcatgaaatttggatagttttacagtatgtttgcctgttccataaattgggggattatattgtgaccaagttttttctaattcaagttaaatgctttgtttttaaaaagaaccgagctgaagctgccatggaattcttacaagaattaaatagcgatgt

SEQ ID NO: 2128 - DNA, 1225 bp, Homo sapiens
gggtgatacagcgagactccgtctcaaaaaaaaaaaaaaaaagattttatagttttaggtctgtttcacttgcagctaatttttgtgtatgggttgaggtaggggtccaactttattattattgttattattatcttttatgcatatggatgggcagttgtcccagcaccatttttaataaggactattctttgtccattgaatcatcttggattgcttatcaaaattcaattgatcataagtgtaggggttttattctgtactctcaattctattccacttatctttatatttatccttatgctggtagcacactgtcttgatctagctttgaaataagttttaaaagtgtgggatgtgagggtgatctggctgtgacatctgtcactccattgattgccagggttgatttggctgatctggctgtctaggcgggtgtccccttcttccctcaacgctccacgtgcgtccctcctgaagctgcgtgctcagtcaaagaggacgaccatccccaataaaggaggaccagtcttcagtcaagggtatacaagtatctgctcttcctagctagaacctccaaacaagttcttaagatccgttgtaggagaacgtagggtagtcaagcttccaagacttcagacacatcctaatgaggcgctgcatgtggcagtctgcctttaaaaaaaaaaagtgggaaatgtgacttcttaaacgttctccttttttcaagactgttttagctattctggatcccttgtattttcatatgaattttagcatcagtttttcaatttttgcaaaaagtcaggattttcacagagattgtgttgaatttgtaaatcaattgggagactattgccatcttaacgatattaaatcttccaatccatgagcatgagatattttttcatttatttaggtcttttaaattttcaacaatgttttgaagtttccagtgcacatgtatttcattcttttgttaaatttattcctaagtatgttatttttgatgctattgtaaatggaattgaattgttttcttaatttcactttcagattgttcattgctgaagtataaaaatacaacatttttaaatattgctctgcatctttcaaccttgttgggctcatttttttgtttgtttttcttttttgagacaggatcttgctctgttaggccagagtacagtggcacaatcatagctcactgcaacctcaaactcct

SEQ ID NO: 2129 - DNA, 1182 bp, Homo sapiens
ctgtgttgtatgcttatcccaaaatggttttatgaaaccactatggataaactcgttttacctttctttttaatttttgttggctttggaggcttcatattaccaaccactttctctgcattaacctctgatagcagaccctcctgctgttcttcctcaaaatcgtagacagacacatctacatctttgccctcctctgtataacgcagtttgctctttttggttttctttgtttttttggctggtggctgatagtctgggtctttttgccaactaggatcttcctggggtggaagttccccttgttctagtgtctccacctctccattggcccccactttaaccacctgaaacccttcaggcaaaggtagggtgtggcatatcatgggttcactttccgcaaggccctctttagacacttcattttcataagccccctgaagttcttctactgaagtggtagcaacaggtacagtcacaggaacaggtacttgaacaagctgaagttctcctatgtttatgggctgttcctccatatttacaacctgtaaagttataatctgggtatcgtccacagcagcctctgcttctggagccactgtgccctccattacttcagtcttcatctgaagaagggtggggtccagctgttccatcatcaccatctgtacactgctgttgacatcctggaccacctcacccccatccgtctggttctggggtaagtggcaggcatcttcttcctggcccccttcccggcgtctctggtaagtctttctctcctttcctttaataaaagtttcggactcctccacaatggcttcgactgcatcaccttccatttcccctgcctttattaagggagaacacagattgttatttaaagcaaagcatgtctaaataaaaatatacattttaaaacaaaaagaccctttggtgaatgaattaggcatcaatggttgttaatattaaaaaagacacaacagacatgtgcctcttgatgaaagaaacaaccactactggccaggtgcagtggctcacgcctgtaatcccagcactttgggaggctgaggcgggcggatcacgaggtcaggagatcgagaacatcctggctaacacggtgaaaccccgtctctactaaaaatacaaaaaaaattagccaggcatggtggcgggcgcctg

SEQ ID NO: 2130 - DNA, 1772 bp, Homo sapiens
gtgatgcagtcgaagccattgtggaggagtccgaaacttttattaaaggaaaggagagaaagacttaccagagacgccgggaagggggccaggaagaagatgcctgccacttaccccagaaccagacggatgggggtgaggtggtccaggatgtcaacagcagtgtacagatggtgatgatggaacagctggaccccacccttcttcagatgaagactgaagtaatggagggcacagtggctccagaagcagaggctgctgtggacgatacccagattataactttacaggttgtaaatatggaggaacagcccataaacataggagaacttcagcttgttcaagtacctgttcctgtgactgtacctgttgctaccacttcagtagaagaacttcagggggcttatgaaaatgaagtgtctaaagagggccttgcggaaagtgaacccatgatatgccacaccctacctttgcctgaagggtttcaggtggttaaagtgggggccaatggagaggtggagacactagaacaaggggaacttccaccccaggaagatcctagttggcaaaaagacccagactatcagccaccagccaaaaaaacaaagaaaaccaaaaagagcaaactgcgttatacagaggagggcaaagatgtagatgtgtctgtctacgattttgaggaagaacagcaggagggtctgctatcagaggttaatgcagagaaagtggttggtaatatgaagcctccaaagccaacaaaaattaaaaagaaaggtaaaacgagtttatccatagtggtttcataaaaccattttgggataagcatacaacacagtgcatatgcaagttgttttatattaaccgtatttgtaaaaggtcgttatgtgggtaccgttctttaaaaccagtctaaaataagttttttccagattgaatgctctttttttaatcccaaagaagaaggaaatgtattagtgacatgagataattatgacttatattgggttttgttattaaaagctaatcaaatatatttgtagaaatttaagattaggattaatcttaacactttgaaactctgcagcaagtaagtgttttattttgcacataggtgtaaagaagacattccagtgtgagctttgcagttacacgtgtccacggcgttcaaatttggatcgtcacatgaaaagccacactgatgagagaccacacaagtgccatctctgtggcagggcattcagaacagtcaccctcctgaggaatcaccttaacacacacacaggtgctggataagaatgttgggggctacaacagcaaatgctcagacttcgctttttagtattcattcaagctgactccagcgggaatttaaaggaagtttttattatttcttatgatgccctttttgtaatcatgattttattgtaagcacttggacttagttattatagacaaatgtaaagaaaatttaatgaaaaataacaccctctctcttaaaaaaaagaagtctcaggcaatagatgcctggtactatgaggaagaatgttagaaatagaagtgaaatcccagtgaaaccctgtctctactaaaaatacaaaaaattagctgggtgtggtggtgggcgcctgtagtcccagctactcgggaggctgaggcaggagaatggcgtgaacccgggaggtggagcttgcagttagccgagatcccaccactgcactccagcctgggcgacagtgcgagtctccgtctaaaaaaaaagaaaagaaaagaaa

SEQ ID NO: 2131 - DNA, 1202 bp, Homo sapiens
atcacctgaggtcaggaattcaagaccagcctgaccaatatggtgaaaccccatctctactaaaaatacaaaaatcagccaggtgtggtggcgtatgcctgtagtcacagctactcaggaggctgagacaggagaattaaacccaggttgcagaggttgcagtgagctgagatcgtgccgctgcattccagcctgggcgacagagtgagactctgtctcaaaaaaaaaaaaagaaggaaaaaaaaattacctgggcatggtggtgcgtgcctgtagtcccggccactcaggaggctgagccacgagaattgcttgaatctgggaggcagagattgcagtgagccgagatcgcgccactgcactccagcctgggcaatagagtgagactgtctcaaaaaaaaaaaaagaaagaaagtgtatatatatatatatatatatttataaaacaagacttcaaataatatataattgttttctttcatcttccaccacccttctccttgccccaccacctgtgcttcctgatttcatgaaaagaaaatgctgaaccagatctggacgacaatgaggatgaggaggagcctgccgtagaaattgaacctgagccagagcctcagcctgtgaccccagccccaccacccgccaagaagcggagaggacgaccccctggcagaaccaaccagcccaaacagaaccagcgtaagttgttcatctctgctctggaggctggcgtcttctccgagcatgtgggggagccagatgggtccttgttctttggggatgtgggaactaagccatgagaacaagttaagggcatgtcgagaacaaactctcaggaaatggctttttaggagtttttactgaggaacatctgaggaagtctttagaggcctgttacatttcaagaagaagtccagagtagaagggtacttgtgttctgcaagatgggtactgttaatgtgggcgggttttgaaaaacaaccaaagtcacagtcagctggcagaatggatgcggtaatgaatataaaagagccaaatcgtaaaggttggagagggaaagcagtttctgcactgagattgccccttctaagaaactcagggtcaggcggtggctcatgcctgtgatcccagcactttggggggccaaggcgggaggatcacctgaggtcagtagttccataccagcctggtcaacatggtga

SEQ ID NO: 2132 - DNA, 1682 bp, Homo sapiens
gttattatttactttctcatctagtaatttatacatctgagttttctaatttcttgttttgttgggtttttttttttttgccttcctccccgtagatcttgagccagatgattgtgcatccatttacatctttaatgtagatccacctccatctactttaaccacaccactttgcttaccacatcatggattaccgtctcactcttctgttttgtcaccatcgtttcagctccaaagtcacaaaaactatgaaggaacttgtgagattcctgaatctaaatatagcccattaggtggtcccaaaccctttgagtgcccaagtattcaaattacatctatctctcctaactgtcatcaagaattagatgcacatgaagatgacctacagataaatgacccagaacgggaatttttggaaaggccttctagagatcatctctatcttcctcttgagccatcctaccgggagtcttctcttagtcctagtcctgccagcagcatctcttctaggagttggttctctgatgcatcttcttgtgaatcgctttcacatatttatgatgatgtggactcagagttgaatgaagctgcagcccgatttacccttggatcccctctgacttctcctggtggctctccagggggctgccctggagaagaaacttggcatcaacagtatggacttggacactcattatcacccaggcaatctccttgccactctcctagatccagtgtcactgatgagaattggctgagccccaggccagcctcaggaccctcatcaaggcccacatccccctgtgggaaacggaggcactccagtgctgaagtttgttatgctgggtccctttcaccccatcactcacctgttccttcacctggtcactcccccaggggaagtgtgacagaagatacgtggctcaatgcttctgtccatggtgggtcaggccttggccctgcagtttttccatttcagtactgtgtagagactgacatccctctcaaaacaaggaaaacttctgaagatcaagctgccatactaccaggaaaattagagctgtgttcagatgaccaagggagtttatcaccagcccgggagacttcaatagatgatggccttggatctcagtatcctttaaagaaagattcatgtggtgatcagtttctttcagttccttcaccctttacctggagcaaaccaaagcctggccacacccctatatttcggtgagttgatggaaatggctgctggtcatttttcatgtttatgggtcattggtggcatataactacattatcagtatataatggttatataatggtttgaccatttctcctcttcctatttttaaaaaaaattttaccaaataacttaatgtttattttcatttgcatcttaaaagtatttttagataggttaaatataattttaaaatatatagctaatgaattgttgataataataaattacatttaaaaatccttgctaggtttggaggcttatgctttgtattcccaacacttgggaggctgaggcaggaggattgcttgagcccaggagtttgagactagcctgggcaacatagcaagatcctgtctctacaaaaaaaaaaaaaaaaaaattaaccaggcatagtgatgtctgcctgtagtcctagctgcttgggaggctgaggtgg

SEQ ID NO: 2133 - DNA, 1215 bp, Homo sapiens
aggttaggagttggctctggaaatgagtgttccgtggagaaatggaggttgttcacaggaaagcctttcccttgaagaggggcaaaggttgcttcttctcaaggggcaggtggaatttaggttttaactttctttgcaagatccaccccaacattcagatttcaagtcaagccgggtatcccagtaggaaataactagggcttcctcccaagaattggggtttgtaagtcctgagggcatgagtcataggttaccagcctcctcttgcctgcaggctctagaacagcactggacatagagaagatgctcagtaatagctctgcctcaccctgtctttcccaggcacttcacagcctcttgagctgccagcagtaggctctgttaacagggactgtttcacattggctctgatgaggggtgatgcccagagtggggttccccagatgccgggacgtggactcctctcagattatttgatgatcgaggggcagttgccccagaaacaaataatttccttagataactgtcttagaagtgattactcttgggaacagaaggaggatactggtaacggaagagacttcttttctctctgcagatgcttgagagaactctggattctgagatgtgtaatcaactaccccattgaaagttttagcattaaaagtctcgcatcccaggaaacccctgagacccaggcaaagcaagaccattgggctaccctatgaggggttgcctgggtggttccagtgtagggacccagttgcccacgttgaggccgaaggagcaggggactagataatagggttggctgctattggctgggaggggttggtggcaacaactcaggggcgatcacgacagtggccaaaggcaagccatttctggggctctgattttgaaaagccctgacatctgccaacaagccctgtcaggactaatctctcggccccaagcagagagaatcctttctggaagccagaaaggggcctcaggggtggtggctagagaggctgaccatgctgacctgagcaacacctcagggtcacaggcagcggaggctgcttcgtggctggagaaatggcagatgtgtctgacactcaggtgaggcccccagaatgtcccagacactgctggggcgttcgcttgcatggggtgctaaacacagcctggtcctgatgggagttggtgtctctggaattgggcacagaggtt

SEQ ID NO: 2134 - DNA, 1154 bp, Homo sapiens
tgagggacgttttccagttagaagaggagctgctgtctacatttgccatctgctgttgcctcttgtcaatgggaacagccaggaccgggggcaggggtagggaggttgaggatgatgcagttcagctgttcccactcaccagggctgtaacttcctttgcagggctggaccccaatggagaacaggtggtgtggcaggcgagcgggtgggcagcccgcatcatccagcacgagatggaccacctgcagggctgcctgtttattgacaaaatggacagcaggacgttcacaaacgtctattggatgaaggtgaatgactaaagctttgctactggggctgaggattccggataccaagacgcaaacactttcactttgagctgggcaaatcttacttggcatcaacttggatggctcgcatatgacaggaaactggattgccaaggcatggcagactgagctggaggaagatgtcagaaatgtttgccctgaaatcagttacggacaaaatgttggctacaacttgaggagaaaaatcacccccaaaggagtggacatttcctaacaattctgtatggaggaaggtggggtaattgcattcgtctgcagtagacacgagttcctcggacctgtataatctcccaaagccaaggtttggtaataatgtagtccccaaatacctgaaagctgtctttaaaaatgcaggtaagcatgtgactggccatttgtgccgagttcttatttttacggagggcttgtggccttagacgccagtttgcttatggaaatgaaagagaatagtccctgttcaaggatgtgtttcatgacagcacgagtgtaaatgagtgcccacacattttaacagccttgggcaggattttgctgctgagatccctagagcagctggttcttggctcattcttggggtagaggccgtggatcagggctgggggcaggggtgacaattgagaagtgcactgagccctttcctgttaacaattgggcatagaaagcaggattagtacttcctggttatacacttattttgtaaaaatagaattaatatcacagcaaccaatgtgtaggtttaagaaagtggccaggtgcagtggttcacgcctgtaatcccagcactttgggagggcggggcgggtg

SEQ ID NO: 2135 - DNA, 1154 bp, Homo sapiens; identical to SEQ ID NO: 2134

SEQ ID NO: 2136 - DNA, 1240 bp, Homo sapiens
ttggctaataggagcaattcagctatttttctatacagtaattggtgtgtggtatagaagaaaaacgggttcaaaccccacttctgccacctaccagctatatggccttgaatgagtcattcagctttaataaggttcattttcttctgtttaaaaagacacaaaacttgaaaatcagctttggccatctacctgagaattagaaagtctgatttttggaattagaaatcatgattgtaggctgggcacagtggctcgcgcctgtaatcccagcactttgggaggccaaggcggacggatcacttgaggttaggagtttgagaccagcctggccaacatggtgaaaccccatctctactaaaaaaaaaaaaaaaattaggtgtggtgacacatggctgtggtcctagttacttgggaggctgaggcaggagaatggcttgaactggggaagcagagcttgcagtgagccaagatggtgccattgcactccagcctgggcgtgacagagtgagactccatctgattgtaaagcatctagtacagtgtacagtgccttggaaatgataggtatggaataaatggtaattatttttatattatatatattatgtattcctgttattaagtgtagagttttatgagtataatttgattttattaccttcttttttacaagctgttttctcagtatttttcttggatgggatgacgctaggctggaaagtttttttcatcactatgattttataaaacaattttttctatgaacctttacttacttgactggattggactaaaagcactgatcagaggccacgacataaaaattcagtccctttgtccttccccgtgcctcccaaagttactttaagatccttagaatatttctttaaatattttatagacaaaaaatttaaagactatctgtattgcaaaattaaactatttctttaatgaatatattgcttattttaagttccaaaggtgaagtctttaagaataaaacattaccaactcctgcttttatatgtaagcaaacttgattgtggcctttttcaactcatcttccttctaaggttttctgttagcctctaagtagactcagtgaaggctaagggactgctatatgatgaacagtattttgatgcatacatttaatacatacttcttcagaactttttcactgttatgattttattgccattttgcttttttagatgtgtgcagcagactaaaacat

SEQ ID NO: 2137 - DNA, 1099 bp, Homo sapiens
ttttctctcatgtcagtggaagagattctcaatttcttttctaaggtactttcaatttcctgacttgattctgtgacatactttttctattttccactctctcttttcattactccctttcatgtgtttgttttcctcacaccagtagtagtcaaactgctgttaactatgatttctgaaaaggtacttctgcatttgatataatttcaaaagggccatggtgcttaaaaagaaattagaaaactaaatgcttatggtagtataatcatgtaacagtgtactagaaaaactactttattggccggtcacggtggctcacgcctgtaatcccagcactttgggaggccaaagtgggcagatcacttcaggtcaggagttcgagaccaggctggccaagatggcaaaaccccggtctctaccaaaaatataaaaaattagccgggtgttgtggcgtgcctgtaatctcaactcctcgagagaggctgaggcaggagaatcccttgagtagttccccacatgcatacatacaatgatcactactcaactagatactctaaggagatcctctatagatctccagcgttctctctgagtgtgtctctcctttccagtactctgcattgagaaccccggccatctgggcttccccagactcctagctctaccacttcaacttaagaagcttaagaagactgctgggtggccaggcgcggtggctcacgcctgtaatcccagcactttgggaggccgaggcgggcggatcacgaggtcaggagatcgagtccatcctggctaacacggtgaaatcctgtctctactaaaaataagtatattgaaaattatctaccaccatgtgaaatagtagttgtcattttagtcaggctgtggtacagtgcaatggcacaatttctgctcactgcaagctctgcctcctgggttcacgccattctcctgcctcagcctcccaagtagctgggactacaggtgcctgccaccacgcccggctaattttttgttatgtaaatataattgttttttcctctaggttgaagaatttaggtaatctggccaggtgtggtggctcacgcctgtaattcca

SEQ ID NO: 2138 - DNA, 1159 bp, Homo sapiens
aatttgaaaataggaactccactaggaatgccggatagaagagtgcttcacatttgtagagggagacaagaactaaatatcacgacgtctttctgagccttttggtttgctaacgtgccccaaattcttattccaaacggtataagataattatgtgtaaatgaataccagctctacttagttttatttcatatttgtgtatctgaatatattaaaatatcttttttttttttttgatgcggagtcttgctctgttgtccagcctggagtgcagtggcatgatctcggctcactgcaacctctgcctcccaggttcaagcgattctcctgcctcagcctcctaagtagctggtattacaggagtgtgccattagcctggctaatttttgtatttttagtagagatggattttcattgtgttggccatgctggtcttgaactcctgacctcaagtgatcctcctgccttggcctcccaaagtactgtgattactatcatgagccaccacacctggcctaaaagatcattgatttagttttgagtaagattttaagtgattaaattatggtattgttgtgtctggaatatctgatattagggttttttttttttttttttacagtttttgatatgctttattttgggtatgtagtttacaaaatataaaggaaatataaggagtgttctcttttttttttaaataaaaagtgtatttttaactgggcatggtggctcactcctgtaaccccagcactgtgggaggctgaggctggtgaatcgcctgagtccaggagtttgagaccagcctgggcaacaaggtgaaaccctgtttctatcaaaaaaaaaaaaaaaaaaaaaaaaggaaaaaaaataagtcaggcatggtggtatgcacctgtagtcccagctacttgaaggctgaggcaggaggatcgcttgtgcctgggaggttgaagctacagtgagctatggtcaagctactgcactccattataggcaaccctatctcaaaaaagcaaagcaaaacaaaacatttttccccttgattatagaggtttgagaaaaatttgagggaagattcagaaaattacctgtaactgaacagaatgccaccagcttgggcttattctgcatgcataattatgaacattttcccagc

SEQ ID NO: 2139 - DNA, 1368 bp, Homo sapiens
gcaaaaagcgcgaggtttgcgcacgaagggaaaggcgaggcccgaggagagacctggcgccgcgcagaatgatgatgtcgcacgctgggtgggaactgacgtcacctgtgctcaccgccgcttccggtccgcgtgaggtgcattctcgcgccggtggcgaggttagggcccgcgttgcgacgtggtgcagcgcatattttcacaagtgggtctcccttgtccgggactatggccaccgactcgtgggccctggcggtggacgagcaggaagcggctgtcaagtcggtcagtagctcagctcctggcgaggaggacgtagcaggggcccaagcgaaacctcccaaaagcacagggagctccccgggttggggaggcccctgggcaacgcgctcctgcagtttgctagggcagtcacttgcccttgatttgctcttagagctaaagagaccaatgtcgagctttttatctccatctgggctggttaaggacttcatcctttggtaaatccgccccactatgcatgctgtcattcctctattgacctcctcggtgacgattataaggaaagccaagtttagattctgattctctttttcattacgcgactgttcttcgcatgtttctgtactactctgtatttaacatttcttagatccatgcttaacgtggttggtagtttgtagctctttgcagaataacagattgacttttggatttaatacctcaatctactgcagatgttggaaggaggcactacaaattgtttcattgatgtgtaaagtaacggtttcatgtacttgttctttcagtaatgaatattcattcaactggaatgtaattacagcatacactgtggctttctgttcttatatctaagacctaaactttaggtttgtttagtgataatggactgtctttttttttgttgtagttgtttctcttttgaggcagagttttgctcttgttgcccaggctggagtgcaatggcgccatctcggctcaccgcaacctccgcctcccgggttcaagcgattctcctgcctcagtctcccgagtagctgggattacaggcatgcgccaccacgcccggctaattttgtattttttgtagagacggggtttctccatgttggtcaggctggtctcgaactcccgacctcaagtgatccgcccacctcggcctcccaaagtgctgggattacagccgtgagtcaccgcgcccagccggtatggggatttttgagagggctattgacagaattagacaaggctggcaaggatttattgaactacagagaacagaatatgttagaagtgatggctaatagaaatatcagtgtagaagttattctgatagccccgagatag

SEQ ID NO: 2140 - DNA, 1159 bp, Homo sapiens
tctgaattaaaaggaacaaaaaactgtctagtccttcattgttctgaaatgggcatgatggaagaaggcgggtctggtaggatagctgtgactgataatggctgagaacgttgggggatatgggaggggcgagatgactcccagataccctcccccacctatacaggaggcacctcattcctggactctgcgctccaagacactgaaatctgagcgggtacaagcattttggttaaaaatcagctcgttgtcgcctcttgagtttcctccaggagaggagttcattggagaggattcctggtagcagctcctcgcagtggctgtcctgtaaccactttggcctctgtcaacatgatgtctccaggtatccatcaggctccgatacatttgggtggccacaggctgggctgtccccacctctcagggaagtgcatctaagtcaggttttcccctctggcacagccctgcctccacagcccaatttccaccatgccacaggcaacccgcatttttatttatttaatttatttatttattgagacagagtcttgttctgttacccaggctggagtgcaatggcccgatgtcggctcatcccaacctccacctcctgggttcaagcgattcttctgcctcaggagagtagggagtagctgggattacaggcatgcaccaccactcccggataattttatatttttagtagagacgggttttctccatgttggtcaggctagtcttgaactccagacctcaggtgatctgcccgcctcggcctcccaaagtgctgggattacaggcgtgagccagtgtgcctggccgattttttttttttgagactgattctcactctcgcccaggctggagtgcagtggtgggatctcggctcattgcaagctccgcctcccgggttcacgccattctcctgcctcagtctcccgagtagctgagactacaggtgaccgccacgatgcccggcagtttttttgtatttttagtagagacggggtttcactgttagccaggatggtctccatctcctgacctcgtgatctccccgcctcagcctcccaaagtgctgggattacaggcgtgagccaccgcgcctggcttttttttttttttttttttgagatggagtcttgctctgtcacccagg

SEQ ID NO: 2141 - DNA, 1186 bp, Homo sapiens
tcattacttgtaacatattaccatacctttcatttacaagggctttttcattctttcaacacatttttattgagcctttgcagtcagtatgtgctaagtcagtctgctggatcttgggacttcagtggtgaaaaattagacgtggtgccgcctttgtgcaagattgagtctggtggtgaatacagataaataaccaaaacaattaccagaaactgtgccaaatgccatgacagcacagagaagaggttccctaaacagggaaaggaaacgaatgtgttacagaaagcttgctggagtctctaagctgagatctgagggctagttagaagttagctaggtgcagttggagtgggagaggaagtttcagttgtaggcaaagggaacagcatttacaaaagcctaaatacaagaaataacatggtccattcaaataattaaaagctcattatgatttaattattaagggactggggtaggagtaggggtggggtgaaagctactgaaggattctaagtagggaaataatctgataggttgacaaccttagaaagattaattgcttacattttggctaatgaaatggaggatattaagactgtaagaggggagactgatgaggacattaagagatactggtagctgctaaggaggtagaatcaatagggctttgggaggagagagaattgaaggattatactcaggtgtctggtttggtctgttgatggtagtattctctaaggtggagaatctaggaggtggagcagggttgggaaggaacttgagtttgtttatgaacatgctgttactttattttatttttattttatttatttacgttcttgagacagaatctcgcactgttgcccaggctagagcacagtggcacgatcttggctcactacaacctccacctcctgggtttaagcagttctcctgcctcagcctcccgagtagctgggattacaggcgcccaccaccatgcctggctaatttttgtagttttagtagagacgggatttcaccgtgttggccaggctggtctcgaactcctgacctcaggtgatctgcctttggtctcccaaagtgctgggattacaggcatgagccaccatgcccagcctgaacacactgtattttaaaaataccggtggaaggtccatgtccagtaggtgatttgatgtattat

SEQ ID NO: 2142 - DNA, 1147 bp, Homo sapiens
tttctactaatatgtaaccagcaatgtctggatttccctttctgatcttctgtcttccctagtctgtacacctctccctttaatagtcatgtcgggaaatcctggctgggatggctgactttgctgctttatgtattgagaaccccctggagtgttcttgctacctatcctcttctcagccagcccctacctctgagcacgccaactcagttactcgtttttttgggtttaggaaatggtggaagcagcaggggaggatgagcgggagctggccgcagagatggcagcagcattcctcaatgaaaacctccctgaatccatctttggagctcccaaggctggcaatgggcagtgggcctctgtgatccgagtgatgaatcccattcaagggaacacactggaccttgtccagctggaacagaatgaggcagcttttaggtaagcagcccaggacagtccagggtttggcaggctggaacaggagctctctgagttttgactaaggccttactcttgcttcttattctgtgtgtagtgtggctgtgtgcaggttttccaacactggtgaagactggtatgtgctggtgggtgtggccaaggacctgatactaaacccccgatctgtggcagggggcttcgtctatacttacaagcttgtgaacaatggggaaaaactggagtttttgcacaaggtaggaatctgccagtggttctcctagattttaagtcccattgaattctctcacttttgcttatgttatggatcaggtcttttggggaccagctccttgattccaatctctctcttaccagcacatggaaaatgctggggccttctagctgcagtgatgttcttgtgcctgtgcattccacaggaaggctttgtgctaaccatccataatggggagatagatgcacattcaattggtctctttcttactgttttaataagcaggcaacaatttgtgaccaaaattcagcagtttaaataattaatattctggctgggcgcagtggctcatgcctgtaatcccagcactttgggaggccgaggcaggcagatcacctgaggtcaggagttcgagaccagcccggccaacatggtgaaagcctgtctctactaaaaatacaaaaatcagccaggcat

SEQ ID NO: 2143 - DNA, 1135 bp, Homo sapiens
cttgatggcacatgcctgtagtcccagctactcgggagtctgaggtgggaggatcacctgagcccaggaagtccaggctatagtgagccatgattgcgcctgccacagcccttcagcctgagcagtagtgagaccctgtctcaaaaaaaaaaaaaaaagtcacttttcactagcatttctttcctgtccctccacaaattacagtcacttggctactaaggcttcactgttgaaataacaccagttaaacagagcacaagctctggacagcagtcgtctggtaccagaacttcttgtcagttacagcattgatccctctactgagtgaatgcagcatgcggaacttgttcaccccaacacccagattcattagcaaaataagctcactggtgtgtttcttaatgataggctcctgtggaagtaggcatttctgggcagagaggtgaggcctgtgtctggctggcatttataatagctgtattacctgcttttcctctatagactcctgtggaagaggtccctgctgctattgccccattccaggggagggtgttgattggtgtggggaagctgttgcgtgtctatgacctgggaaagaagaagttactccgaaaatgtgagaataaggtaagtgtgctggcattggtgctgagatctagctcatgtgtcaagggtgggggcattggtggggtggtgggcattgagttttaaaatcttatctttattaggacttgttgtgttaccccaattccagcttcagaattatgcccttgtttttttgttttttggtttttgagacggagtctcgccctgttgcccaggctggagtgcagtggcgcaatctcggctcactgcaacctccgcctcctgggttcaagcgattctcctgcctcagcctcccaagtagctgggattacagatgcgcgccaccacgcctggcaaattttttgtatctttagtagagacagggttttaccatgttggccaggctagtctcttaactcctgatctcatgatctacccgccttagcctcccaaagtcctgggtttacaggcgtgagccaccgcaccggcccttgagttttgagaggagcaggagtagagggatctcatttcttgacttaccaaacaagaa

SEQ ID NO: 2144 - DNA, 1099 bp, Homo sapiens
gagcagggtcagccatggagcgggggcgcatgtgtgggttcctggggccggagtgctgtcagctcccgagagactccgagagaggcctagaagccacaccgggccttgctggcccagcctttgccttggcccttcaacgccccatagtgttagggtcaacctggcaggcacccaggaggggaaggtgcagccggaagcagggaggaggcaggaagggctgcttccctgtgacctccagtctccctgtgggaaccagcctgccttcctgggagtcctcctggccagggagccagcccagcctctcccgggtctccgagtgctgatctcctcgtcttgggaggggagcagaggctcagagcagtcagactcctcaaaccagggtagaacaagtttgcagagggaagctgggaaaatgaggctttcctcagaatctcccacggtcagtcagggaagtcttgagccaaggggttgaggcctctgggtagaagattctgagggtcagtggatgctttgcaggcctagagtaggatctggtgtgagctctgccatggatttgttgtgtgacctccagcaagcccagtgccctctctgggttcttggttacttggtcagtaaatgcacatttggactaaatgggtgtgtgagacaccccctagccttcaatgccctggacccccagccttactttgcaacgacctaggaagagataccatagataggggcacagaagcagtgggcatgccaggggacttcagaacagctgggggaggggtcagattgcagggtggggcccagaggacggctcacaccctgggaagggagctgaggacagtcccagccctgggaggggcagacagctggcagacagggtcgagttgcggggcaggccttggagctgggaacagctgggagagttttgtacactcctcgcccatccctggttctgtgtgctccaagtgccatcaaggccctggggacctcagctcccccaccccctggcttctgggccactccccagtgactgtctcctcagtaaggcaggagggaacctctaagaaaaagctggcaacaggtgcatgggtgggatggcaagagtgag

SEQ ID NO: 2145 - DNA, 1179 bp, Homo sapiens
caaagtggccaggcctgggctgtgttggggtcaccctacccacagcaatccaggatgctcacaggggttgtttgcattcttgctgtccagctgcaattggacacacacgtggttactgtaggagatgccacagagcgggacaaatgtcctcatgagaaacttattatgctctccaaaaggagctgtccattcagggaaaatcggtagcaggaggctgctcaacacaaggccaaccgcccttctagcgacgtgctgcctcttgctgccacagcaccacaccaacgcttcagcgctttggagtgcaagaagcaggcagatcgcttttagaaattagggaaaagagtatttgagagctactcacctgtttttaaagcctccccatgaagcttccacatctctgtctttctcctgcactgtaaggccctggtcctggcccagaaagtcagagtcacagcctagacacactgaggatggcatccagagtgtcctggcctgtcatcctgtccatggcagaatgagtagttagtacatagggcctgtgtgcccaccaggctaggatgtgatttgatggcgcactctccaatatggcagccagtaaccacagtggctgcttggatttaaattaattcaaattaaataaaatttaaaattccattcctcagtcacactagccacatttcaaatgctcaatagtcacccgtggctagggctacctcactggacagatagaacatcttcatcatcacagaaagttttgttgggtggtgctggtactccagtgccatcatttaaactggcatgagttctttgaagggcccccaaaatccacgtggaggaaaataaaaaatggtatatcaagtactagccagggagcacagctacctgtacatccttccctctgctcattcattcgttcaggaatgtcatcgtgtacctgaatacacaaggcacaccagggttgacatactcaggacctgccaaaatgatccagactgtgctcctgctcttaaaggactgcccatttggttcaggggataaatgtgcacaatggccaggtgtggtggctcacgcctgtaatcccagcactttgggaggccaacgcaggcagattgctcgagcccaggagttttgagaccagtctgggcaacatagtaaaaccctatctccacaaaaaactag

SEQ ID NO: 2146 - DNA, 1185 bp, Homo sapiens
cccgggaggcagaggttgccgtgagctgagattgtgccactgcactctagcctgggcaacagggcaagactccatctcgggaaaaaaaaaaagaaaaggaaatattaaagaggctatggctcctaacttttctaggtgttcttttcctaaagaaagaaaatacaaaacctgccagaaatctcagaatgtccgcaggaaagattgaaacacatcaggttgactgtgtttgtttgtttgcttgttttccagccagtagccctttgcaacacttgaaatgtcatcttctccttttggaccccagttgagggtggcggagggctggggggtgcctcagctgtggccgtgaccatgagcctggtgtctgactctctccttctctccttccctgcagtgggcggtgagatccccctagacatgcggctcgggggcgggcagctggtgtcagaggagctgatgaacctgggcgagagcttcatccagaccaacgacccgtcgctgaagctcttccagtgcgccgtctgcaacaagttcacgacggacaacctggacatgctgggcctgcacatgaacgtggagcgcagcctgtcggaggacgagtggaaggcggtgatgggggactcataccagtgcaagctctgccgctacaacacccagctcaaggccaacttccagctgcactgcaagacagacaagcacgtgcagaagtaccagctggtggcccacatcaaggagggcggcaaggccaacgagtggaggctcaagtgtgtggccatcggcaaccccgtgcacctcaagtgcaacgcctgtgactactacaccaacagcctggagaagctgcggctgcacacggtcaactccaggcacgaggccagcctgaagttgtacaaggtaaggcccagctccttatggctcaggcgctctttctgaaaggagggggttgcgcaccggggagttagggagcactggggaggagtcggacagtctctggcatggcctgcttggctgttggttgggaacctggagttgagaggagagtcggcggtgtccactttgtcaccaggtggaaacgtgacaggttcagtgagtagcttgactagctgaaggttctctttctgggtgcccaattttgggtcaggttttgttgacagcgcctctagggttggttcttttctttcttacatgggc

SEQ ID NO: 2147 - DNA, 1165 bp, Homo sapiens
ggcggccacatgaccatgatgcattctcgtaactcgtgtaagacactcaagtgccccaagtgcaactggcactataagtaccagcagaccctggaggcacacatgaaggagaagcacccggagccggggggctcctgtgtctactgcaaaagcgggcagccccacccccggctggcacgaggcgagagctacacgtgtggttacaagcctttccgctgcgaggtgtgtaactactccacaactaccaaaggcaacctcagtattcatatgcagtctgacaagcatctcaacaacatgcagaacctgcagaatggagggggggagcaggtcttcagccacactgccggggcggcggcggcggcggtggctgcggcggcggcggcagccaatatcagtagctcctgcggggccccctcgccgaccaaaccaaaaaccaaacccacctggcggtgcgaggtgtgtgattatgagaccaacgtggccaggaacctccgcattcacatgaccagtgagaagcacatgcataacatgatgttactgcaacagaacatgacccagatccaacacaaccgccacctgggcctcggcagcctgccctcacccgccgaggccgagctctaccaatactacctggcccagaacatgaacctgcccaacctgaagatggacagtgctgcctcggacgcccagttcatgatgagcggattccagctggatcccgccgggcccatggccgccatgacgcctgctctaggtgaggatgactacgtgtttgtctgttttcatgataggagtttaaccagggagaatggtgaatagggtgagatagtcctgtggattcagttgactctggtcttctcgagtggtttttgtgtaaactggagtgtcttacaatcaagtattctcaagaatcccttgaactgtgtgtgtacatatggaagagtttatgcattcaaaagagatatgcttgtactctggctacgtggggccaggattaaaatgtgagtgtttcctctagttttctgttcccattctctctttctctgtctcttctttcaatttgaaaaatcactataatcacctaaaactttggggtttcatcgaatatttactgaaacttacaggaaactgtagctgaggcaatcatttcaataagaggactagg

SEQ ID NO: 2148 - DNA, 1129 bp, Homo sapiens
atgaaagctccacgcaggccttaccatggaaggctgtgactcgcccgtcgtctcggggaaggacaatgggtgcggtatccctcagcaccagcaatggactgaactcaacagcacccacctccctgacaaacccagtagcatggagcagtccacaggcgagagccacgggcccttggacagcctgagggcccccttcaatgagcgcctcgcggagagcaccgcgtcggccgggcccccctccgagcccgccagcaaggaggtcacctgcaacgaatgttcggcctcctttgccagcctccagacctacatggagcaccactgccccagcgcgcgccccccgccacccctgagagaggagagcgccagcgacaccggtgaggagggggacgaggagagtgacgtggagaacctggccggggagatcgtctaccagccggacggctccgcgtacattgtggagagcctgagccagctgacccagggcgggggcgcctgtgggagtggcagtggcagtgggcctctcccctcgcttttcctgaactctctccctggcgcggggggcaagcaaggggacccttcgtgtgctgcacccgtgtacccgcagatcatcaacactttccacatagcctcatccttcgggaaatggtttgagggcccagaccaggctttcccgaatacctcagccctggcggggctcagccccgtcctgcacagcttccgcgtgtttgacgtgcgacacaaaagcaacaaggattacctgaacagcgacggttctgccaaaagctcctgcgtatccaaagatgttcccaacaatgtggacctgtccaaattcgatggctttgtgctctatggcaagaggaagcccatcctgatgtgtttcttgtgcaaactctcctttgggtacgtccgttcgtttgtgacccacgcggtgcatgaccatcgaatgaccctgagcgaagacgagcggaaaattcttagcaataagaacatctccgctatcatccaagggatcggcaaagacaaggaaccccttgtaagttttctggaaccaaaaaacaaaaactttcaacaccctttagtttccacagctaacctcataggccccggacacagtttttatggtaaattt

SEQ ID NO: 2149 - DNA, 1356 bp, Homo sapiens
gagaccaacctgggcaacacagcaaaaccctgtctctacaagaaatacaaaagctagctgtgcacggtggtaggcgtctgtagtcccagctactcaggaggctgaggtgggaggatcacttcagcccgggaggtagagggtacagtgagttgagattgcaccactgcactccagcttgagagacagagtgagaccctatctcaaaaaaaaaaaaaaaaaaaaaaaagacacagctcttgattacagcatctgaggcctttggtcctaatttttggtgatggagaaagagaggtttcagctggtccctagggtctggagaaggagggtagtgtgaaccccttggtagggtgaacccttcagggacacccctgcttctgtgtgtccagtggttctgtccccctttctccagatggctatactagtttcctcttgatgccgtaagaagttaccacataggccggacatggtggctcatgcctgtaatcccagcactttgggaggccgaggcaggtggatcatgaggtcaggagatcaagacatggtgaaaccccttctctactaaaaatacaaaaattagccgggcatggtggtgcctgcctgtaatcccagctactcaggaggctgaggcagagaatcgcttgaagcagggagtcggaggttgcagtgagttaagatcgcaccactgcactccagcctggtgacagagcgagactgtgtctcaaaaaaaaaaaaaaaaaaaaaaaaaaaagaagaagaaattaccacaaacttgttggtgtaaaacacaaacttaagtttgcattttgatgttttctgtaaggatgtagtatgtttaaactttattaactaatgttcaaaactgcgatgtgtgcatagaatattacgtatgcatgttcatgtctaaagaatggctgttgatgataaaataaaaatcagctttcatttttccaaaaaaaaaaaaaaatgcaaaaaaccgcaaactgattgccttgtagctggagcctagaagtctgaaatcagtttcagtaggctgaagtcagggtgttggcagggctgctttctcgtagcggtttcgaggaggaacccatttccttgcatggtctaggttctggaggcccccacatttctgggttgatggccccttcctcacatcactctgtgtcatgcttctgttacatctccttcttctgcctgactctgtcctctcctttgcccctgttgtaaggacccctgtgattgcatcaggccccctggataatccacgatcatctcctctatccaaagatccttcacttgatcgcatctgcaaagtttcctttgctgtagaaggtaacatatttgtaggttacggatatt

SEQ ID NO: 2150 - DNA, 1118 bp, Homo sapiens
caactctacctattctcacctgcagaatctatggattcttagtcccaagggtccccaaaggttagtcactcacaaaccatctgcagggttttaactatactactaccagtgttatttacttaacatttttcattacattgactcactttttaaaaatcggaataaaggcctggcccagtggctcacgcccataatcccagcactttgagaggccaaggcaggtggatcacttgaggtcaggagttggagactagcctggccaacgtggcgaaaccctgtttttactaaaaatacagaaattagcccagcatggtgccacaggcctgtaatctcagctactcaggaggcttgagggacaagaatcacttgaacccaggaggcggaggtttcaatgaactgatatcgtaccactgcactccaggctgggcgacaaagcaagactccatctcaaaaaataataataataattgaaataaagcttttaaaaaggacactttctcttactaccataaattgaaaaccagtgtcacttgccaaaaataggtaaccacaaatgaaaccaaaacaatgtaattaaattctggctggatgaggctgcctgccagaagctctgtgatccaacccacattctctttgtacaatggagatattggagatattggcagagttaaggatacccaacaccaaggctgggcgcagtagctcacgtctataatcccagcactttgggaggctgaggcggacagatcacaaggtaaagagatcaagagcatcctgcccaacacggtgaaacctcgtctctcctaaaaatacaaaaattagctgggcgtgatggcacgcacctatagtcccagctactcgtaaggctgaggcaggagaatcgcttgaacctgggaggcagaggttgcagtgagctgagattgtgccactgcactccagcctgggcgacagagcgagactccgtctcataaaaaaacaaaaaacaaaaaacaaaaacaaaaaaacaaaaaaaaaataccaaacgcagactttcttcttgatgtaatcagaaagactggagcaaactgaaaggagagtaattttccctttatataatcttgcataccaccttatcccac

SEQ ID NO: 2151 - DNA, 1156 bp, Homo sapiens
ccagccatggagcttcctctctgaggacgaggacagagcttgcccctttgcccctctttcccccttccagccaggactgagcccctctcttccccctcccccaggcagtgctgaggggctgcctctgccatagggcgcagattcaggaggaggacctggtggtcagcagcggggcagagtgcacatggcccctcctcactgcacacaggggtgccgctggtccaggaggacctgtctgggagggccctgtgctggtgcctgccccacctgccagccccaggaggctgggcaggaggggagagctgagagaggagggtgcagaagaggaaggggttgctggggtgggcggagagcctctgaacggcaccctggggctgccttgctggctcacaccggcctcgggcggctgtgagctgagcccctctctgaggcaggcacctacggcaggggcctctgctgcttgttaatttccagataatttggaaagttgtgctgcctcttccagtcctgtttctgacaggcctgaagtggaggcgtagggctggatttagtgggatgcaggccaggacttggagtgcagggaggccccacccccccccatccgtgctgtgtcccttacctggcagctctgcccacacaccttggatactgcccctgcccccgggtctctggggactggccttgggcatgccaaaggggatgaccactggagggatttggcttcaggctatagggcccgcccaccttcccacagtcagagccactactggtaatgacaaacactgccccgcagtggaggatgggaagccctttatggtaacagctccagcttgagtcctgagtgcatgctctgcggtctggggtcacctggggtgcttaccagtaggcacacgcctgggttatgaggtggaaggtgcgagctctgctggccatgggagctgcgtggggcattgcccctctctctgcctccaggtagccgtcgttccgtcctggtcccagggcagcagtgaggaatgactggtgttggggtgtgggctgtccgttctgtgtgtgacagtaggttcacctccgtgctatccacaaaggttccgtgccctcgcctgggttttgtttttgtttttttgagacgtagtttcgctctctcgcccaggctgga

SEQ ID NO: 2152 - DNA, 1090 bp, Homo sapiens
ctcatgacttttttgagtttagaacaaaacagtgcaaccgtagagccttcttcccatgaaattttgcatctgctccaaaactgctttgagttactcagaacttcaacctcccaatgcactgaaggcattccttgtcaaagataccagaatgggttacacatttaacctggcaaacattgaagaactcttaatgttttctttttaataagaatgacgccccactttggggactaaaattgtgctattgccgagaagcagtctaaaatttattttttaaaaagagaaactgccccattatttttggtttgttttatttttattttatattttttggcttttggtcattgtcaaatgtggaatgctctgggtttctagtatataatttaattctagtttttataatctgttagcccagttaaaatgtatgctacagataaaggaatgttatagataaatttgaaagagttaggtctgtttagctgtagattttttaaacgattgatgcactaaattgtttactattgtgatgttaaggggggtagagtttgcaaggggactgtttaaaaaaagtagcttatacagcatgtgcttgcaacttaaatataagttgggtatgtgtagtctttgctataccactgactgtattgaaaaccaaagtattaagaggggaaacgcccctgtttatatctgtaggggtattttacattcaaaaatgtatgtttttttttcttttcaaaattaaagtatttgggactgaattgcactaagatataacctgcaagcatataatacaaaaaaaaattgcaaaactgtttagaacgctaataaaatttatgcagttataaaaatggcattactgcacagttttaagatgatgcagatttttttacagttgtattgtggtgcagaactggattttctgtaacttaaaaaaaaatccacagttttaaaggcaataatcagtaaatgttattttcagggactgacatcctgtctttaaaaagaaatgaaaagtaaatcttaccacaataaatataaaaaaatcttgtcagttacttttcttttacatattttgctgtgcaaaattgtt

SEQ ID NO: 2153 - DNA, 1134 bp, Homo sapiens
actaatgaccctttaaccctcagaataatatacattttaaaataataagccaattctcttaattggtagaatttcatctgaacaaaatgagttgttaatttcgagaatgtggcgaaaatatttgaagtcaggcttattaatataagcaagctgtttctgctttagtgcttatttccgggattgggtctcttgaggcttcctgcttttctcctgaacctgtaggttctctaaatactactgataacttgctgaatatcttaaatcattgaattagaaagctttgtctcaagtttaataatttgcctgaggtcacacagctggttaatggttaacatacttctctgataaaggtcactagaggttcttatgaagatacttttaggtggcgtaacaaatgtgtttatgcatattcaagacactcttgtatccacaggttgcactgctgtgatccatcctcatctcctaaagatgcatcctgacttatctccacacttgcacactgaagaatgcaacgtcttgattaacttgcttaaggaatgtcacaaaaatgtaagagttcagaaaaacgactgtacagccaaaatgaaacttagttataacccactgatgtaaaatgttatctccgttgatagaaggaaacgataatgtcttagtaaggagtctgagtttagtcaagattagcagttgatatgtgcgatttttttcttttttttacacaaactacctccttttatgattagtaaaaatcagacatggtagtttgttagggaacgtctgaactggtatgtaacagttggaatccatgttcttacaataaaatgctttctctttcctaattatagggcactagaacagttatattcagcgctgacacttctgattataatggaattattctaaaagtatctgctctttgatggctaccattctgtgtttaatggtaatagaaacgtgttatataattagacattaactagatttatgattggcttaatctgatgtgtttagttgttagtggaatggaagtaaaattacatggttaaaaccaaaatagaaaaggagcccatccatatttggaatacattaaatcaagctgacatttttatagctgttgaatatttagcttttccttat

SEQ ID NO: 2154 - DNA, 1184 bp, Homo sapiens
ctgtccccaacggagactctgtcacccctgggctccccctgccatcgtgtgcttcacgtggccccatgcatgcccgcctctctgcatggtctcttgggaaaagagagatgtgtcgcctccgccagtccgactgccctccccaccccacccccgccaccccccacatgtgaccactgcaacgaagacactccttctgtccccacctgctccgaagacaaaccaacctccgtttcttttataaacagtcggctttttcttaataagccctcactgtacagaacagcccgttgatggtttatttggggtccccctctccccccagcccttttttctgttggtttagcacaaatacttccctcctccggcacctccaaacctaccccacagtcagtgtacttgttttatatatatttaatcttattcaatggaaaccatgcttttgtcgttttatactttgctaggtagactttattacccccccactatgccctcatttttttaaaaaaggaaaaaaaaaagaaactgggttccagtcttaattcattttccgtgccaggttttatttcgtgtgtgtgtgagtgtgttctgttttgtgttttgttttttgttgttgtttttagttgtttggttttcttttctttcccccctccggtcccatacttcacagcactctggtgcgggaagaagcagaagcaaaaaaaataaaaataaaaaaataaataaaaataaaaaaaataaaaaaggaaaaaaaaaaaagaagaaacaagacatgccacctttcccctcgcactgttgcttttcctgatggttaatactactgtcacgtagctgtgtacaaagagatgtgaaatactttcaggcaaaaataaactgtaagtgactcatcaatgtctggcctttgtgtggtttctcggcgcccagcgggagaaggtccaaggagggggcgaagcccaggcgggaaatctgaggctcaagacagtgccgggatgccctcgccaccttctgtgcgcacttcctgaggaccagggctcagcatcctggctgctgttggccactggggccggagctgtcttcgttgcaggggggctgttgtgttcattgccagacattgaacagcatccttggcttctacccagcagtagcaccccttccccatttatgacaaccagagtgtctccagatgt

SEQ ID NO: 2155 - DNA, 1317 bp, Homo sapiens
tgtgtttattgattcagctcaatccagaggaaaattttaaaggcttacagccttaggattataggatactatataatacttttggtacagagatagaattaaataacataaaaatcaaaaatttattaggctaaaattttgagggagaagtggtatgaaaatacaaattcaaggagtaaaaggaaaagtggggcattccttgctactaaaaattgccttgttccaggtaagactgatcataaaaaaatggccctgttcataaaatttttaaaaagatcatagtatctatcaaataacttatattaagaacctcctgggctaaatttaaaaagtaatacaacagttttatttaaacatgtagtgtctacggtatgccagcactttgcagctatttataatgagaaattttagatgtcaatatagcaatgtgcaagaagatagagattttcaaaattcacttaagagtatctgagcataaaatgttaagattgctgatcggatgtgagggcgatctggctgcgacatctgtcaccccattgatcgccagggttgattcggctgatctggctggctaggtgggtgtccccttcctacctcaccgctccatgtgcgtccctcccgaagctgcgcgctccgtcgaagaggacgaccaaccccgatagaggaggaccggtcttcggtcaagggtatacgagtagctgcgctcccctgctggaacctccaaacaagctctcaagattgctgatctagggccactaagtgatgaattgtatttggaagcaaaaaggatggctaaaaaggacctcaacccttttgactttaaaaggaaaatagcttaaccttcaacctgtgtgacatttaactttttgaacccaaccgtaaaagctatcttctaaccaacaaaaagttaataattagatttggaattatacagaattagaaaattggcatttaaaaatactcaataatttgtccctggtttttaattttcaaaatattttctttttgaagagccagattccagtgatcctgcctctcagaaatttccacatttcttatttttcattaggccttaagaagctgcatttgtaaacttgtgtttcattattaaagcttaatttattttttatataaatagtatgtgctttgtgtacatagagaattaagtgaatgagtcacacagatgttggctgttgttaatgtgaaaattaaacagctgtatcacattttgaaaaataaaagtttcatctgaatgaatatagcaatctgcccagaactttttttaaaaactgctattcaccttttatattcccaaat

SEQ ID NO: 2156 - DNA, 1175 bp, Homo sapiens
aatagctgctaccgaatctgcagataagttgtgtagagagagcaccttacaggagctgctacctccattcacgggtacggccagcccaaggtcatcctagcaagggagccaggtacctggcagcaaaggagcccttccgtgcattacgttcaagtcagcctcccaggccagagaaacaggtgaagacgggaagtaggtctggaggggtgaatggatgacatgtccttggtatacgtgttgtattgagttgttgtttttaacactctaaatagggagatcatggaatggattggttgattaagcacatgggctctgaagtcaggcagacctgggtttgatgcccagctccgccagttgtttacttgtcaccttgggtgagttacttaacctgttttgtgtcatttgtgtattgggtatgatgatagtacctgtccagtacattccgagaagtagatgaggtaatatatgtaaaacagtcaccataacaccaggcataaagcacagtgattgtcaccattgtgtgtatttccttatatctgaatatatgaagtacacccattcctttctactcacttatgtttgtgtatccttttttgctagtgttgtcttaactattctgtgaatttggagattgcatgtgtctgtgctctgaaagtctcgactttcccatttttaatgtcagccgtatcagtctgtaattcagtgaagataattagggctattcagtgttaacactgcctcacaggggacacttttagccagtggctagaccatgtaggggaatgatgatctagctgctgtgcctcaacttggaacaactgaagggcattcctgactccagagctctcatatgtggctgaggccttagtgtagccacattgcccattatcttctccctctgcccaatccttctttctctgttttcctagaagggcatctgctgaacaacactgcctgctaagttttctgcatatatgtctgtctcagagtctgtttccagggaacccgatatagtgtgaattcctaggagtgaaatttaccagatgaaagattttgctatctattgccttattgtttttttccccaaggatatggtccagaaagagtgtgcaagtataggcagtttaattcctcctttgccgtagcaagttgtttaagaagtatttttggctatt

SEQ ID NO: 2157 - DNA, 1099 bp, Homo sapiens
tcacatcccagctcttctctttaccggctctgtcttctggggcaaatggcagtgtgcctcagtttcttcagcagtaaaatgacaatgccagtcatcccagcttcgcaggattgttgtgaggattggatgagttgataagagatgaatgcctgtgcacagcctggcccagggagggcattcatcatgatactgtccttgcgattgtcctcccttcagaatggggcactgcatgtgaccaaggacctgctgtgggagccggcaacccctgggcctctccccatgctgcctcccctcatcggtaagggtctcattcccccgggctcactccacactgctccacctattcttcccactgctcccgctcctgagaccttcctctccctgctaagcctgtgcctgctcaggacccttggatacctccagtcgcccagggcatctggccgcactcctgtgccctccccagccctttccgtaacctccttctcagatccctgggaccctggcctgactgcccgggacctgcttttccgcggagggtgccggtatcggaagcggccccgagtcgtgctggatgtgactgagcaggtgagtgggcccacgggggacagtgctgcgtagcctggagactgtgcttagtgacctggcctcctcttctccccagatcagccggttcctcttggatcatggagacgtagcctttgcgcccctggggaagctgatgctggagaatttcaagctggagggagcgggggtgagtggcccgtgactccaggggtggggactccctgctgtccttcaggggtgaactcgagggtgtgtgagcctgacaaggcctttccatgcagagccgcactaagaagaagacagtggtcagtgtgaagaagctgctccaggacctcggtggacaccagccctgggggcaagtggctgatgagaaaggaggagatggataggcatagctggtggtggggatgtaggaggtgctaggacgcacgtacagctttccgtcatacccacttcccccctgctccatgcagtctgagctgtactttcttataccagacttccaactccaaatcatctcaggggaaagcagatt

SEQ ID NO: 2158 - DNA, 1201 bp, Homo sapiens
taaattagctgtagtttagtttgcatcagaatttccccctttaacgttttgttcccttattcatttacttttgtaagtagtgtaggtctttgcgccaaaaaagggatcagtagttgaataatttttacaaatgtatagcccaaagattttaagagatttggtgtatttagctttgtttagacctttctgttaaaaaaaaagatttgatatttgcttttttctcaacttaaatcctaattaactagcttattagaattggtatgaacaagtaaaaggctcattatgaattaatgtgtaatattccttgtgattttgacatgaagaaagcatctttaggcatagctcacttcctttatttaataagcatcaatcacaattcaaggttgattgaaatgttaattaatggggatggataatatgtaaacttaattgtaatttcgtttgcattcattgtcccagtatttacgttttatacaacagtctaaagcgttatacacatctttagaaaattggagtagcaaaagttggcggaacgtaaatgttagcaacactttgggtttattcttttaaagtatgatttaaatgcttttaagttttagcatggagaaagtagcaaaggaaatagtttgatttctcataattttcttcttctttttttttttttttttgagttggaatttggctcttgttgcccaggctggagtgctgtggttattaacctataaacttttttatttattttgagatggagtttcgctcttttttttttttttttttttttttttttgagacgggagtcttgctctgtcgcccaggctggagtgcagtggcatgatctcggcccactgcaacctctgcctcccgggttcaagcgattctcctgcctcagcctcccaagtagctgggattacaggcgcccaccaccatgcctggctaattttttgtatttttattaaagacgggtttcaccatgttgatcaggctggtctcaaactcctgagctcaggtgatccacccgcctcggcctctcaaagtgctgggattataggcgtgagccactactgcgcctggccgatttctcataattttcattttaaaagaatagtaatgcaaacaagtaatggaatcatgtatgacaggatttagttactggttcctgctccagtcattctgagcgttttaataaatttgttttacttgg

SEQ ID NO: 2159 - DNA, 1357 bp, Homo sapiens
cttagctagaaagataagtacaggcttctgcttttcatatccccaaattaaataataattttatagttgtttcattttccgcaaattgttcagcgtaagtaaaggacgtaatagatttgttgattaggaagagaacttaaggtttttattttcaaagagaaagtgagtaattactggtacttagagtttgtagaactgggttcttaactaatagttttctttctaaacaggacaagaatatcagagaattgagtttggtgtcgatgaagtcattgaacccagtgacactttgccgagaacccccagctacagtatttcaagcacactgaaccctcaggcccctgaatttattctcggttgtacagcttccaaaataacccctgatggtatcactaaagaagcaagctatggctccatcgactgccagtacccaggctctgccctcgctttggatggaagttctaatgtggaggcggaagttttggaaaatgatggtgtctcaggtggtcttggacaaagggagcgtaaaaagaagaaaaagcggccacctggatattacagctatttgaaagatggtggcgatgatagtatctccacagaagccctggtcaatggccatgccaattcagcagtcccgaacagtgtcagtgcagaggatgcagaatttatgggtgacatgcccccgtcagttacgcccaggacttgtaacagcccccagaactccacagactctgtcagtgacattgtgcctgacagtcctttccccggagcactcggcagtgacaccaggactgcagggcagccagaggggggccccggggctgattttggtcagtcctgcttccctgcagaggctggcagagacaccctgtcaaggacagctggggctcagccctgcgttggtaccgatactactgaaaaccttggagttgctaatggacaaatacttgaatcctcgggtgagggcacagctaccaacggggtggagttgcacaccacggaaagcatagacttggacccaaccaaacccgagagtgcatcacctcctgctgacggcacgggctctgcatcaggcacccttcctgtcagccagcccaagtcctgggccagcctctttcatgattctaagccctcttcctcctcgccggtggcctatgtggaaactaagtattcccctcccgccatatctcccctggtttctgaaaagcaggttgaagtcaaagaagggcttgttccggtttcagaggatcctgtagccataaagattgcaggtatagttgaaaagatacaaatctagagtgaagatgggagcagacctcatcaactgggcttatagactgtggtgttacccataaca

SEQ ID NO: 2160 - DNA, 1206 bp, Homo sapiens
ccttgctgggttgcaggttttgctgatactggctgtggggcccttgagtgctcaaggagcatttattgagtgcctcctgtttgcagacactgggctctgtgagccacaggcatgcttacccacaccctccattaggtttggatcccgacaccacccctctgggagttccttagggcctcacttctaggggggtacccagccccctggccaagctgccccttcccatgccagaaagcatgtggggtgccaggagagactggtctcagcttcaggcttgtggttttttttttttgttttttttttttaagggaatgtctttcttgctaagcactttattattgctgacaagccactggcatgcagggcggagtcccacatcttgactccagccaagcatcactgcagcctgggtggagtgtgagaactgcgttcctgtcccactctgccactgccgcgctgtgtcaccttagacaagtcactggcggcgagcctcgcttcagtcatccatacggcgaggcggcaccttcgcagcttctccgcagggctgagggtctggagggggccctggcgtgcaagccctttgcaggtggtgacttgtggcgggaaccacttggagctgtgtggttcccatctggcctggagagaccaggggtggagtgagatcctggggatgggaggtgtgggccagggtgccccatggagcctgacagggtactgggcacccgcgagagaggtatcagtgcctgcccagtgccactccgctgctgcctcttgcagctggaagctgacccgggctcttccccagacttggatgctgcctcttggggcagagcgatttccagcagggctctcttcctgaagtcacacacagctttgagcgcctggatttcaaggcaccagggggctgaaggcttctgtgtcacccccgtgctggcatcacttgaaccatcgcccatcaaatggtttctgactgggggaggactcctgttacaggctgagccatgtccctcaactttgtgtgttgcagccctgacccccagttcctcggaatgtgcctgtgtctgtagatagggtcttcagaaaggtattaataattgggctagaagccgggcgcggtggctcatgcctggaatcccagcattttgggaggccgagaccggcagaacacttgaggtcaggagatcgagaccagcctggccaacatgg

SEQ ID NO: 2161 - DNA, 1226 bp, Homo sapiens
gcgggcgctgtctcccgggcccagctgtgcactgccagctgggcggcggggcgggtgcagggggagggggcacgtccagacatgcagacgcacgagacagacacagacacagtacatacacgcaaacacacagacgaaagcaggcactcggagacacagctcacagacatggcataggcacgggtgcacgcgtaagtcagacacacacacacatacgcagacacatgggcagacccagcacacacacagatacacacacagaaacccgtgacacacacacacacacctgcatagatttttcccaagcacacgatatgcacgtggatacacagacttacaagcacagggccacgtgcagacagacacagaccctgtctgcaccacaaacataccacacacagccacacacacagaagccaaacatcctcgcataggtggatacaagcacagactcacatacacatatgcgatacacatatggatacatacacagagtacccccacaaacacacagacacacacgggcagagacagacagagacaggcacagaccccccccacacaaacacacagacacacacaggggcagagacacacatagacaggcacagaccccccacacacaaacacacagacgcacacggggcagagacacacatagacaggcacagaccccccacacacaaacatacagacgcacacaagggcagagacacacagagacaggcacagacccccccacacacaaacacacacacacacacacaggggcagagacacacagagacaggcacagacccccccacacacaaacacacagacacacacacacaggacacacattccaaatgcccatccccaccacagccccgtctccctctttccaggccacggcctcaggggcactgagccctctcagccctctctgccctctctgtctctctggccccctgccatggtggccccaccctggcactggctggggcaggagcctttaccagcagtgggggtggccagggcaggtggcgcgactgtaaccgcccagggccgtccgtttctgacccccacttccctggaaatgcctcgtacgtggggacagcagcttttgccagggaaaggaagcaggtacaggaggagcctgtgccgacctgggccctgggcagagtcccccagggaaacacgtggccgtcagctgccttggtctcccccagaggcgggggttgtgt

SEQ ID NO: 2162 - DNA, 1209 bp, Homo sapiens
cttttacactcaggcccccctggataatcctcactgttacactcagggccccctggataatcctcactgttacactcagggcccccctggataatgctcactgttacactcagggccccccggataatcctcactgttactcttaggccccccggataatcctcactgttgcactcagggtccctctgataatcctcgctgttacactcaggccccccggataatccttactgttacactcaggcccccggataatcctcactgttacactcagggccccccggataatcctcactgttactctcagaccccccggataatcctcactgttgcactcagggtccctctgataatcctcgctgttacactcaggccccccggataatccttactgttacactcaggcccccggataatcctcactgttacactcagggccccccggataatcctcactgttactctcaggccccccggataatcctcactgttgcactcagggtccctctgataatcctcgctgttacactcagggcccccctggataatcctcactgttacactcaggcccccggataatcctcactgttacactcagggccccccggataatcctcactgttacactcagagcccccctggataatcctcactgttactctcaggccacccggataatcctcaccgttgcactcagggtcccccggataatcctcactgttacactcaggccccccggataatcctcaccgttacactcagggcccccctggataatcctcactgttacactcaggccccccggataatcctcactgttacactcagggcccccggataatcctcactgttacactcaggcacaccggataatcctcactgttacactcagggcccccctggataatcctcactgttacactcaggccccccggataatcctcaccgttacactcagggcccccctggataatcctcactgttacactcaggcctcccggataatcctcaccgttacactcagggccccccggataatcctcaccgttacactcaggtcccccctggataatcctcaccgttacactcagggcccccctggataatcctcaccgttacactcaggccccccggataatcctcaccgttacactcagggcccccctggataatcctcactgttacactcagggcccccccggataattc

SEQ ID NO: 2163 - DNA, 1199 bp, Homo sapiens
gggggacgccctttatttgttcacaaacatttctttctgcggtaatgaaaaattaccaagaggggtgattagagaatccaggtccagattgtgtgtgcggggcctgaaagtgaaggcctgctgggcccagcctcacggggtgtaattaccccacggggggctgtcagggggaaggggcggattggtgcttgaaccgggacccagcagaaaattcacctcagctattagcttgtaattacagagcacagagggagcaggcctgaggtctggtgccggggaagagccgggatgaaaggaagcagtaattacgggatccgcgggaggccgggagggcggctggcacgctgattaataagcccctccagcctcgtggggagggggagcgaggaatgggacaccatatttaatggagtagagaggcctcccccctcgtttaaatcctgctgttggagcgtttggacagcaggcagaccggtttggggtctgttctgaagaactaagaacgagatgggttccggaaaatagcagctcgctgggccagccagccttgtccctctccactgggactttgcttccttttcttcttgccttttttttttttttttttttttttttttttttaaagcattgtgctgcttctgaccctattagaaacctagccagagaataggagaaagtattgattcaagaagcggtgctttgttacggggggcggggggtgggggcctcacccgggggcggtggtctttgcttccccagacctttcctgtctgtgaaatggtgggacctgagggttttgcggtgctgtgggctgctgcttcattctccgtttcctgccctctggcttctggcagaagcctctaggttctcagctctgccaggcagactgtctagaccaggtgggttctttctgaaagggtccagggagcagacagttgaggctcacatgaagaaggggtatgtcccctggcccctcagtttgagggtgcccagggccgaggggcctttaggtgtctggctgtggcagctttttttttcctgggggtgggggtcaaggtggcagctgacagtggcaggaagggttgtccagagcagcacgtgatgtaaataagagggtgggggcctcgcagacctggtccacctagacccctggctcgttttcgcctgctgagctgcacatgtcaagagagcttgtacag

SEQ ID NO: 2164 - DNA, 1131 bp, Homo sapiens
tccttgcaggtttctgaagtgctgccattagagaagccatctgaagacttctgtggaataggagatctagcccagctttagaacagccgagaatcatgttcttggtcttttgctttcagagccaagtgacaggcacccgtacggcggccacttgagtttgactagaggagcccttcagctctcacttgctgtgttaccttgtaaagcagaatagcatcctgtatttagagctggctgaaaaaattctagattccatcaatacacctaaagaattgcagttcagaatactcatgacgttctgtggcccaagtgcctgccctctcggcccccggaggcaggacccccaagttccaccaagcaccctgggtgcccaccctcactgaggagttcagtgaaacctctaaggtgggccaggattcagtagcctccaggttctcttctctgcattcccttcattactaagaatacagattcttcttcaaggctggactttctcaaaaagaatcttgttcttgcttccagcagtgcctgtttcccattctgtgtgtgtgtgtgtgtgtgtgtgtgtaagacagagtccctctctgtcacccaggctggagtgcagtggtgtgatctcggctcactgcaacctccgcctcccaggttcaagtgatcctcccacctcagcctcctgagtagctggaattagaggtgcccaccaccacgcctgcctaatttttgtatttttggtagagacagggtttcaccatgttagccaggctggtctcgaacacctgacctcaagtgagccgtccaccttggcctcccaaagtgctgggattccaggcatgagccaccgcacctggtccccattcttaagataacccggcagagctgcgacagcccctgcggtttccactagcagggggagctagtgtggttgggggttagggtgctgctcccaaagcctcctgggggcaaatcccagctctaccactttctagctctgtggccttgggcaagttacctcgtagtgataacacctgcttgcatgggtgttacggagaccacagcgcttttgctaatacttagaatattcgagccatgatgaaaaaagttcttaactggtttgttgttgttgttgttgtt

SEQ ID NO: 2165 - DNA, 1194 bp, Homo sapiens
tgttttggaacagagctctctgggcctgcagagacctcgttttagttcagtgtttcagcattgtgcagtcagtgggtgaatccctcacgggtgctgcgagtcagcgcccatcccccgagcagccccgagctctggcctctgcgtccatcatcaggtgggctcggcctgcgcccttagctaccccttcagagacaggctcagcccacacccccagctgcccctgcagagacaggctggctctgggagtcagcttctggctgatgaacagtggatgtggctcttgcggcacagagcggggtcgcagaatgctgtacgtggcgtgcatttgactcagccctcccccagctcacagtttccctcttgtttctgctcagtttttatggcacaggcctcatcgcgggccacggcttcaccagccctgaacgcacccccggggtcttcatcctcttcgatgaggaccgcttcgggttcgtctggctggagctgaaatccttcagcctgtacagccgggtccaggccaccttccggaacgcagatgcgccgtccccacaggccttcgatgagatgctcaagaacattcagtccctcacctcctgaccggccacatccttgccgccacatcccgggtggctctggggctctgaactctgacctgtgaatagaagcagcatgcactttggaaatccggccttttgaccagaacgcacacctcgtcggggggcccagtccagccaccccccagcactttatgtagagagtgtgacatagacctgcatatttgtcagtgccatgatggaagaagctgagcatgtcttaccaaaaacagagagaacgagcctgaatacagcagatgtaggggacagccgtgggaccgcgtgagaattgaagcggtggggttcccgcaccctgggctggctggtggttttctcgggaagcaggaccctcctgactggtgctcttcctgtgagcggatagagtgatagactgggtcgtgtgtgagacgcatgtgctccaccccactccttttgggggaagccaggcaacagtggcctctgggagggggtcaggaagaggcgaacagctcaggcagcgcaggtgtgatgggcacagtacgcagagcaagctcgggaagttggtaggatctcaggcttggggccgggactctggagtgaatccccatttctctaccggctt

SEQ ID NO: 2166 - DNA, 1105 bp, Homo sapiens
aaagtgtattttgctcagaacttttccagaaattgtttggaaatgcatgttaccatggcagcgctgaatatggtgggccgcatgggcagagatgttcacagcccgtgcagggctcctccagccatcccgggtatcttgctgagatggtgatgcctgggactccctgccgagctcccaaggaggccatgctgcaggtccctggaccacgcccagagcggcctggctctgctgaagtctcacctgagcatcacatgtcaaaacgtaccttgatggatttctgtattccttcctgttacaattagggcaatattaattgtttacaattgtgtgtagaatcgtttctttgctttcatgaggatctaggacgtgttagtaatatttgttttaaggagtgggattggtctgaggggttgagagccactgccttgccagggagctcgctgcccctgctcaggagccttttgaggctcccctctgcctgcagcagaagtcctgaccccttggcctggcccagaggctcattccgcctgcctctgtttacctccttctactcccagtttgaatctcgccttaaagcaaattggttttctctttctgtcatcactgcaaagacctttatatcctcacagaaaatgctgtaattattgggtggcctgcctgatatatatatatatatatatatatatatatttaagagacggggtctcgctctgtcactcaggctggattgcagtggtgttatcttggcccactgcaggctcgacctcctggactcagatgatcttcccacatcagcctcctgagtagtgtgccaccatgcctggctaattattgtattctttgtagagatgggctctcgccatgttgcccaggctggtctctaactcctgagctcaggtaatccgcctgccctggcctcccaaagtgctgggattacaggcatgagccaccagataaaatgttttgtaatctgcaaagtgaaactaaatgatggtatcagcggtgggatttcctcccggagttcactgtagctgataagtcatacctagtggttgtactgcattctggagggctgtggcctggggtgacgcgtccctcagtctga

SEQ ID NO: 2167 - DNA, 1177 bp, Homo sapiens
gcttacgctccacagaaggcagtggggctgaccagggagggaggggaaggcggccacactgggggcagactggaagtgggttgtaatgagtgtctgcgtgcagataggtattcgctttgagatggcaaaaccacattacagaaatgtggggaaaagctactcttcacttcgccaccgtacacagctgttcccatcactttcgatcgtttagttttagtgttttcatttccattttaaacaaaactgtcatcatgttatgcatagaatttgtaattttccagttaatatccgaggcttttttctttttttcttttaagttctggggtacgtgtgcaggatgtgcaggttgttacataggtaaatgtgtgccatgatgtgttgctgcacccatcagcccatcacttaggcgtaagcccggcatgtgtgagctatttatcctgctgctctatcagccttttttcttgttgtggtttttcgaatcacagcgtctaatggctgcagagttgagagcgtgctgaaatctttcctgaccttgactcaggctggtcacccagcccccgcactagcccggcccctcactccttgtgcctggtcttccctctctcccaggctcctcttctcagccttcagagcccgcggagcacatggggtccagggcaggagtagagggagcctcgctgcgtcgctcctgggcccggaggtgccctggcggggggccgccactgcccaggctagccattctgcagagggatgcgccaacatttggagcctagaattggaaatgcctcttttatttgaaaacagctgaataacattcatctgctttttcccattttcctgtccagatatgaaatatgactgagtcacttcctactctcagtccagatgggttttttttccttttacttttttcataaaccctaatattattcagtcctgggacatgaggtacacatggtgtttgtggccagggagaatgctgactacatgtttctgtattcattgacactatatgttgtttaaaaaagtaaaatacatggattagagtgatgtcattgtgggaagttttagaagtactgctttagaaaaacataaaagctatgtatttgctgacagtctgactgaggaagtcaggcaggaacagcgtgtagttccactaagtgaacatcagcagggc

SEQ ID NO: 2168 - DNA, 1196 bp, Homo sapiens
agcattttgcttttgttgctaaagatttggtttgaatgaaagatgctgatcagaaccaatggggatcagatagacaagctcccagcatggagtggctgtcacggccgtgatgaaaacagggccccttcagtgtggaaccgtgggagacgcggaacacaacacagggtggtggattcctgggcggagctctgcctgccccacgggcctgtggtctgctctgtctgccggggcccagtttaccgaactacttggtggccagatagccaccgtagggcgtgagcggccggcacgaaagcccagggcctctgtctcccgggagctgctggcgcggcgcggctgggacacgccgtactcggtgccacgttcttgcccagttcctcgctgtggtgagctgctggctgttaggaagcctttccctcggctgcggccctcccacacggcccccagacccctgactgcagggtgggcgggcgtaccaggggaggcactctggccggcccgcttggcagcagggccacagctcctcctcgcagggctttgtgggattttaaaggatgaatcgtcttgttctccatgctccccctgccgcccatgcgcgccatgctctgtgtgaggatgaattggagggactggccatgagcggtggcttttttcgtgtttggggtcgggagggtgttgggtggaatgaacatcaagggaaccacccattgagcttagaaattcttgccaggcagttggtttgtgtttgtgtttagatgagagcagtgttgattgcagtttgacatctgattttttttttaattgagttggtacaagcaggatgtcattggctaggtgacaaagtcactgggggaccaaataccaagatgcccgttggtgagagagaccctccccaggaccctccccaggcgcctccttctccgtgacgttcaggaccctccccaggcgcctccttccccgtgacgttcaggacccctccccagggccctccccaggcgcctccttccccgtgacgttcaggaccctccccaggcgcctccttccctgtcatgttcaggaccctccccaggcgcctccttccccgtgacgttcaggaccctccccaggcgcctccttccctgtcatgttcaggaccctccccaggcgcctccttccctgtgacattcaagaccctccccagggccctccccaggcgc

SEQ ID NO: 2169 - DNA, 1225 bp, Homo sapiens
ggaggagggtgggagcccaggagggcgggagggccaggtggttatccagggggatggtgaagccaggacatgaaggaagggaaggcggtggccgagcaggcccgagtaggcagaggaccagcgagttctgatccaattgttgaggtccctgatctcaccctctgggcattcaggaccttgggtgctgctgtgagctcagggcagagggaagttggggcgtggaaggtctgggaatcttgtgagagccccaagtgtgcacctggtgtgggccgaccgagtcagagggatcgagaagttaagtaaatggaaagagtgtgtcatgacaccttagtgagcatttatatctcgtggggagccccgcctgtgggccagctaagcaccttctgtgcagtgggcctttccagacccttgcaggaagacggggccggcctggcgggctggggtgcctgggtgaggcctcttcagcgggccccggccctgcagccaggcagctcctggtggctgtcccgaacaggcctcaccgcttctccttggatgtgtccttccaggtcaccttttctataaatttggcatcacagaatccgactggtaccgaatcaagcagagcatcgactccaagtgccgcacggcgtggcggcgcaagcagcggggccagagcctggcggtcaagagcttctcgcggagaacgcccaactcgtcctcctactgcccttcaggtaggcctcgtgctgcaggagaggccgccctcccccgctcggggcagctggcctggtggcaccctcaggggcagccagtgcgtggccagcggctccaccagtggccgggagccgaggccagaggcttgcgcggtgcgcacggagcagtggagccgcaggacctgtgcctggccccgtgcgcccttcacacggacagcctcgggcctgctccaggctcctccgtgagggacagagggcctgttgggcctcccggaagtcttctggatgggggcaaggaggccgaggcctttgcgtggggctgccggccgttgtattctcacgatttgccgggtgactccgggtgaagaagtggggtggattctgaattatgctttatttttgctttgagttcatggccttagttggatttatccacaagataatggaaacagttctctttgagttgcctctcaggcatcgctggggggattgttctccttggagaattttcactaggaatgacaatgtga

SEQ ID NO: 2170 - DNA, 1099 bp, Homo sapiens
tggcatcataacaagagacgaaccagggctgtgggagttaggggccaggaaccagggacaaaaccagtatctctcgtaaacaccacagctcttcagagggtttttcaggtggagtcacgggggagatggctggactcaggcactccaggaatggagagtgctgtggccacacgctcagtgacacgacgccccagccacacggcatccgacgaacaccagacatctctaatgcgtttcagtgtgccagaaggaaaacatgtttcctcctccctctgatttctttacagacaattgttttcttggggatttagattacatacagcataggaaatgtgttgttctaattggagtataatatgatattcttccaattaagaaccctcttcaggaaagagctggtgtgtgggcgtggccggctggtgagcttctcagtcacgttcacagggatgggaatccttgtcctccggtcttattcctgatgtgtcagtgaagattaacagggatagatccagctaaacatagccaagatgctatctagctagctagccagctaatcgatgagacacagtctcgccctgttgctcaggctggagtgcagtggtgtgatcttggcttactgcagcctctgcctcccgggctcaggcaatcctcccacctcagcctccccggtggctgggaccacagctcgggctaccacacccagttgatttttgtatttttttgtagagacaggattttgccatgttgccaggctggtcttgaactcccgggcttaaggagtccacctgcctcggcctcccagggtgctcgggttacaggcatgagccaccatgcccagccgacaagatggttttaaactaatagctgtgcctctttaagacacacacttgttaatggttgtgttgagcatcttgaactgccagcggcctaagtggcgttgcagcccacaggagtctcatccagacctggcggaattaggaccaggcacgagtgagcctgattgtgtaagagcatctgcactcagaaacccatcatttggataagtgtgaggggtgtgtattggctgttttttcattttaattttttgtttttagagaca

SEQ ID NO: 2171 - DNA, 1179 bp, Homo sapiens
ctcagcctcctgggctcaagtgatcctcctgctccagcctcctgagtagctgggaccacaggcatgcaccatcatccccggctaatttttgaatttttttgtagagatggggtctctgtgttgcctggtctggtctcgaactcctgggctcaagtgatccgcctgccttggcctcccaaagtgctgggattacaggcctcagccaccacacccggcctaaagtttgtcacgttagccgcattgaagggcacaggtcagcagcggtaagcatgttcgcattgttgtgcagccatcactgacacccatctctagaacttcttcgttttcccaaaggaaactgcacgcacggcaccacctccctggcctccccacagcctcagggtctggtgaccttcatccccaggacctacgcttctgactccaggagccctgcctggtgtccacaccacactaaggtgccctgccacgggcttcgaacccaaccctggtgcacttgttgagcattggacgttcctggcaggtcagaccgtgagctcctctgctctgacggatgcatggacggctgccacctggctggacaggtgcagaggggaggtgccaccttctctggggacaggactggggcagaactcacccggctgaaaagtgcagctgtggagaacttcagaacttcagaagcctttgctgtgaatgcattttcctcctgcctcttgggccagatcttagggattttttttttttttaatgaaaatgtataatcgtcaaaaaactttagatttaaaagcatggagccgatggctatgcttggtgcgttaatgggaggaagaggggatcttaacttcagggagggctcctgggggagctgggggaggctgctgtgtccagcagggcgggcggtgccccccggagcccggcactccgcgatgtgtgcgctaagccgaggccgccttgagcccgtagcagcgccgagcgcgattctttcgtgtctgcttccgggagggtggaagggtgaagctgttgagagtgggaagggaggggctgtgcttcttgagtttgccgtgtgcccctgaccctttcaggtgcaagcgtcagctccacggtgccaatggggagatgggtctggaggccccaccaggctgtgaaaggcccggcctcctgtgctgtccgtggaggtcgggg

SEQ ID NO: 2172 - DNA, 1155 bp, Homo sapiens
gggacgtaagcacaggcctacctcacatgcagtctgcccttgtctcagatgtgcccagggtcacccatctactccttctccccaggccttcctggcctccctgagccccgccatggtggtgccggaggaccagctgacccgctggcacccgcgcttcaacgtggatgaagtacccgacatcgagccggccgcgctgccccagccacccgccacggagaagctcaccactgctcaggaggtgctggcccgggcccgcaacctgatttcacccagggtgagactgcgaggcttgggcagcccatttctcccgggtgggtgggccagcctgaccccaggcttaagaggtggaagccttggtgatgagcttgacgcctcatctggcttcctccttggctggcggatccagagagttggtggcatttgccctctgtccccagctgcagcctctaagcctggctctgccactagccccatgtggggagttggcctgggcaggcgatgctgcacactgggacactgcattgaccggcacagaccacccagtgtgctgggtgaacttgtgccttgagagataccggggactcctgggcagacagccaggggcacgttgcatcttgtgacctctccagtccaacctgtccctcccgcagatggagaaggccttgagtcaattggccctgcgctctgctgcgcccagcagccccgggtctcccaggccagcactgccggctaccccaccagccaccccgcctgcagcctctcccagtgctctgaagggggtgtcccaggatctgctggagcgggtgagtcgtccccagtgatggcgggtgggcgcctggtgacctgctgcccactaaccaggtcccggtacctgctgcagatccgagccaaggaggcacagaagcagctggcacagatgacgcggtgcccggagcaggagcagcggctgcagcgcttagaacggctgcctgagctggcccgcgtgctgcggagcgtctttgtgtccgaacgcaagcctgcgctcagcatggaggtggcctgtgccaggatggtgggcagctgttgtactatcatgagccctggtacgtgcagggcggggtgaaggggcgtgcagggtggaattgcctggtgctgcagctgcctccccagctttct

SEQ ID NO: 2173 - DNA, 1206 bp, Homo sapiens
aggctagtggggaaaccagacacccaaatcaaacaagcaaaaaccaaggccagtagttgagggtctcaagcacaaaacatactttggctctgacaattttcattgtcatgaagtttgttttgttagacaactatgaagtgttgtgacggtttcaaactaagagcagaaaacaaaactgtttagtacaaaccacagacaataacacagtagctttcccctcacaagttaatgaaagagatgtgctggagagagagaacctgctgaacatgggcacagatcccacagagggggcgtggtgtgtgggaggagactcgacagggtcatggggtcactgctgcccgttgtcgggagataaggctcacagctttatttgataatgttgtctttagcttgtaaatgaacatgcttcccttcccccattgagtgttgagtgttgtgcctgtgggaagcgttatacacacagcctgggacctcagcacagatgcccgttgacaggtgtcccaccggccttccgggttccagcgccaggcctggtgcctgccccaggaggatgagcatttgcattgcctgcaccttatcgtgcccttccacctgctgaagcagctgtgcctgccgctcttgtgaactgcgaacttccccttacctcctctctctggctcgggagctgggtgagtttgaacttggcctcctttgcttttctgtgtgcgaacaagtggttgccttgtttgtttactgaacagagtgtggttgaggcaaaatgctgagatgaaacctaacctaatatgtgtgtattagacggtagcatcattgtcaaaataatacttgttcaaagtccctgaaaaccaaacggacaacttgactacgcttcggccacaggcctgggacgctgtcagaccgagggccgctgagtgcccagtggcagcagagcccagagggtgcttcccccaggaagggaggcagaccagcctattcttactgtgagtcgagcaaagctttgattataaagggccagggatgcaggagcctcgtggagagtgccaccccttcttctcgctctggaatgcgggggctgtgcccctggcctgtgtccgcatcctggggcggtgtcccgtgggcagtgtcctctggctgcagaatgcatgttgcagaattggaccagccctcacgcgtcaggagcgttgggcccacaggcggaggcaccctggc

SEQ ID NO: 2174 - DNA, 1205 bp, Homo sapiens
ggagtgggaggtgggtggtgcgtgtctgcggagtgggaggtggtgcgtgtctgcggagtgggaggtaagtggcgcatgtctgcggagtgggaggtggcgcgtgtctgcggagtgggaggtggcgcgtgtctgcggagtgggaggtaggtggcgcgtgtctgcggagtgggaggtggcgcgtgtctgcggagtgggaggtggcgcgtgtctgcggagtgggaggtagcgcgtgtctgcggagtgagaggtagcgcgtgtgtgtctcctctgctttctccacacacaccagcgatttcctgagcgtccctccggtgcgcaggatgagaaatgggccagagtcagggctgagccacagcccgaccccgggcttctgggtgaaggttctgcggtcggtgaccagcctcacacagccacgccctggggtgcagggagggtgttcattgcccaaataagagatgcgcttctcctggcatatgaaacaaaatcttgagagcttgagaatgtaatttggacatcacgactgaaagcatccctttcttttctaggataaagataaagtttctctaaccaagaccccaaaactggagcgtggcgatggcgggaaggaggtgagggagcgagccagcaagcggaagctgcccttcaccgcgggcgccaatggggagcagaaggactcggacacaggtaccagcccgcggcccctcctgcagtcagccctccacaggcagcccggagcagcccaggcagggcgtccctggcccccgcacctccggctttgcactgggacgcactctagcaccctgcacgccgtccaggcaagaggcagcaggggcggagcacaggcccccacatgccacctcctttgcacccgaggctcaggcccatggggccgattggagagcttcactcttgggtcccacacacgtggagatgcacccggtgcatgtccagccctgggcgaggtatggggctgctcacctgtgggtcttctgacagctggacacgggagggagacagtggttcccctcagggccacaaaggcacaggaagaaactccattgcttgtagtaaaaaccaaagggagccctaaaagtgagcaggaggcagggaggtcttcccaagcacaggcggggtctgaggctgcagagcaggaatgtgtgtgctgtgtgcctgtgccagagtgtgtgcccaagtgtgtatgcctg

SEQ ID NO: 2175 - DNA, 1146 bp, Homo sapiens
caggggatacaggaaggagtggggtgagggctctgtatgtgcacagcctgtgtgaggagagccgagtaaggtgggaacattgtctctgattgacagtgtctctagttggacattgttgcagtgggttcagtgggttcaactctgattggcagagctgggattcagcagcacgtcgttaaagccagaggcaggtgagagtgcccctgcagtggctgaagacaacattgagggaggaggtggaggaaggagatgtagcaagtgaaacaaaatggaaacaaagttcacaagagaaaccgggaatggtggggtggaagcctgggaagagagtggtttgtaggttcagtgctactgcgagaccatgctagatgagtgccagttatgttccatgtttctcacaagaaacacagaggtggcatctgttaagggctgtcgtgggggttgaatgaggcgatgcgtggagagcacagagtgggtgtgcctgggtgtgtgatcatcatggtgtggccagtggtggtgatgggaggggcagccactcaccagctcgctctctctccagcccgtgcagcctgccaggactcttccagacacgggatttgtcggtgaacaacgcagagctgatgcagacatgtgggtaaagatgttgtccatccagtcgcacgcaccggccagcttgctcttatttatcttctgtactttgcctttgctgcttgagagttctgtaaacaattcttaataaacaaagaggcaggttttatgtggaaactcctgggagaggagaggatttcactgaatgcaaacaggaggaaggagcagatgttaaccctaggcttctggaagcagggttgagtcagcagcgccttggtcttaggaagaggccgggatggataggttgagcctggagtggccgtttctgtttctccgcctgcgcacccacttcccaggctcacaggggtttcctttgtgatgcaggaggaagcacagtgggaagaggagagcacaggcagggctgacgaacatgatgattctcagacagaaactgcgtaaggtcatatgtgaggagcaaactcccttttgtcttaagaaagaaacaattcattttggtgatgtttcttttgttacagtggccggccatcaggttgcattaat

SEQ ID NO: 2176 - DNA, 7121 bp, Homo sapiens
agaagaaatccagctttcaggcagccgaagagcgtctcgagagcttgtagtgttagtattccacagccccacagttgattcggatttcaaggaatttttagactttgtggattttttcttcactataattgtatgtttggctcctaatttatttaaattacatacatagatatttttgttactttgagaatagtctatctgaaatttgaagttctttagagcttaatatattaaatatgctaacactcaaaacattttctttctttttttttttttttgagatggagtttccctcttgttgcccaggcatgatcttggctcaccgcaacctccgcctcccgggttcaggcgattctcctacctcatcttcccgagtagctgggattacaggcacgcgccaccactcctggctaattttgtatttttcgtagagacggggtttctccgtgttggtcaggctggtctcaaactcccgacctcaggtgatctgcctgccttggcctcccaaagggctgggattacaggcgtgagccaccatgcccggcctaaacattttctcacaggcatttttcccctgacacatgcgagaggtatctttgaattgtatcctttatcttttagtgtgaaactcagaaaagtgatgcacgcttgcacttacagttcaggtaaaatgttaagcatattcaatgagatttacattcatgcttgatttttctttggcaaagtctttagatctgattctgctaaacttgggttctcaccagatgactggcttttaaaagaagatgatgttgaaactgactcttgtaaaaaaggacatttagtagaagctaatggtacggtgaagttttagagagttgaggagaaaatctgtcttagaacttaatctgtgccttttccttaatagctttcttctaagcccataaatatattggttcagggggatgagtgaaggcaaatggagggtgtggaagggagacagagaacagctcttgggcgttggagaagtgctgggacttgtgtcagtgctgcccgtgttggttttccagcgctgctgtaactaaccaccataaccttagatttattgttttatagttctgttgattagaagcctaacatgatctgcctgggctaaaatctgggtaggtagggctggttccttctggaggctccaggggagaatctgtgttcttgtcttttccgtgttccagaggctgcctgcattcggcctgtagtgctttcctcagtcttcaaagccagcctcatggcatctctctgactcctgctgcccacccgcttttttggagagtctcggctctgttgcccaggctggagtgcagtggcacaatcaaggctcactgcagcgtcgacctcctgggctcaatcaatcctcccgcctcagccccccagcagtgctggaattacaggcatggagccactgtgcctggcccttgtttcacttttggatccttgtggttacaaattgggcccacccgagcactgcgaggtcatctccctctctgctgattagtaacctcagttcccttttccacgtaacctaaggcattcacaggttccaggggtgagcaagctggaggtttttccagtaatgttcccttgctgtcctcagatgccatccgggatcccacattgcatttagttgtcatgtctccttaatctcgtctgcaaccatttctcagcgtttccctgtttttcatgaccttggcagttttgatgagggcagtcatctttttttatgtctttgtgactgaccgttcacacattggcatgtttgtaaagcacggtgtggctgacgtgtggctcacctgactgcttttccaaatggggtgcagtgtgctctacagtgggagaacagctttgtgtcttcttttagctggaaggagctacatgttttatagaagggacttctgaaactagacaaactctgctttttctgatgtttcactgatttccttcacagatgttcattggctgctcactgggtgcagtgctgtggcctcctgttctgagatctgggagaaagatgcatttagttgactaaagcttgcattaaatattggttcttatgaaaagagagatcatagatcagaggagggaaaggctctgtgacctgggagatttaagggaagaagtgctattttttttttttttaactgtaagctatgtttctgttttaaaaaaagaatcagtagaatgtcactgcagaaatcagagtaagggcatcttcgacttcgggaaggctggggacaaaggctgggaaggccgcatgtaacgtgagaatgtcagccagacgtgtctgaacacgaaagcccatccaagaagatggaagatgacagcagattaacctggaagcatgactggagttgggttgtgtagggtttgcaatgatagacctgaatttcatttgcttacttgttttgaggcagaagatgatgtgtcagagtttgcaggcggtggatgcctagatgaaagcactggctttgcaacaccatggtgcctaaatggttctttttttgagacaaggtcttgctctgtcactcagggtggagtgcagtggcgtgaccatatctcactgcatccttgagcttctgggctcaagtgagcctcctgcgtcaacgtcatgagtggctagaactacagacgtgcgctaatttttaaaaattctttgtagaaatggggtttcgctatgtttcttaggctgatgttgaactcctggcctcaagtagtcctcctgcctcagcctcccaaagtgctgggatgacaggcacaagacatcacatgcagccttaagaagatccctacaagagaacctggagaaacttgaaatagggaaggggactcgaaagcacactgtgtaggtgaattgtgaagacttcatggtgttaactggtattcattaaaaagacttggaaaaagagaagatgaattgattcccagtggagggaatggggcaaacattagttaggagagtggctttgtgaaacgatagagcaaaggagacagaaaagaaagcaggaatggggaacggggtggtggggcagaagctgggtgctgtttattttgtgcctactgtgtgtcactctccattctctgccctggggacatttgacagatgtggacgtcactggtgtgatttgcccacattctggagggagaagtgggcatctcagttgaggaaaggaaatggctatctggggaattcttgaggggcacagcccaggacggagccttgtgttagatgggtacctgctggctctgctcagctcggcagatgtgttgcctaaatgactttaatggccaaggcagactggtatttgccctcagatattttgtcaggacagtgtaaaatgtgggccaagatagtggttttgggtccaaacagaagggggttagagattttggaggttgaagcctgctgctagaaggagtatagaaagaagaacggggattctgtttgcccaaatacatggttaggctcatcttggacttgtttttgttttatatcttctgttacttctatgcacatattaatagatacctaattaatatttggttggaaatcttaaaagttaggattttttttttctttttttttgagatggagtctcactctgtcgcccaggctggagtgcagtggtgtgatctcggctcactgcaacctccgcctcctgggttcacgcgattctcctgcctcagcctcccgagtagctgggactacaggcacccaccaccaggctcggctaatttttttgtatttttaatagagtcagggtttcgccatgttagccagaatggtctcaatctcctgaccttgtgatccacccgccttggcctctcaaagtgctgggattacaggcgtcagccatcacgcctggcctaaaagttaggatttttaaaaaggcttgtggtctgagaaggaaggcaataatacttggcaggaaagacttaattttttttttttgagactgagtcttgctctgttgcccaggctggagtgcaatgacacgatctcagctcactgcaacctctgcctctcgggttcaagcatttctcctgcctcagcctcccgagtagctgggattagaggtgtgtgccatcacgcccggctagtttttttttttttttttttgagatggagtctcgctctgtcacccaggctggagtgcagtggcacaatctcggctcactgcaagctccgactcccaggttcatgccattctcctgcctcagcctcccgagtggttgggactacaggcacctgccaccacccccggctaattttttgtatttttagtggagatggggtctcaccgtgttagccaggatggtctcaatctcctgaactcgtgatccgccccctcggcctcccaaagtgctgggattacaggtgtgagccactgcgtctggcctttttaaaatttaatttaattttttttgggggcggagtttcgctctgttgcccaggctggagtgcagtggtgtgatctcagctcactgcaacctccgcctcctgggttcaaatgattctcttgcctcagcctccagaatagctgggattacaggcatgtgctaccaagcccagctaatttttttgtatttttagtagacatggggtttctccgtgttggtcaggctggtctcaaactcccgacctcagatgatccgcctgcctcggcctccttaagtgctgggattgcaggtgtgagccactgcgccaggcctagatattttttatatcaggtcacatgtgttttatctaggaggcaaactttccttgtaattagtgttttttttttcctttttttgtttttgtttgagtggagtctcgccactgcgtctggccgtcattaatgtttttctagtgatgttgcactctcttgacgtcagttaactgtcacctgaatcttcagggactgggttgggttgtggggtaggtggtggcgtgacttgctgttgatgggactgctgtccacaggaacaggaggacccactagttacacagctgccaaaggtgtgggtcttgaggcccgaaggttgaggttgcagtgagctgagatcatgccactggtctctagccccggtgacagagtgagaacatctcaaaaaagaaaagaaaaagtgttgggtcattatttacacacccaacaagtgaaaggtctggagggcccaagtgaggacagctcagttcaggcatgtttaacctccagattacctcatccttgagaaatttaggaataatcccagtgtcagtctttggaggtgtggttctttgatgttagtcatgggaataaggaatttgcattaagcctcaagaattgtggaaagtcctaatgagaaatgtcacgggcagaaactgccacccgctttagtggtgcaggtgatggctgtgccggagagctgcgcgtagccggctgctggaggagaggacgtggcctgtacaggcagcttcgctctggggggtgactgttggagggcagcggggacgaaagggacacatttgtatgatgctcagttgtcagcaggatgtccaggttgcttttttggagggcagtgggtccttgagaccttgagacccattctctttggaaagtaatgagttaccgggtgggggctgtaggaggatgttcagttgtggtgtggaggcgtcgggttgcttaacctcagagggatcttttttcctatgagttgtgtagaagaggatgtcttccatagatttgaaggacgttaaaaaaaaaaccaaccccaatgtggctttccttctttctcactagggtgatagtccgacgtgcatgtctgtttcctggaccctggatgtgaaaatggggttcttgaaggcactgggagtgtttctctgctggccccagaggcctgtgtgtgctgctggcgaggcagctgggccactgtcactgtgccctgacaacaacgttgggaactgttcctgaaagtgttaaacaaaatttcagtttattaagcgctcctctcattaagccattgttttatttttcttttttgattttttgggcttcttttgaagccataataaattggaatagaaagaatacataccaagaaacaaatattaggtctgattttttaattttttgttattatttttgagatggagtcttgctctgtccccagactggagtgcagtggcgtgatcttggctcactgaaaccttcgcctcctgcgttcaagcagttctcctgcattcaagcagttctcctgcctgccaccacacctggctgatttttgaatttttagtagagttggggtttcaccatgttggccaggctggtcttgaactcctgacctcaggtgatgtacctgctcagcctcccaaagtgctgggattacaggcatgagccaccgcgcccggcctctccaatatttttattattaaaatgctaaatactgccgggcccagtggctcacacctgtaatcccagcactttgggaggctgaagcgggtggatcacctgaggtcaggagttcgcgaccagcctgggccacatggtgaaaccctgtctcttctaaaaatacaaaaaattagctgggcgtggtggcaggcgcctgtaatctcagctactcgggagggtgaggcaggagaatcggttgaacccaggaggtggaggttgcagtgagccagaatcgcaccactgcactccagcctgggtgacagagtgagacgccatctcagagagaaaaaaaagaaattacgcgtggtggcccatgcctgtcatcccagctactgaggaggctgaggcaggagaatcgcttgaacatgggaggtggaggttgcagtgagccgagatggcgccactgcactccagcttgggcaccagagtgagactctgtctccaaaaaaaaaaaaaaaggggaaatgacttaaaggtgatggcttttatacttctattgtgcctgttttctgagatataaatttaactagctaattctctcgtgttttaaatagtagacaaagaaagacaagaccaaaggagaacctttttctctgtttcttactccgtctgcttttattaatagatgctcacggtgtggtcttccactcacttcccctttcatctctgagcttaacgagc

SEQ ID NO: 2177 - DNA, 1116 bp, Homo sapiens
ccaagtagctgggattgcagacgcatgccaccatgtccagctaatttttgtatttttttagtagatatggggttttaccatgttggccaggctggtctcaaactcctgaccttgtgattcacccgccacggcctcccaaagtgctaggattacaggcgtgagccaccgcgcccggcctgagatttgctttttactcttaggctgatcttgcctgcctgattgaagctgatcgcttacatttgaaaacaaaatatactgaaaatagaaaaacctgaacgttgttattgtcacaaggctggctagatctccggcatctgcacactcagtctgaccatttgggaagctttcatgaaaaagcacagtcagcgagaatgagacgagagaacccatttccacaaccattttaatctgcgcatcggtcccagacgtagggattcctcgtctcatcttggaaacattgccagcagtggttctgatttggaagcctgcgtctgtcacgtgacaccgtctgagcctgtgcctgcctctctttcttccggcagtgccctgtactctgtggggatgacggcagtgggcctggccatcctgtggtatgttttccgtctggccgggatgactggaagggaaggtggattcagtgcttttgtaagttctgtaaatcagagctctctgaactctttctggtttgtgtttgctgaatacttttcccataagctatacgatgaatacacagggaaaacctgttgcagagagtagcctgaagccacaattagacagcagctcaccttcctttcccatggtccggctgtaaggcgtgtagtaaccaatgttgcctgagggcctctcacccctaactctggggtgcctgagccttgtgagattacagggcagttgaatctgcgtttttcttttctttttttttgagacggagtttcgcccttcttgcccaggctggagtgcagccgtgcgatctcagctcaccgcaacttgcacctcccgcattcaagcaattctcctgcctcagcttcccgagtagctgggattacaggcacgcgccaccacgtccagctaattttgtatttttggtagagacggggtttctccatgttgttcagg

SEQ ID NO: 2178 - DNA, 1244 bp, Homo sapiens
ggcccagtctggagggttcggggcggaggcccgggggggtgcgcgcgcccggggtccggcctctcactcgctcccctctcgtccgcagccgcagggccgtaggcagccatggcgcccagccggaatggcatggtcttgaagccccacttccacaaggactggcagcggcgcgtggccacgtggttcaaccagccggcccgtaagatccgcaggtgagccctgcgctcggggctgcccctggggctcgtgcccgcggctgcgccttggcttgcgggtggccgatgccagggcggggggcgctgtctgcaaccgtcgcggagcgctggcctggcggccttaggcaagggtgaccgccgctgcgcttctctccaccagacgtaaggcccggcaagccaaggcgcgccgcatcgccccgcgccccgcgtcgggtcccatccggcccatcgtgcgctgccccacggttcggtaccacacgaaggtgcgcgccggccgcggcttcagcctggaggagctcagggtgagtactggcagcgctgcggtgtcaggaaggccccgaagtcccctctgttggcctcagtcgcgtgatgacattctccggaatcgctgtacggccttgatgaaagcacatttgaacccttttccatctgattgctgaggcttttcatccaggcctcggggctggagaaagcccgggcctgtctccatctctctctggttctggggcaggtggccggcattcacaagaaggtggcccggaccatcggcatttctgtggatccgaggaggcggaacaagtccacggagtccctgcaggccaacgtgcagcggctgaaggagtaccgctccaaactcatcctcttccccaggaagccctcggcccccaagaagggagacagttctgtgagtacacggctctctggccgtcctggtgcgcggggacagtgaggcttggctcctttatcagtgacaccggtccctgggtcttgctggggtgagaagaaccaaaacattgtgggtgatgagctaagcgggactgctaaggttcacctgtgcgtttccgcagagataaccttaatggacatggcaaggctgtgtgacttggaggcagctttttccattgacgttgctctccctaaaatgcttcgtattccaaaatatttctagaaagaccttgtaggataaggttgataaagagtccattgtatacgtttccgggtagttaaattagggaacagttttctctg

SEQ ID NO: 2179 - DNA, 1244 bp, Homo sapiens; identical to SEQ ID NO: 2178

SEQ ID NO: 2180 - DNA, 1200 bp, Homo sapiens
tggtgctcacagctgtaatcccagcactttgaggttggctgggagttcaagaccagcctggccaacatgtcagaactactaaaaataaagaaatcagccatgcttggtgctgcacacttgtagttgcagctcctgggaggcagaggtgagggatcacttaacccaggaggcagaggctgcactgagccaggatcacgccactgcactctagcctgggcaacagtgagactgtctcaaaaaaaaaaaaagagacagggtcttcggcacccaggctggagtacagtgccacaatcatggctcactgcagtcttgaactcatggcctcaagcagtcctccctcagcctcccaagtagaggggtttataggcacgagaccctgcacccaacctagagttgccttttttaagcaaagcagtttctagttaatgtagcatcttggactttggggcgtcattcttaagcttgttgtgcccggtaaccatggtcctcttgctctgattaacccttccttcaatgggcttcttcacccagacaccaaggtatgagatggccctgccaagtgtcggcctctcctgttaaacaaaaacattctaaagccattgttcttgcttcatggacaagaggcagccagagagagtgccagggtgccctggtctgagctggcatccccatgtcttctgtgtccgagggcagcatggtttctcgtgcagtgctcagacacagcctgccctagtcctaccagctcacagcagcacctgctctccttggcagctatggccatgacaaccccagagaagcagcttcagggaccgagtcagattctgttttgtctacatgcctctgccgggtgccggtattgaggcacccagggagctgttactggcgtggaaataggtgatgctgctacctctgctgctgcactcacagccacacttgatacacgatgacaccttgcttgtttggaaacatctaaacatctagtagatgacttgcaggctgttggctaccagtttcctgtctgaggtgtatatgttaacttcgtgatcagtttgtatgtttgggactcttgtcctatgtaaagttaaggtgggccgggtgcagtggctcacgcctgtaatcctaacactgggaggccgaggcgggtggatcacctgatggtgaaacctcatctctactgaaaatacaaaaattagctgagtg

SEQ ID NO: 2181 - DNA, 1179 bp, Homo sapiens
tcacagcactctgggaggctgaggcgggcagatcacttgaggtcaggagttccagaccagcctagggaatatagtcagacctcatctctattagaaaaatatatatttttttgccgggtgcggtggctcacgcctgtaatcccagcactttgggaggccgaggccggcggaacatgaggtcaggagatcgagaccatcctggctaacacggtaaaagcccgtctctaccaaaaaatacaaaaaattagccaggcgtggtggcgggcgcctgtagtcccagctactcaggaggctgaggcaggagaatggcgtgaacccgggaggcagagcttgcagtgagccgagattgcgccactgcactccagcctgggcaacagtgcaagactccgtctcaaaaaaaaaaagaaaaaatattttttttaaaaagtaggattgatctcaattcattcaactgctaaatttggagagcgaccctgaccccagattcctgaaagggctttaccacactagccacaacgaggaaatggagcctgtaaaagaatgaggttactgagtgttcacaaatgcacaccaaggctccaagatgagatctcccggggttccagaaagctctgggcatcgttcaatctatcgcctgtcagtgcaggcgtggtcaaggccaagttcaacctgtcatctatcagttcaggtgtggtcacggccaaggttatctgtgactggaaaacagccagcctgacccagatggcacagtgcaggccaggcgggccgtcccacccaactcactgtgggatgctggccaaaccgccctcctcatctcagctttccctcacctcagctttccctcacctcagctttccctcacctcagctttccctcacctcagctctcctcacctcagctttcctcacctcagctttccctcacctcagctttcctcacctcagctttctcttccagccgtgtgtggcagcacaaaaacccagctaaggcaaaatctgactctgaggaaatctgacatgggcttgagagaagtcccctcaaaagagttgagtgagctgtggagtgaaaagccacaatttttcttttttttttttgagacggagtctcactctatcacccaggctagagtgcaacggcaccatcttggctcactgcaacctctgcctcccaggtttaagc

SEQ ID NO: 2182 - DNA, 1242 bp, Homo sapiens
acagggtctgtgcacactcagaaacgttgggtctaggacagcctccaggacacagcagggctgtgccacaaaatggtgagagacgggctcagtggcgtcaagggcctgcctagatcagacacacctcgccttgagagctggaaacaccgtggccgtgaaaccatctctggagggaaggctgcttcacggactgaaggacaggcagcttgcatgctttccctggttcttcctcctggatacttttaaccaaacagggtcatgcttagccagggctgaatatcagagttggtcagaatcaggtcaggaccccagtgtcgtgtactccccatctgagaacgggttggtagtggctggtgtggctgtgtgccgagggtccgtggtccctgcgactctcaggacaccgctgcacgtgacagctctcgcccccggcaaccattgctgtgtgtgccacctggatctgcagggcctggggcagagggtggtccgagttgggacaggtttccaggccaccacaggctctcggggaggctgtgtcctgtggaggcctgggctgggggagaggagccggctgtattgaggtgggtgcttctgtgtgtaggtaccgagcccctgaactgctgttgggaaccaccacgcagaccaccagcatcgacatgtggtgaggagatacggttaccgctcctggggcctcaggaagggctgggacaggagccgggtcacctggttcctgagctcagcctcaggggaggggcaggagtgcagtggggtctttgccagcctcccactcccagggaggtgggcctgagcctggaaacccaggaggaggtgtgagaacttagcttgctgttctcaggctgggagcacagaggtctggaggaggcacgcctgcccctgcacttgtcaccccgggaggcctgcggggcccaggaggggagccagtggtccctgcctgtccttcacagtgtccctgacccagcgtgcctcacactggcagggtcagcaaaggtctggctgcagtcaggtcctctgttcctcgcgctggcggggtcagcagacgtctggccgcagtgaggtccactgttctctgcagggctgtgggctgcatactggccgagctgctggcgcacaggcctcttctccccggcacttccgagatccaccagatcgacttgatcgtgcagctgctgggcacgcccagtgagaacatctggccggtgggcgtcctgggcagacccgcagccc

SEQ ID NO: 2183 - DNA, 1204 bp, Homo sapiens
gagaaggaccctgtgccccaaggcccgtggctcctggcctgctccctgcagtacggagtacggggctcaggacttgggggtcctccacgtgtcccagggattctccacacgagtgtcctcaagggcctgttggtgacaccgagctccccccaccccaagctctgctggagccaatctgcggggctctgccgggtgcacggctgacctggcttcggggacgccggccctccccttgggtgtcacagcagctgggcccacagacaggaaatgacctgacctcaaaccagatgtggaggtgcacgagaggcgcaggaacgggcagtggctgacagctgggaaggccctgagcgtcactgctgctgggcggaagggcctgtggacagcccgcccaggcggcggggtcttggtgggtccagtggtaatggtgcccctcccctccattccctgtgggtgcagcccacaggctggcgaggaggtgcctctgccctaccctcgggtctggcgagggagagggcagggtgcatccactgtgacagcccctctgggcccacaactccctgaccctggaagctgagcctgctttcctgaccctccgccccaccccctcctccccagaacactcagagggacggtcaacatcagagcacattaaacgctggtgaaaccatgtctgttaaaaaagcttttatccaacaagagcctatagcttcgctcagcatcagagccacggcctcctgttgggtcctccatgtggggagcagggatgcagctcagcctccagcccagggctctcctggtagtctcggggtatcctcaattgtggctcccaccccataccttgtccctcttgtcctcatctggagtcctgccaggcccacctggggtccccacagccaacccatgcacgggacagccccgggcgactgagaggggatacgaaggtcttctgggccctctcatcccaggccagcgtccaccacaactcaaagacagcggggggactgcacccaccactcctcccaagaagcagtggttgcacatttccaacatagcgaggaggaccacatgagacccctgcagccacggatggagccgccagacctgcccttccagggtgcacgggctgggagccccccggtgtcacccggcctttttctgggggcagcagtgggttcagggcagacagtgggaggaagtcagtgga

SEQ ID NO: 2184 - DNA, 1118 bp, Homo sapiens
gtctgctaaggctgtgggcccctcatcgaggcccgtcacagcctcgaccctaaacaggcctttagtgctcactcagcttcacttgcaactgcaggcctctgggaagtggccgttttacagagacaaggacgtgctgaggggatcgcctcacccatctcccaccggctgtgtccccaaagtcctgccttcccgtagcttggcatggagcacctctgcgcgaccatggacctgctcacacagcccttctgcgcgccgtgggagctgcctctctgtgactcgcccctggacccaccgccccagcgcctgacccacctccctgctgcccttcacagaaaacttctcatagactcccattttctcatcccgccccgatttagcccccgactccccccggaaactgcccttacccgtccccaccttgccagacacggtgggccactggagttcctctgtcttctgggactttgctctccccaggggatcctctgccactcctccacccaactcctcaatcttggagcgccagagctcagccgagctcaccggctccctagggagctggggcaactgttagctccccctgacctgtgtgatcctacgtccagtggctgccccgacctctgtgatcccacgtccaggggctcccccgacctctgtgatcccacgtccagtggctcccccgacctctgtgctcccacgtccagtggctcccccgacctctgtgctcccacgtccagtggctcccccgacctctgtgctcccacgtccagtgggtccccctgacctctgtgatcccacgtccagtggctccccctgacctctgtgctctatgtccagtggctccccctgacctctgtgatcctttgtgcagcggctgctggcctctcaaacttaatgtgttcattgcggaacttgctattcctctccttgccagtttgctcctgccccatctgcctcctgcaagtctgctctgttccaccttcaggacgcaccccgaggccgtttactgctcccatcctgggtggtctggccactgccatcctcagtcctcacctgaggctccactcccaggctgtcctctccctcaaagctcaaagtctcttcaagtttccctgcac

SEQ ID NO: 2185 - DNA, 1094 bp, Homo sapiens
acagagcgaaactccatctcaaaaaaaaaaaaagacaagaatctgtggttaaggaaatagctttctgaggtttctttaaaaaccatcctgaaatgcacacagctgatgaagccacgtgacagtgtataaagcagtttaaagatcttaataaacgaggccctcataggccccttgcttgggcccactgcatggtgaaccatgtgcagaaatgtcttcccagctgtgatggtttcacattgtcatcgtcgtccccccgggaggttggagcatcaggggcctggactcactggactctcccctctcagaggtgcggaactatatctgtgacgaatgtggacaaaccttcaagcagcggaagcaccttctcgtccaccaaatgcgacattcgggagccaagcctttgcagtaagtgtgagtcaggaccccctcccagggctgtggccctcgcaccttcttatctgcctctgtcccccaggtgtgaggtctgtgggttccagtgcaggcagcgggcatccctcaagtaccacatgaccaaacacaaggctgagactgagctggactttgcctgtgaccagtgtggccggcggtttgagaaggcccacaacctcaatgtacacatgtccatggtgcacccgctgacacagacccaggacaaggccctgcccctggaggcggaaccaccacctgggccaccgagcccctctgtgaccacagagggccaggcggtgaagcccgaacccacctgaggacggcagtgaggatgagcacctctagcagcctggactccgcagtggctgtgtcagcctcacccttcgtgtgcacccgcatgggagggtcggagggtgctgcccgcccttggtgctggaggcgggcttggtgtccggctcaagtagccttcctctgctctgggaccagtggtttattttcccgcaaacgctgagtgactcggggccggacagttcataaataattgattcctttccccactaaagcagtcgaggagatttgtaatccactttttagtgcaacaagagctccatgttatgcttgtaataaattatttacacgggagctgggctggtgtgcagtggcag

SEQ ID NO: 2186 - DNA, 1128 bp, Homo sapiens
gccatcagggaagaggccttcctgcatgttgctgtggacatgtacttgaagctggtccagctcttcgtggctggggatacaagcacagtttcacctccagctggcaggagcctggagctcaagggtcaggcaggtgcaagggccagtcccacctccaggggagctccccccagccggaggctccttctgccaaagaatgttccggcacagcatgcagactatgggggacacaccagccctgtttctgtatgtcttctaacctgtgagtttgcctgttttctctctagggcaaccccgtggaactgataacaaaagctcgtctttttctgctgcagttaatacctcggtgcccgaaaaagagcttctcacacgtggcagaggtaacgtcaagatgcccaccttgggccatgtgggggacatgagaattgacagctgcctgggccatgtgcctgcctggctggcaatacaactcgactatttctgccagagcccctcccctgtggtctgaggcctagtgggcggcatgggctgaggacctgctcctctctcacagctgctggctgatcgtggggactgcgacccagaggtgagcgccgccctccagagcagacagcaggctgcccctgacgctgacctgtcccaggagcctcatctcttctgacgggacctgccactgcacaccagcccagctcccgtgtaaataatttattacaagcataacatggagctcttgttgcactaaaaagtggattacaaatctcctcgactgctttagtggggaaaggaatcaattatttatgaactgtccggccccgagtcactcagcgtttgcgggaaaataaaccactggtcccagagcagaggaaggctacttgagccggacaccaagcccgcctccagcaccaagggcgggcagcaccctccgaccctcccatgcgggtgcacacgaagggtgaggctgacacagccactgcggagtccaggctgctagaggtgctcatcctcactgccgtcctcaggtgggttcgggcttcaccgcctggccctctgtggtcacagaggggctcggtggcccaggtggtggttccgcctccaggggcagggccttgtcctgggtctgtgtcagcg

SEQ ID NO: 2187 - DNA, 1120 bp, Homo sapiens
ggactgaggtcccctgaacgtggggttgtgtgttgtgccctcccaagggctggactgaggtcccctaaacgtggggttgtgtgttgtgccctcccaggggctggactgaggtcccctgaacgtggggtcgtgtattgcgccctcccaggggctggactgaggtcctctgaatgtggggttgtgtgtgtgggctgttgatggtctgtttccacctgagcatttgctcagccactcacagtgaaacttgcgcaatgaagaaacggccgggtcactctctgtttcagtttcagttcctcatgttcagattgttctcagaggcccgacagcctctttctgaggaggacgtagccagcctttcctggagacccttgcaccttccttctgcagactggcagagagctgccctctctctctggacacacagaaccttccgagaggtgttgaaagaggaagatgttcacgtaggtgaccgttccttctcctgcatcatgccacgtcctgagtctagggtttgtgtgtgctcctcgggcaagaacagcagcacgtaggtgaccgttccttcccctgcatcatgccacgtcccgagtctagggtgtgtgtgtgccgactgtctcctcgtctcgagtctagggtgcgtgtgccgactgtctcctcagaggcaagaacagcagcacttagatggtttgattggaatcttgactaaaatcgttgtggcctcatgtgcagctcttaagaaattatacagatactgggcacggtgctcacacctgtgatcccagcactgtgggaggccaaggcgggttgatcacctgaactcaggagttcaagaccagcccgggcaacatagtgaaaccccatctctacaaagaatgcaaaaattagctgggcacagttgtgtgcacctttggttccagctacttgggaggctgaggcaagagaaatcacttgagcccaggaggtggaggttgcagtgagccaagatcacgccactctattccagccaggatgacacagcaagaccctgtctcaaaaaaatatattaataaatacagagaaaccctgctatactttctcagtttctcccaacacgaacttctttttttatttttactgatatatt

SEQ ID NO: 2188 - DNA, 1639 bp, Homo sapiens
ctctttagaatatgcgacagaggctgtttctggccccaaaacctaaaatatttttctggccccttacacacaaggtttgccagtcccgcctgctgctgtagaattttgtgattggcgattacttgagggctgctattcccaagattggggaatgggggccctgggcaccagtttgcattgtaacatgccctccaaacaagcctgttttggaggtctttttgcaaagcagaattgcgatgtctgtggcgggagcgctggccggcttccttcctgctgctcccgtccccaggacaccacgctcatgagaactgtgtctctgcaggctgtggacctcctgctgacgtctttctgtcagaacctgatggctgcctccagtgtcgctcccccggagaggtgaaggcgcgggcagctccctgagtggtggggctcctctgggtgccacctcttgctgggccaagtctgcagaccagggactcatgagctcgtctccgcaggagcatgcggcgatgctgagtttcatcaaataggacgcagcagaagttgggaagcactgcagaagatgggttgtcttccagaaagaccactgttttggggaacagcttggctctttcttcggccgctggtggttggattagctgttggagggatgtgcaggactgaatggctagtactgatggtttcacggctgtctctgcaggcagggtccctgggctgccctcttcgtgaggaccatgtgtggacgtgtgctccctgcagtgctcacccggctctgccagctgctccgtcaccaggtgaggctctccttcatgggggccacccttgggggcccactctgagggccaggctgctacttctcaattcgtcttcagtgccctggaaaattccagcttggaagagggcagtctgctctgccaccctcattctcgttgcagggcccgagcctgagtgccccacatgtgctggggttggctgccctggccgtgcacctgggtgagtccaggtctgcgctcccagaggtggatgtgggtcctcctgcacctggtgctggccttcctgtccctgcgctctttgacagcctcctgacctgtaggacgagggattccttgttcttctgcctgaagtgagctcttcttccacagtcgcgtcttctctcctctctctcgaaaagtgacacatgctcgtttgataaaattagaagagacagacatgcagacataccacccaaagataaccactttttagcattttggtatatatccttccagaattttatctgtcatttgtttataatatgcgtgcgtttgtttctttgttcataaaaatgagatcatattatactaaactgctgaaattaatagtagatagtaactgtctatatcgttaagcattctttgatgtcctggtgagagctgctttgttttgtcttggtcccttgtctggcccttggttggaccagctccctctggtcaggttcttcggcaccccatggtgagtagcttcccagtgtgtacacctcgggctgtttctctagggctcagcagatggggccatgtgctgaggtgaggaaggaccctgtggttaagaatggtctgctcagtgcctcaagggctccctgcagctgccacgcacaggcagaagc

SEQ ID NO: 2189 - DNA, 1129 bp, Homo sapiens
ggcaggagctcgtctggttttgcaggtaagcggttcagtgttcacagaggcccacattctgtctgcaggttcactatgatgcgttcagggccatgcccatttaaaatctccttccttccctgactcactgcagcccccaggactttgctgcagcccccttcgttcctgggagggtttgctcatgttcctcgcttgctctgctagggtcttgcagcttcattgtctgaggggtggccctccttggcctgtgttccttacccacctctcttgcagtgatctgtccactggtggatgaggttagaagttaaagtgtgttcagaagtggcttcatcccacaaaatcaatttgtttgctgtgcacaaacacttcttagggcatttagcaaattgtacccctaaggatcccaaaaggatcccatagttagtgtttgttatagctaatgatttttaactgtttttcttcgaataacttttagatatctcttcagtcaaagcgcagtcgtgacatctgtaaatgtatgaaccacatgactttttggtgtttctcttttttcctttctgtttaggaggccgactacagcagccgcccggacactgcctaggtgggcttcacactcttctctccacacaggacactgcctaggtggtgcagctgcgcctggctgtcctgggcttcacgctcttctctccacacaggacactgcctaggtggtgcagccgcgcctggctgtcctgggcttcacgctcttctctccacacaggcctcctttgggagcacacgaggctaccatggctgcagcaagaaggccctggtcttcctgtttacgttcttgtcagaactcgtgccttttgagtctccccggtacctgcaggtgagaagctggctgccacatccatgatttctggtgcttcgctcacctgctgcatctgaggactgccttggcctccccaagagcctcctgcagatctgctctgagcctctcagccaggcccttccccttccccttccccttccccaagccgtttatggtgaaacaacacaaacattgcaactggaggtgtccacgtggacacacagtgagtgcgtgtgtgccagtcaaggcaactgctaagaaacccttttctcacct

SEQ ID NO: 2190 - DNA, 1195 bp, Homo sapiens
aggctgctgctttccattcctctttcttggggcttagtggggagttaggtggcccctggcctgggcatgtcaggttctgagttcttgctttaagtcatataattggttcagcttagcaataataactagcctattttgagttggggggacgttgtgagtgtcgacccggtaattcccccgtttttgtttttgtttttggagtcggaatctcactctgtcgcctaagctagagtgcattggcgcagtctcggcccgggttcaagcgattcgcctgcctcagccttccgagtaactggaattacaggcacacgccaccacacccggctaatttttgtatttttattagagaccaggttttgccacgttggccaggctggtcttgaactcctgatatcaagtgatcctcctgcctcagcctcccaaagtggtgggattacaggcgtgagccactgcgcccagcctccgctggttttaaatgtctgaaaaaaaggcatgcctgggagctggggccttgctgagtgcctttcctccagggctgtcctcccttctggtaggttctgctccagacgagcccttaccacgttgactcactcctgcagctcagcgatgcctgccgctttcaagaggatcaggagatggctcgagacctcgtaggtaaggcagagcccccaccccattcccctcagctgtgggagcacctcaagctatcaagacagatgcgatggtgtaagatgacaggggttgccaggatatccatgacagctttattgagatacaacctacgtagcacaaaacttacccatttaaagtttttgtttgttggtgtttaatatatgccacagcctcccgagtagctgggactacaggcgcccgccaccagacctggctaattttttgtatttttagtagagatggggtttcaccgtgttggccaggatggtctcgatctcctgaccttgtgatccacccacctcagcctcccaaagtgctgggattacaggcatgagccaccacgccccgccctctggcttttatttacaatgaagttttcaaggttcatcctcactgtagcgtcgatcagaacgtcgttcgtttttatggcttagtaatactccactgtgtggacggaccacatgttgtgtatccatcattagttgacggccgtgtgggctgttgtaaataatagtgcttacgt

SEQ ID NO: 2191 - DNA, 1206 bp, Homo sapiens
aaaatggggctgcagaagaatgttgatgatggtgtttaaggtcacaaaactgtgagtctgtgatcccattttgatagaaaaaaatgcagtgagtcacatgtctacaatatgtgacataggctgagaaaggcaagagaaactggcacggtggtagactgctcggaaactcgcgtggcgggctgctctcggaaactcgcgcggcagtgggctgctctcacagactcgcgcgggggtgggctgctctcgtctgtaaattttccacattgagagcaccaactgctcagcttcagagaggagcctgggcggcaggtgggaccctcactccccacggtgtcctcgctccggctcagtctacttctcaggccctcccacgtcctctgtatcttctgcatgcggaaagccccccaggtggacgttttaagttatctttatgctgagttaggaagaggcccttgcgttgcctgcagaatatacctgctcggggtagggctcactggtgatgtcagagcgtctgcaaactcacatattttgtctttatgacttaaggctccacgctctgtttcttcgtccctcgtaggctcatcggaacctgtcccagctccctaattttgccttctctgttccactggcgtatttcctgctgagccagcagacagacctccctgagtgtgagcagagctctgccaggcagaaggcctctctcctgatacagcaggcgctcaccatgttccctggaggtgagtgagcgctgtgtctcgcctggggtaggggtgtgtcctgtcagccgtgggggctgctcttcctggtggtggaggccaggtcccagtccttccccacacttgtagaaacatgcattctctggtagggcctgcaaacctgccctaccaaacctgaaagagggtcggctcatctcggaacccgctgcgtgccaagccaggcacgaggaggtggcaggcatcccgacccccgtggggcctgtgttctagagtgcagagacagaactggctgggaggtgcggggcattggattgtaccagtgctggggaggagagcaaagcaggggaaggtctcggcagcgccgaggtgtggccgagagggttgtgctctgcaccatgctgggatgcagaatggaggcctgtgccgcccagatggactcagcctgcacagccgtgacccctgactgcatctgggtagcttcgatccacgc

SEQ ID NO: 2192 - DNA, 1406 bp, Homo sapiens
cgcagctcccagctctctcctgcagctctgaggtcagggctttggggctcacagggactggctgcctctttcagacccagatgctgagagatggggctcagggctaagtgggtctttcccctcacaggaagggagaggaggagaggaacagtgttatttgggggtcacagctctgcgtttgcaggccacgttctttcccatctccaccgaatgtacaagcgcttgcgtgtcggcctctgtggcaggtgcgagtgacacagtggaagcaggtgtgcagtgaagtggggaaaacatattaattttagaatgtagaaataaacataaaatcaaaactgcaccagcctggccaacatggcaaaccccgtctcaactaaaaatacaaaacttagccagctgggtgcagtgactcacgcctgtaattccagcagtttgagaggccaaggtgggcaaatcacaaggtcaagagattgagaccagcctggccaacgtgctgaaaacccgtctctactaaaatacaaaaaaattagctgggcgtggtgccgcacacctgtagtcccagctacttgggaggctgaggcaggaaaattgtttgaacccgggaggcacaggttgcagtgagtggagatcgtgccactgcactccatcctggcgacagaggaagactccgtctcaaaaaaaaaaaaaaaaaaaaaaattgggcgtggtgggttgtgcctgtagtcccagctactcaggaggctgaggcaggagaatcccttgaacccggaaggagggggttgccgtgagctgagatcacgccactgcactccagcctgggtgacagagtgactccatctcaaaaaaaaaaaaaaaaaaaatcctccagtaaggtgtttggaggaaggatggtggctgtgctgagacggagaggatgaatgtgccctcaccaggctcaggggagagggtccttgtgttccccagcagagtcacgatgtgccgaggccctgtgccaggagcagagcacacggcacattgagagaacaaaagccccatggccagaccgggagagcagggctgcggcgcaagagggccaactgccaggcggccggtgtgtctggctttcagaatccgggtcattgaaaggctttttaccttttccttctgggctggaaagtacttgccttacccaggccccgtcacccgcacagcggtcgtcgtgattatccctgccggcagggtgttgcagcattgaggaatcgcggttctttgctgcctccctccgctgtggagcccaggctttcgccctccctagagctcctgaggcctggccgctcagcgtcctgtagagccgggccggtagcccttcgcaccgtgagggtctccgcttaacgcaggccctggaagcttctgcctttgcgtaaggagtg

SEQ ID NO: 2193 - DNA, 1419 bp, Homo sapiens
ctccctgggagactggggaggtgctggcatcgggtggccgcctctgactctgtgacccacccacagtcatcaggtaataagagaaggaggtgggactggggcccactcacgttccctgtgtcttccccgtgcctccctgttggggtccacgggcagcctgtccatgggtgctttgtcctttcaggctggcgtgcaggtgcccaacccacactcctgccccacaggcacaacaggcaggacaggccccataggtggtgtggagtcttgcccagttgcagggcagccatgtggggttggggtggcctccttatcccactgccagtgaggcaattagttcaaatcccagttcttccaggccacagtgtgaccctgagcagggccgtcccctctgggctcagctctctttcttttgggagaagagacagaggataaatcataggattgattattataattgtgaattatttcagactgtagcaggtgtagtgaaagcataactaacactgtagcaggtgtagtgaaagcataactaacactgttgcagttactgaacaactttaaaaagacatctccgactttctataacatcaacagaccttacagcgagcttactttgtgctcagtctctgttaactcatttcaccctcacaatggcccattacggatggggaaatggaggcagagaggctaaggaatgtggcccaggaagttaagtgggagggctggatgccaactgcctctactcccaccccaaccaaagtcccttcctccctgccaggagccatcagccctgtgtgttctgcagtgttctgagcctccgggtggggaaagagcaattcttgatcctgagcttctgccacgtggagaactaggcccttccggcctgtttcctgggttcctgaggcacagagccgtgggcctggttcaggtcgtgttgctcatcacaggatcagaacccaggccagagagcctggatgcatttgtagggggcttctctgtgtgctggcagggaatcctcccaagatcccctgctcctgggcatggggaaggtgggccctgctcactcacctgtggcagagcaggaatgggccctggaactgtccccaagtgtccaaccctaagtcctgagacaggggctgtggtttcagggtgctctgacaagaaagcacctttgcttggggcccaggaaggaggaacccatttctgagaggtgtgtctcacatagcaggtggatagcaagctagagcggggctgagtgagtatctggggctgaggcccagagaggatcccataggtagctctagggctggagctctgcaacattgggcaagaggaccctgtgctgggaggcagggagcttgggcccctcagatgggccacgtgccctcgtgggaccctcattgtcaccgtgagctcttt

SEQ ID NO: 2194 - DNA, 1205 bp, Homo sapiens
aagtcagccaccaagctgaatacgaactgaacatctgccctgagacagggctggacagccaggattaccgctgtgccgagtgccgggcgcccatctctctgcgtgagtggtggcagggagagaagagggtgagggagctgttcctggcggggagccgggtgcacaggtgtgtaagggcacgtaagtcagacagttgagtgaggccctggggcagtgcctgcttgatatctttaggaagtgacaagggtctgttgctgccattgtttcatttctcactgaagcagactgaggttccagccgttccgtgactcacccaggtcactgaggagcacctggagggctgggacctggcctccgcctccccgtgtgaaagcctcatagatgaggactagggagaagtcacacagcacagaaagcctcatagacggggtctagggagagtacacggttgtcgcccagttgtgcacatgtgcgcgtcagctcttctttctagagagttgctggtgttaattcatgaagtccctgcctcggtcctacagtgaggccctgtttatatcccattttactgataagagaacaggtcagtgagacgctgggaccacctgaggtcttccggctgaggataggacatgttcccatgtctccccgagggctgtggtccatgggaggacagaccatgaggctggaaagctgtgtggggtttttgtgaggcagggacactcagggcccctctgaccctgcagggggtgtgcccagtgaggccaggcagtgcgactacaccggccagtactactgcagccactgccactggaacgacctggctgtgatccctgcacgcgttgtacacaactgggactttgagcctcgaaaggtgggggttggaaggtgggggcatccccctggggagggagagcaggaagggggttggggtgtggagccggtgtacccctggttgggtgttgcccgctgcacgggccctgggtgggtgtgagaggtgtcacccggccgtgcctggcaggtttctcgctgcagcatgcgctacctggcgctgatggtgtctcggcccgtactcaggctccgggagatcaaccctctgctgttcagctacgtggaggagctggtggagattcgcgtgaggctggggccatggaagtggggggcgggggcgctgtgtcaggtgggccctagggccgggccagtaccct

SEQ ID NO: 2195 - DNA, 1165 bp, Homo sapiens
cctgacacacaccctgggggcagctctctgccagccccgagaccggccttgtctgctgggcacgggtcttcgcctcacttggagaccagccggctttcctgggggacacacggggcccccggatgcctctgggagccccagcacaagcacagcccagtggccttacgtccagctcgttcctgggccccgagtcaggaagacagcgtcacggagtcactgccaggaacgtgctgaggaatggagtggcccacggcggccttggggtgaaggggacccaggcctgtgacagccactccaggaactcctgggggtgctccaacctccgcgttttcctgtgctgccaagctcagaagccagaggcgggtttggtagtggctaatgggacaatgtgctgtccagcaaagcacacatggagaagcggccccaaaattcccaccttgatttccatcctgccccttcttctactccacggaggcgctgtctcactagggtcccctccccaaggctcagctctaagacctgcacctgcttctcttggcccctgcgtgacagacaagtccattccctccttagctcagaacaccaaatatcaccagactgcctaagagacttgatgacacctcccggaatgctctcggggtggggttcacctctccttgtcctgcacccactgctaggccacattctcgtttctgctcacatcccattgcccggctacaaggcctgcccacggcccttaaacttgctgggcaggtttggagcccatgggaccccgtgggtctctgtccaggagcagcagaggaggctgacaggccctgctccctctgctctgggggtgtctgggagccccagctcacaccctcccaatgcttatatgctgaagctcacagaatgggcttcttgcctgacagcaagtcaaagaatgagtttaatatcaaagtgtaagcttactttccatccccaagccagcctgccccctgccccatttcccatgagcacacttctggggaaggaaaacaggctcctggccttcactctcagcagagctttggagatgccccaggcatgccctgagctccttctgtgtacctgctcccacttctgagccacccgctgcccctccgcactgctggcaaacccagttcctgcctcagccaggtctcct

SEQ ID NO: 2196 - DNA, 1247 bp, Homo sapiens
gttcacaccattctcctgcctcagcctcccgagtagctgggactacaggcacctgccaccacgcctggctaattttttttttgtatttttagtagagacggggtttcaccgtgttagccaggatggtctcgatctcctgacctcgtgatccactcgcctcggcctcccaaagtgctgggattacaggcatgagccaccacgcctggccagtcattcattgtttttgataaaagtcccaacaaggagtaacagcatcagggctgcctttttcttgttgcttattttggggaggaggtgatgtttttatagtttctttgtaggagttagtttaagtctcttcttcatttggatgtagttaagggctacagaacataattacataattacaattttacctaaaaggctcctggagacggcagtgtgtggcaagcacggtgcaccctctggcctctgccctcatggacgactgcctgtgagcacctgacatgggacatgagggctgtgtcaactctgtgttattgttaataaatcttaccttcttttgatagttgtaagataaaaaatcaatacgaaggagactgaaagagtctcatgacctgaagttggagctaggcagaggtccttgaacaatggtaaagaatggctttattttacatgcaggcaaaccattggcagtttaagccagtggctaagcagagaggtgatggggtcaggtttgtgttctggaaagatgtctggagctgctggatggagaatggattgaacactgcgttgtcccagcatgtgagctgctgcccgtctccctgtccgcttcccattcctgtggagacaggccttgtggggcagtggccatggagcctacggggcagcctacggggcaggctacggggcagcttacggggcaggctatggggcagcctacggggcaggctacggggcaggcccttgcactgcacatcgcacgttgagccacagactcagaaggcttcttcagggtccaggcaggtggggagggatgggggtgacctggagactcctgccccgcagcagaggacagtttcatctgttcactggggagtgccttgtgggcctaggagttcagtgctgtttttttctgattttccaagagaagctggaaatctggatatttataagaaatctgaatattgagtgatggcaaaatctcaacaccatgtgagccaaacagaccagtcaggagccctggttcaggctctgcccaggagcct

SEQ ID NO: 2197 - DNA, 1176 bp, Homo sapiens
aacatacagatgtctacaaaaataaaaatttgcaaggtgtggtggcatgcacctgtagtcccaactgctagggaggctgaggtgggcagattgcttgagctcaggagtttgagaccagtctgggcaacctggcaaaaccaaaaatacaaaaaattggctgggtgtggtggctcatgcctgtaatcacagcactttgggaggctgaggcaggtggatcacctgaggtcaggaattcgagaccagcctgcccaacatggcgaaaccctgtctcaactaaaaataaaaaaaattagccgggtgtcatggcgagtgcctgtaatcccagctactggggaggctgaggcaggagaatcacttaaacccgggaggtggaggctgcagtgagccaagatttcaccactgcactccagcctgggtgacagagcaagaccccttctcaaaaagttttcaggatagaggaaatttccttaaaatccataaaacttgtaacagccgtacagtaggaataaggtttggaaatctgcctggaaacctgatttcctcatccccaccttgtttcccaacataaccactgctctgtgcccctgccctctctgccaggctttctccccgatgccgtccagctctgatcctgagtgtcatttcttcatcggcttccaggctgtccttgctagctggtttgactctcacgcatcaagcgtctcaaatttgagaatgcggaggagaaaagaagtgttgcgagaaggagatgcggccttcagttgaggtctattaggaaaagattccaaataagacaagggcggggggcggcagtcgggagagcccccaggaagccctgtagatgcccccaccccagcccatggagttgctatggttaagcagcctgagccgtacagttgaaaaggggcggtggggcccatctccaaatagcacagccagttcagccgtctgtcctcaacccaggagagctgggaaagccagtggactcctgcacctggttcttgtcactcctggcgtttgtgtacagatcaccacttctctttttggttcattgttgaggagtcgttttccggacggctccatcacagcattgagctatcaagctgctgttttccacagttggtggtcacagccagggaagttgctgtcttgatttgttacattgtcagtaatccc

SEQ ID NO: 2198 - DNA, 1164 bp, Homo sapiens
ctttcccttcctttaccttttcttcccctctcttttcctcccacgctactacccaggggatggtgagtcccttgaggaaacggttcatcctcagcctggagtaactatgctgtctccagagcctctgctgaccccatatccagatactgcgctgtcccccgtgggccattctggcccagacttcgtgacggttctgtttctctctcaacctcaggggctgaagaggagtgagcagagcagcatgctggaactcctgcgccagcggctccccgcaccgccctcgggggcagaaagctccggctcactgtccctgacggcgccaacaccagagcaagagtcgtcacgcatccgcaagctcgagaaactcattaaaaagagactgtagcagcagcaaggggccctttgctcctggctggagaccctcagcgcccgttccccagaagcccccaacctctcctgtgctccccggcactctcacatcgtcggtcttcaaacttcctgggacatgtgggttgttactgagtctctcccatgccctgtcttacttcctgccctaatcggagacgctgagtaagggctgggctctaagagggcgatttaggtgatctctggttcgtgaagcagaggcagcagtggaggataggtccctgagctgcccttgactcatgtagcctccccatggcagtcacaccctcttgacacgtgggccccacccgtcctttttttttttttttttttttttttttgagacagagtctcgctctgtcacccaggctggagtgcagtggcgtgatctcggctcactgcaacctccgcctcccaggttcaagcaattctcctgcctcagcctcctgagtatcggattacaggcgtgagccaccgagcccagccccttcctccatttctttactcccaccctgctcctggtttctagggaagggaaaccaggaagttcacttggaagacgtttcctaggttttctcatcagatgaagccatgggaacgcccaggaagtccatactctcaaacccctttctgcccactcaccttcaggtccacagcactttccagcgtcatctgaaatagcaaaggtgatgtgcagcatcccagtgatgtgttcctgtgttatgagaaggagtctggggttctggatgcctcaggaac

SEQ ID NO: 2199 - DNA, 1147 bp, Homo sapiens
agaccaggcacagtgttttcacgcctataatgtcaggactttgggaggccaaggcgggaggatcacctgaggtcaggagttcaagaccagcctggccaacatggtgaaaccccatctctactaaaaatacaaaaattagcctggcgtggtggcgggcacctgtaatcccagctactagggaggctgaggcaggagaatcacttgaactcgggaggcggagcttgcagtgagctgagatcactccagtgcactccagcttgagtgaccgagtgagactctgtttaaaaaaaaaaaaaaaataggtattgagacatcacttctcctcacaatcctaaaatattgcaagaagcaatcacctaaattcacaggtaattcgctaacccttctgaagagccagaggctgcaggaaagggaacaagataggttgggtcgggcaaggagggatgtttttctccatctttgtttacgagtctaattaattctcttggagataaccctcccccgcccccccaaaaaaagattacttggaaattgggctgagatttttcttgtaaagtgggtttacagcttctgacatggtaactgtactaggggactgttgatgtgtgtttctcgctgtttttgtgcctctgggaaggaaggacaggtgtgtgcaaaatgtttatagaccaaagaaaagatgctgctgctgtttgaggatgatctagtctcttaaagtaactggaatagcaataactggcatttgcataggactatacagaacacttcccagccgggcacggtggctcacgcctgtaatcccagcctgactttgggaggctgaggtgggcggatcacctgaggtcaggagttcgagaccagactggccaacataatgaaacccgatttccactaaaaaaaaaaaaaagttgtccgggtgtggtggtgggtgcctgtagtcccagctactcgggaggctgaggcaggagaatcacttgaacccgggaggtggaggttgcagggagccgagattgcagtgctgcactccagcctgggtgacagagtgagactgtctcaaaaaaaaaaaaaacccagaaaccaaaaaaaccccaaaacacttccttctgcattataatacatgagcctcgagacagccttgtgaggaagt

SEQ ID NO: 2200 - DNA, 1195 bp, Homo sapiens
gggcaatttttttgacaccttcatcaaatccccttgtatgcttgtaaaagtcattggtttgaaaagtttaaaaatatacctcatgccgggcgcggtggctcatgcctgtaatcccagcactttgggaggctgagctgggcggatcacgaggtcgggagatcgagaccatcctggctaacacagtgaaaccccgtctctactaaaaatacaaaaaaaattagccaggcgtggtggtgggcgcctgtagtcccagctactcaggaggctgaggcaggagcatggcgtgaacccgggaggcggagcttgcagtgagccgagatcgcaccactgcactccagcctgggtgacagagcgagactccatctcaaaaaagtatatagatatatatatatagatatatggatatacctcataaccgttttacagttcagtaatgtgatagattcccaaggctcaagctatgaaatgaatgactaaacttaatgatcatttatctaaacacaataatagcatttattgagcactcaccacatgccaggcacgtgtatattatctcgcgtagcctttacacaataaggcaggtgctgttatcacaaatggaaaaggaacgtgtggtacagagatgtacagcgccttgcacaaggacacacagctaataaacggcagagcgggggcgtgaactcaagcagaaggacaaaagactctatatttttagccatgtattagactgccttattatgcagagaaaaaacaaagagattaaaaaatatattacaaatgatggaacaagaaaaagcctctcaaggaacattgctcttattactttatttttatttatttatttatttatttatttatttaatacagggtcttgctgtgttgtcctggctggagtgtagtgacacaaacatggctcactgcagcctccacctcctgggtttaagcaatcctcctgcctcagcctcccgagtagctgggaccacaggtacccaccactgtgaccagctaattgttattttttgcaaagacaatgtttcaccatgttgcccaggctggtctcaaactcctaggctcaagtgatccccccaccttggcctcccaaagtgctgaattacaggtgtgagccatcacacccggcctgctcctaactggactgttgtcctttattactaaaagactggcccaagtcctagaa

SEQ ID NO: 2201 - DNA, 1197 bp, Homo sapiens
ccctcacaacagccttggaaaagatgagcgccagggctgtcagtacccatcggttcagtaagcgaggcattgtccacgctgcctattcactcgagagatgaatagtttcctgttttcgatggctggggagccagtatgagctcataaaccaaacagcaattttcagagacatctgttcctgatcttcagaataaactcagtgtccagttgcttcggctggtgggagccaatattcacgccactgactctctcaaagggagggtgggccctcggagacccagcttctctgacaagcagattagaccaaaaggctgcctcaaagatatgccactttgaaggaaagcgtagagaagcgtttacataaaagaagacgcttcctgttcagtggacaacttcatgccactttcaaggcacaccgatggccaggtgggacatttgtactgtagcagcacatggcaaaggtgagccagaagcagcctggatgctggctgatccggaggcctttgtgaagagcaaggagagggctccagcccacctccccgcagctctgccccagcccccgtgggccacagggaggctcaaggggagtgaactaggtaaacagattcctggaaactcacatctggatgcagctggaagagttaaatatttacattggtggcttccctggaccaccgcgaacacaaacatccacaccacagggctgagttttgtgcaaatgatggggctttgcattttttattaacattttcctctcacgtggtttacatcaatttataataatctacataagttgaaacagaacatagacaaaaaaatatatccttaccaacttattaaagtcagatattcatgaagggtcccatcctacctgtgtatcagcagaaactggcagccatcagccattgcccagcaagaacaggcagacctggcgtttcttagcctgactcctgctgggcacagcccaccctgctgggcacagtgactggaggttccaggctgcacagtccctggctcctgactcctgccgggcgcagtgactggaggtttcgggctgcatggtccccggctcacaggagaccctgctgggtgtttccttggtgcagtttagtccaggtctggcacctgaccctccccactctgggggtgggatttataaatatgagcctttgcatttctcagcctttgcagccttcc

SEQ ID NO: 2202 - DNA, 1177 bp, Homo sapiens
tagttgtgtctgatgctccgtgctgttcgggaattgttttatgtacacttgtcaggcagaaaaggtagtgaccggcccggcgtgggcacacagacagcccgctttgttctttcatttcctccagcactttctttccgcctgagtccagcccaaggccttttattttgcgctgtgtaactgctgccagcttctctcttggccctgctcccagatggcggtctcctggcagcctcccctcagtcttcctccacccgctcttccttcccagcctgcctgcatgcatgtgcacccttggtcttcgctccatcgccttgaaagctctgaagaggccctgggttgccgcggcagcagtggtctgtttgatgctgccgtttgccgctgccggcccctcctcagactccgcctttgggagcacacctgctttgccttgctgcctgtgcaaatgttggacaagcagacacactcacactcgtccccagcttagcacagagctggagcgcccatttctggaattttccgtttgggaatctccacttctggggtttacctgttcggcctcctgtctatcagtgaggcatctctgactgtttcttctactgcttttcagttcccttccctgctgttctatttcctttgagtgtaaagactcacaggtgacctgctatcgagatagccagagggtcaggagagaatgggggaggaggcggtcaggctgctgaggaaacaccacaggctgaacgggggaggaatgcacatgccacgctgggtgtcccgggtcgcggggaggcagctcagctcttaggagcaagttgtgggggcttttcaagaggggccaggcttcctggagggtgactgatgtggccgaagcaggtgtccaggcaggtaggctgcagccaggagctccctggcaccgcaggacctcgtggtactcttgccttagattttacacacactccacagccaagcactgccacggtcctccaggacctgggaagcaaaggcacaggcccacggtggccagccattgtggtgccgccccagcttctggatacagccttttgggtaaacactgggaactccagaagttgtggggagagtggggaatcagacagccgcctctaggggctgggttctgctggggcctccttgttggtgctgtaggcacccgccagggagc

SEQ ID NO: 2203 - DNA, 1202 bp, Homo sapiens
atgactgtggccaggagaagagggggcagccagggccctctcccctgctgtgctggctctgattttttttttttttttttttttttgaggcggagtctcactctgtcacccaggctggagtgcagtggtgcgatctcggctcactgcaacctctgcctcctgggttcaagcaattctcctgcctcagcctcccgagtagctgggactacaggcgcccgccaccacgcccagctaatttttatatttttactagagatggggtttcaccacgttgcccaggctggtctcgaacttctgacctcaagagatcccccgcctcggcctcccaaagtgctgggatttcaggcatgagccgccgtgcccggcctgactctgatttgtagttcagattttgcgggaattaggcaggtccctgagtgcccaccctttggatggggactgagcactccccggtggccacacatcaggccccagagccgctcccctcaactcaccgcctcacccttcccaggacctgctgaagcacacacctgtggaccaccccgactacccgctgctgcaggatgccctccgcatctcccagaacttcctgtccagcatcaacgaggacatcgacccccgccggactgcagtgacaacgcccaagggggaggtgagctcagagcccggcacggcccctcacccaggctgagaagtatcaggtccctcgtccccttctctcacacacgggcggcaggtccctcgtccccttctctcacacacgggcggcaggtccctcgtccccttctctcacacacgggcggcaggtccctcgtccccttctctcacacacgggcggcaggtccctcgtccccttctctcacacacgggcggcaggtccctcgtccccttctctcacacacgggcggcaccgggtgcctcctgcctctccaatcctgatcccccattcccagccaaggagaggttttcagcccttggtcaccctgatgacctgcagctttccaggccctaggctgagaagtttaagtccagtgtctcattaatcctcataataatctagggaggccgggcacggtggctcacacctgtaatcccagcactttgggaggctgaggcaggtggatcacttgagttagaagtttgagaccagcctggccaacatggtgaagccccgtctttactaaaaatacaaaaattagctg

SEQ ID NO: 2204 - DNA, 1747 bp, Homo sapiens
cagcagaaccccacaataaaatacgatagaacttcttggcaacagtttattgctcagttaactattttgaagcatttctgataattagcttgtgggtaaattagattttgcaaaaagtttgcaaaatactcttgattcttgaagaggtgaggttattgagaaagagtattttgacccaagatttatgtgaaagcttgaatgtcattttagtaagatggtttccttggctgtctacgtcaagagcttatttagcgtaaaaacattgagttgtactgcgcatcagtttttttcattctgttgaccaataaatactttcaggaccataatcccttcttggcttaggcatctcaggtgtcaaggatgatagaagtcctttgcctgcgtttaataccaattgtagcaagtagaagagtctttatgcttggaatgacacctttgtttgtggctgccatagcctaatgtagtcaatacgaaataattgactttttttcttttttaacaggtgaagagcagaataaagaagcgctgcaggacgtggaagacgaaaatcagtgagacataagccaacaagagaaaccatctctgaccaccccctcctccccatcccaccctttggaaactccccattgtcactgagaaccaccaaatctgacttttacatttggtctcagaatttaggttcctgccctgttggttttttttttttttttttaaacagttttcaaaagttcttaaaggcaagagtgaatttctgtggattttactggtcccagcttttaggttctttaagacactaacaggactacatagaggctttttcagcattactgtgtcgtctccgtgccagatgtggcaagatcaccattagcaaatggaaattacatttgaaagccattagacttataggtgatgcaagcatctaagagagaggttaatcacactatagaggcataagtggtatcagttttcatttttctaattgtttaaactgtgttttataccagtgtttgcaagtaattgggtgttagcttgagatggttaaaggtggtttggggagggacttcgttgtaatggttttgctgtaaaaaatgtttccaactccgctgaaatgttgctgaaaagcatggtgctggtaacagttcaacaatccgtggctgctcattcttgcctactttactctcccactgaagcaggttagcgttgaaggtggtatggaaaagcctgcatgcctgttcaattcttttgtttcttctccttccccctccccctacctccttcccctcactcctcccctccttcgctcgctcaacctcttttgttcagtatgtgtaacttgaagctaatttgtactactggatatctgactggagccacagatacagaatctgtattgttcttactgaaacacagcatggaattaacattaaacttaaataaaacaaacctaaattaaaaatgccaaatatcgcgcctccatcctttatacttctaaaataaaatctctagtccaaacacactgacagtattatgtttgcctgaatgtgaaacattcctccttttttcttccataaataatttgtttgcttcccaaagatgtatgttttggaaaaaaattgcctgtagtctggttgtgaagaacactgagtcagttgatggtgtgtcttgtcctccagaccaggcagcaacatggtatttattttaatcattaaagtacaacatgagtagtacaaggtgtaattatggatca

SEQ ID NO: 2205 - DNA, 1178 bp, Homo sapiens
gctgggggtggtggcgggggcctgaaatcccagctactcgagaggctgaggcagcagaatcacttgaacccgggaaggcggacgttgtggtaacccgagatcgcaccactgcactccagcctggggaacaagagggaaactccgtctcaaaaagaaaaaagaaaaaagaaaaaagaaaagaaaaccagggcgcggtagtgacagcctcagatttcgggaaagaagacctgccatgacagaaaccgttacagcctccgtcgttcttttccgcaggtcgggcctcgggccccggtctgacccaggtctctcgctggcttttttcaggagcagtcccggccggccccgcctcagcccttctcgttccccgggggccgctccctttcggcagtcgcagttcccgcctctgggctccggcgcccgctgagccgacagaggagaggcgtctcgtgcgctcgttccagccgcttcgggcgccgagttccaggacccgccccccgcgccagttgccagggagcggttgccatagagctgagcagttgtccgcgtgcgcaggcggaagtcccggattgaggcgccgccatttttgctgcccggacgcggagcgagaggctgagagagtcggagacactatccgcttccatccgtcgcgcagaccctgccggagccgctgccgctatggatgatcgagaggatctggtgtaccaggcgaagctggccgagcaggctgagcgatacgacggtgagttgggggggcaacggggggctggaattctcggaccctctgccgccgcccacagaggccgggaacaggagacaaaatggcggcatcgtctgcgagcctggcccgggggcttgggttcgggaagcaggaaatggcctgggagctcccggggcgatgggaggctctatgccctggaatgtgaccccttcgccgtccttaactgcaaacaactcgcgggccgggaggccggggcgacggggtggaggagttggttgtaaaatggcggctggggggagggcgagtcccggggcgggggagggggaggagatggcgggtgctgtctccgaacgagccaccctcatgggagcttctgggacggccttgggatgtggagaacaattgggtggggtgacgggggaagcagcacccgccacatgggagagagcgaagaccggga

SEQ ID NO: 2206 - DNA, 1338 bp, Homo sapiens
ggaaaaaacaaggacgaaaagaaaagtctgagtaccggggcccccgtctgctcccctcaccacttggccgtctctctccgcccccacaggtcgccccacggctgaattctcggtgataaaggcgcccactggaccctcccaacgcccaatgctttgcttttctcctcctccccttcccagttaccaaagactcgaacttccagacagggacccagggacaccccgaagcccacctgcaatctcccacctcctgcccatccctctcttgagggagcagcaggggccaggagctaccccaggagtgggccaggccgggccacagcaataggaaagccagggccagagcgagccatgccagccctactgccgatgccaaatatttgagagaagggaacttttgctgaggttttctctgaggtttttttgatgctttataggaaactattttttaaaaaaagccatttcccacccaaggacacagtggatgtgttttccctgactccagcagggcaaggaatgtagccgagaggttgtgtgggctgggctctggtgccctcttccctggccaggacacctctcctcctgattcccttggcaccttgtctttctgtctgtttacctgtctccctgcctgcccatctgcatcttttgcagcccactctgacttccatctgggggctgagaccacccttgcctgcccccttctttctgccttaagaatgtccttttaggctgggcatggtggctcacgcctgtaaccccagcactttgggaggcggagacgggcagataacctgaggtcaggatttcgagaccaacctgacctacatggagaaactccgcctctagtaaaaatacaaaattagccgggcatggtggtgcacgcctctaatcccagctactcgggaggctgaggcaggagaatcacttgaacccgggaagtggaggttgcagtgagccaagagtacaccactgcactccagcctgggcaacagagcgagactccgtcttaaaaaaaaaaaaaaagaacgcccttttactgtcctcatcatcccagtttgaggcagtgctggagtggggaaggccgtcttagaccatagaggttggaagacgctgagagatcatccagcccagccccttgatgttacagagcagaagacagatgcccaaacaggagaaggcacttgcccacggtcatacggcaggttgccacaaaaccaagatggcagcccttcctcagcgtgcctcactgccactcccagagccagggagccccataaaacccacatcatgtcttaagagtatatctggctccttgaccagcaatcggccctggga

SEQ ID NO: 2207 - DNA, 1160 bp, Homo sapiens
gtgctgagatcaggggaatctggagccaccagtatatgcacaggtcacggtggctcccacgggctgtgggtaaaatgagaagaggtgcccatgccaggggctgagaaggaacgtccaggaaagttggagtggtcccgggtgggcgttgtgtcaaggaaaccgagagggggagatttcaaggggactttgacctcagggcagttgaggcaagacagagactggaggccgggcccgatggctcacgcctgtaatcccagcactttgggaggctgaggcgagtggatcacctgaggtcaggagttcgagaccagcctggccaacatggtgaaaccccgtctctactaaaaattacaaaaattatccatgcgtggtggcaggtgcctgtactcccggctacttgggaagctgaggcaggagaatcgcttaaacctgggaggaggaggttgcagtgagctgagatggcgccattgcactccagcctgggtgacagtgagactctgttttaaaaaaaaaaagaaagagagagactggaaagtgttgggcttgggcaacagcaggagtctgcatggctgtctgggaggaggggtagaattccaggtgtagggctcgaagagggagaggccagggaggaggcggcctttggagaagtttgcctgtgaagggcaggagagtgaggcagtggctgcagggagatttgggttgggcgggttttgtggttcaaggggagaggcttgatctgagtctacagacagacggcgaggcgtggtgggtagcgggggcggggagctgaggatgctgagggggccatctagaccaggaaggcagctgtcagaagccttggcctccggcggaatccatgctgcaggtggagctgtgttggcccacacagtgttttgtttgttttgtttgttttgtcgaatttgctgccaaccaattgcatgcaaaaatcctgattcccagcctctggcaaaatccaaagaattgataacccagggccccctcttccttctggggaggagcggcgggagcctggggcctgcagaggggcctggctcctgggttgccacctgtaccacctccctgcccactttagcctcttctgtttcctgcgtggcctctgaaatcatttgaattgagacctcggggtcaggagcagtgag

SEQ ID NO: 2208 - DNA, 1226 bp, Homo sapiens
aggcaactggaaagcccaccaggctggggactcctcctgcttacctttggcggactccttaagtaagcaggtgcagcggcggaccagtagagaaaacatggccaagcccagagctgcggcttgttcctggatcacagagcggcactcctccgagaagcagtctgcggacaggcaaatgaaactctcagcgccccaggcggacaagatgcacatcactggccacgttaccgagcttccttttcctcactgaagactagggctagtgatattccctctctcagagtggtcataaggccaagtagaaaatgcatgtgaagcacttaccatgaggtctggcatatggatatgtgtttgataagatgataagggtcacctctgtcaattctacatcactttcccaggaacggttacctcaggaagggcagtctgagctggagctgcatggtctctgcctttagctgcctactgataatgtaaagccatcgtaacaagaactcagatttaattaactcagtctctctagtgtataactaacaggagcacagtcatcagttaagattggaaaaatacacatttaaaaatgatcttctgtctactgccataccaccctgaacgcgcccgatctcgtctaaaaatgatcttcttgaatcaccaacctttagtcccatccttacttcctccatgtccctcctcctaagaaaacacacatgacacaaataacctactttcatggaatgagttaattttatgcagaacagtgcttggcacataataagcacttaatcagtgttggcttttgttttcacaaattccttcccctagcgctaaaaaataaacctggctcccaatcccagtaccctcttcccgtcactttttcagcctggctaactaacttccttctggctccaggtcaccgaaaggagccatctttttggtgggcagaattattctttggtgggagctatgtggcatactcccaaaagcctgcctgtacctactcttcatcactggccttccctgaaagccacgtcatctgaactcgagaggagctggtgacacacagaaggcagcagtccaccacacagcctccgaggaggagacaccacatacccacaggagacagaatcaggggccaggctcactagctctggcagcagctaatctgtgaattccctctctaatacaggagaactctcagaatctccaagtgttaaaaggataatcag

SEQ ID NO: 2209 - DNA, 1099 bp, Homo sapiens
aagagcagaatggtcctatagacccagaaaataatcggggacaagaatcctttcctaggactgctggacaagaggatcgtagtctaaaaattatcaaaagaacaaagaaacccgacctgcagatctatcagcctggacgacgtttgcagactgttagcaaagaatccgccagtcgggtggaggaggaagaagtcctcaaccaggtagaacaactgagagtagaggaagatgagtgtaggggaaatgttgcgaaggaggaagttgcgaataaaccagacagggctgagatagaaaagagcccaggtggtgggagagtaggggctgcaaaaggagaaaaaggaaagaggatgggaaaaggggagggggtgagggaaacccacgacgacccagcccgcgggaggccgggctccgcaaagcgctactcccgctcagacaaacgaaggaatcgctaccgcacgcgcagcaccagctcagctggcagcaacaacagcgctgagggagctggcctgacggataatggatgtcgccgccgccgacaggataggaccaaggagaggccacgactgaagaagcaagtgtctgtgtcctcaaccgattccttagacgaggacagaattgatgagcctgatggattaggacccaggagaagttcagaaaggaagagacatttagaaagaaactggtctggccgtggggagggtgagcagaaaaacagtgctaaagaatatcgaggcactcttcgtgtcactttcgatgcagaagccatgaacaaagagtctcccatggtgaggtcagccagggatgatatggatagaggaaagcctgacaaaggcttgagcagtgggggcaaaggctctgagaagcaggagtccaaaaacccgaaacaagaacttcggggtcgtggtcgtggcattctgattttgcctgcccataccaccctatctgtcaattcagcaggttctccagagtccgcgcctttgggacctcggcttttgtttggatctggtagtaagggatctcggagttggggccgtggaggcaccacacgccgattgtgggacccaaacaatcctgatcagaaacctgctctaaagactca

SEQ ID NO: 2210 - DNA, 1179 bp, Homo sapiens
tgccttgaaggccactgatttttgtgtggcagatgttgagctcttttctgttaggtgcaggaaggtaggttagcattgaagggtgcatgaaagctctgatcagcctgtgtttggcttaaatgccagtcattggtggaggtaaaggatgaacccgtgtttcagcatctacactccaccattaattagcattgtcagttcttagaatgagtctgaatctgctagtttggtttgccttctttcagtttaggcaattgtattcctagactatgaagatttttgtttttcttacttggtccccagatgtcagtattgaatatggtggtgaggcgtgaccctggcaacactgaacctgtgaaagccaaggaagagctcatatttcactgtggattcaggcgcttccgagcctcacctttattctctcagcacactgcaggttagcaatggggaagctgggttcttgtccatcttgtcttttgggaaagtgacttgtggtggaggggtgccaaaatatatggtttcaaaatcttacatctctgggttagaggtattttcagtactctggcttaagagccaatgatgtttttattcaaaatgtctgaacctgtctgaagcatcccagtgatgcaacttctgtgtgatactgaggcttttttgccatgagtatttgttccatagcaggttttgaatagaagttggcagctttataaaaagggtattagggtgggtgcagtggtgcagtggttcacacctgtaatcccaacacttgtggcattagaacggggaattgaagaccaaaaaaggtaagatttaatcttgtttttgtttctgttttttttttttttttttttttttttttgagacggagtctcactctgtcgcccaggctggagtgcagtggcgcgatctaggctcactgcaagctccgcctctcaggtttacttacaccattttcctgcctcagcctcccaagtagctgggactacaggcgcccgccaccatgcccagctaattttttgtatttttagtagagacggggtttcaccgtgttagccaggatggtctctatctcctgacctcgtgagccgcccgcctcagcctcccaaagtgctgggattacaggtgtgagccaccgcgccccctcttgttttttttgtttttttttgtttgtttgtttgtttg

SEQ ID NO: 2211 - DNA, 1179 bp, Homo sapiens; identical to SEQ ID NO: 2210

SEQ ID NO: 2212 - DNA, 1207 bp, Homo sapiens
gggcacatcactgtgcaccctgccaccctcaaccatgtggcccacctgggctcccagctgcccttgtacccgcagcccgtggcagtgagccacatcgcccacaccctctcgcaccagcaagtcaacggcacggccggcctggggcccccggctactgtcatggcaaagccggccgtgggggctcaggtggtgcaccacccccagctggtgggccagaccgtgctcaaccctgtgaccatggtcaccatgccctccttcccagtcagcacactcaagctggcttgaggacgaggccactcagaggcccccagtggggacagggagggggacctgtcccccactctctcacccaccagctccacacattccagccaggcccaggccagcccccccacccacccccaggcctcctaggggaagggggtgcaaagactctgagccaagggagggaagggccaccctgctgcactaggacttggtaagatgactctgagaaaatgcgagactctgatggaatgtgccacctgtccggcccagtgccagctccagtgccgctcctgcttcccctccctaccctcggaaatcagtgcgatgtggacgtcacgctccctgacttctcccccgccctgccccgccttcgtgtgctgctgctgctattgctgtctggtgaggtggcccaggcccccggctttcctccggagcctcatgttctcttcccaggcctttggaggggaaatggggaaagcagaactgaagccacttggcccagaaagctgcggattggggtgataaggggccttgctctgagcacaggtgacagatcataggaagtggctggtctggagtcccacccggacaggtggggcctcagcctggggctctctgacccggttgcagtcactgtgattcgttaccgtagatactacttaaaatgattctctaccaacaataaaccaaacccagccactgccaagcttcctgtgccctcaccccaatccctgccactgggctctggacctcaggagggcaggctgaggtggggaaggagggacttggctgtccttccccttccccgtcccctgcagcctgggtctggatgggaggagagccactgggcccctgtccccagtccccagtccccagccctgggcttggctcttggcttccagaaggcagcaaagaggggcgctgtcctgcgttcagcccc

SEQ ID NO: 2213 - DNA, 1223 bp, Homo sapiens
aatggggggaggggagtgcggaagctgactgcccacagagatgttgccgggatcaggatttggggtagcttccagtgaccctgctggatcctagtttccagaggagttttggaatggttaataccgcaccctataagacacgggcagtggaaccagagacacctgggggtgaccagcagcccctggatatgcccacaggtatgaacgtacctggggtggtggtaggcagggaatacgggggactttgagaagctggcatggattgcccttgtggtgggttgtcccccattcctctcgtccccccttcctataatgtgtgtaacaagatgttgcccgctgcacagaatgaatttcccgtgaaaatgacataaggtggttcagcatgaaataacattgagtcacctagtgagaaagttcttcccttttcagttctctgcgaatccttgtgatttctttgaggggaagtttcaggtggatgctagtctgcctttaacacattttaaacacttgctaatcttccttttgtaattaagagagagcagacctccggctcccggtcctctgagtggggaacagttgcctggctagaacttaggttgtttttgtttttgtttcatttatttttaggattctctcctggttaatggccagtggtactgatgtttttccatttgtggtagtgatataaaacatctctttaaacatatgaagtcacaagaattaatctattttatttatttatttatttatttttgaggaggagtctcactctgttagcccaagctggagtacagtggcgccatctcggcccactgcaacctccacctcctgggctcaaacaattctcgggcctcagcctccggagtagctgggactacaagtacccaccaccacgcccagctaattttttgtattttagtagagacgggggtttcaccatgttgcccagggtggtctcaaactcctgagctcaggcgatccacctgcctcggcctctcaaagtgctgggattacaggcatgagccaccgtgcccggctgaagtgaatctatttaatagaaatagtagtaataataatacaagtgttaacaaatatagtggaaatcctgcaagtggtctaggaatggctgatgccagcgacatgtgtgtctagcagaagaagctgccatgggaactctggagtgcaatgttccagggcctgagtccatcttcccctggacttgg

SEQ ID NO: 2214 - DNA, 1176 bp, Homo sapiens
acactgatgcacagatatctcatactgtgtcaggtggcaatgagtgttgtgaaaagagtaggggatagagaatgatggagactgttcttttagacaaggtgggcaggggaaatctctgagttagaaattctacagcggaactagtgctataatgcttgtaagtattaaaggtagaatgcttttcttaatggtagctttactactgaagaaatatcaaaaggactttaatttttatattaaaaatactcttctttcttaagttggatacgttgtctcaggtagaagaggagtctttgttaagaaacgatcttcgtccagctaacaaacttgctaaaggaaataggttattcatgagatttgctacaaaaggtaaatgtaatatttggtattgttttatattttcaatcaaaatgatttattatggagtgacatccttcttttttgaatagaagttagatcaagtaatctcaaagttcccttcaaactataatattctgcgcttatgaaataattgcttgccacctgagttggaatttctgactttaaaagtgaatattaactatttgtatatttctgtgacttctggctaaagttattttctgttgaaactggtttgcctcatatattttcagccagttaccatctgaattatgaaaactttcaaatgaaactttatttattacagcaacgtcctcctgaacattgccagtgtaccattcggttctaattcccttctcataagattgtttacacatggtgacttttggtgggcatttaaaaatgtgtgtgtatgtgtatatatgtatgtgtatgtatgtgtatatatgtatatgtatgtatgtatcgcgtgtatgtgtgtatgtatgcatgtgtatgtatgtatatgtatgtatgtgtatgtgtatatatgtatgtgtgtgtatgtatatgtgtgtgtatgtgtatgtgtgtgtgtatgtgtgtgtgtatgtatgtatgtatgtatatgtattatacacatatacacatattggtttttttaatcatttgagagttagttgaagataaaaacccatcacccctaaatgtattccaaagaataagaacattgttttatacatagcacacttaacaaaatcaagaaatttaacattaatacagtactgttacctaatccgtagtcgattttcaaatttt

SEQ ID NO: 2215 - DNA, 1335 bp, Homo sapiens
gccacaggtggcggtaatggtggtgggtgcacccagcctggcctggcctggccgcgggtggcagtaacggcggtggatgcacccagcctcattgttccctcagcaactcattcattcagtcaacatttgttgaacatttacagtgtgagttgaggtccttctcatgtaatgggagcccagacctgccccctacccctgcccccaccaagggaggggggttgatcccctggcacaggtcgaggccctggacccacatcctttgtctgcctctccaccccacagtgcccattcatcgacgatttcatcctggccctccacaggaagatcaagaatgagcccgtggtgtttcctgaggagtgagttgtccacccaggggaacaagggggctaccacccgctcctggtgtctgagttttagcagagcttttgccctctgaggaccccaccccagcctgcagatatgaaggtggcggtgctgttccctgggagggacccctgaatagatggacgggagggactctggagccaagggtctccgcaacgtcactgtgtggatgggaaccctgagatccagggttggccagggatgaccacaggcatcattcacaccactccttcaccgcaggcctgcctggggtcagtggcgccagccccacccagcccctggactcaaggggaacttctccttcccccactcagggtcagggaacttcaagatgccagtgcgtgctccccatttcacagatggaaaagaggatgctctggaggagagcggtcagggggctgggactcaagccactcttcctccccactcttcccattgtgaccgaggtctctgagcgtagcagggacgtcggggaggcctcttgctcatgcatggttcgcctcatgacggccaccgtggcagccacagcctgagctcccaggctcctcttttcagcagtggatttcaggagtgaaatggaggccgggtgcggtggctcacgcctgtaatcccagcactttgggaggctgaggtgggcagatcacctgaggttaggagttagagaccagcctggccaacatggtgaaaccccatctctactaaaaatacaaaaattagccaggcgtggtggcgcacatctgtagtcccagctactcgggaggctgaagcacgagaattgcttgaacccaggaggcagaggttgcagtgagcctgggcgacagagcaagactctgtctcaaaaaaaaaaaacagaagaaagaaactgaataaggccgggtgcggcggctcacacctgtaattccagcactttgggaggccaaggagggcggatcacgaggtcaggagatcgag

SEQ ID NO: 2216 - DNA, 1139 bp, Homo sapiens
agaccagcctggccaatatggtgaaaccccgtctctactaaaaatacaaaaattagctgggtgtggtggtgggcacctgtaatctcagctacttgggaggctgaggcggaagaattgcttgaacctgggaggctgagatgcagtgagctgagatcacaccactgcactccagcctgggagacagagtgagactcggtctcaacaacaacaacaaaaagaaatgaacttccttccccacagtgggcagagtcagatgggatctgtttccagacatttagtacagtgttctttctggtccacccttcttcctctcagtttgcatcagttggcattattttcatcgagcctgatgcctagaggaaagtcctttgtagacagctatatggctttggagagtaaatgcaacttgcccttttgctctctgatgttttttgtctttctgtagcccgagggaagaatgcgtctctgcccaaaccctgcttctgcagctactccagagctgcttctctgtgctgcagggagatgtactggctgcttctgaggaggaaaaggctccaatccaaagccctaaaggagtagaggctgccaaggagctgtacacacacttgtgtgatggtagggatttgggttttctctttaatacaaccctgtgtaggtagcgtgaagggcctcttgctatagagaagagggctgtcctacgatgatgcgagccagaaagggattgccgctgtgggaatcccccagaaagggattgccgctgtgggaatcccccagaaagggattgccgctgtgggaatcccccagaaagggattgccgctgtgggaaacgagtgtttcccctgatgctcttttgagctactagtttgagttcaggatttattccttcctcagctgacttctcttcctcctggtttcagatctatagctgtgttatgttgagagtcattactatcatactgttgagccttaacttcaactaagtcactcagatgaggctgatagattgagggggagtgaaacacgtgggcttctgaagttttatttaaggctttgccaagttgtgtctcaaaaggacagggaagtaatgacataaaaactgatacatacggtctttgttttagttaaatgaaagcaaataa

SEQ ID NO: 2217 - DNA, 1164 bp, Homo sapiens
gactaacttgatgggcgcttggttcctcttccagccagctgaggtgggtgtcctggttggcaaagaccggtcaagtttttacgtgaatgggctgacacttgggggccagaaatgttcggtgatccgggactcactgctgcaggatggggaatttagcatggatcttcgtaccaagagcaccggtggggcccccaccttcaatgtcactgtcaccaagactgacaagagtgagttcctgagtcttacccttcctttagctccaagatctctaatgtaccgccttctggtaatcttgagggtgcttttttgtgtgattccccaacatgaagggagtcagaccagtattgtgttccttgtctgctggatgctggaacacgggatagtccctccattctgtctcagttcctcatcttgtaattcgaagttgctgaactgcattacctcttaaattacttactgccttgagctcggattagaaactgttttctaggagtataggtagattgttggggtcttgaatcatcgagttcatcgtttgagttcttttgttagaacctggaggtggcatgcacatccacagccctttctagcctgaacacatgaatcaacagtctatgagcctttgacccctaagtttttagtctgttcctctccagcgtttaagcttgattttcctcttttgaaaagccttattgtttcagggtgactgacagcctgcctgtgtgtggtgggggggcgggttgggagagatgaggttgggttacagcccccagggctggacagctgctgaacagctggcagggggtggaattgtgacacctggatcctagcctcctttctctttcctcctcctccagcgctagtcctgctgatgggcaaagaaggtgtccacggtggtttgatcaacaagaaatgttatgaaatggcctcccaccttcggcgttcccagtactgacctcgtctgtcccttccccttcaccgctccccacagctttgcacccctttcctccccatacacacacaaaccattttattttttgggccattaccccataccccttattgctgccaaaaccacatgggctgggggccagggctggatggacagacacctccccctacccatatccctcccgtgtgtggttggaaaacttttgttttttg

SEQ ID NO: 2218 - DNA, 1113 bp, Homo sapiens
cccgcaggaactccctggatggagggggccgatcccggggagcgggttctgcacagcctgaaccccagcacttccagcccaaaaagcacaactcttatccccagccaccccaaccctacccagcccagcggcccccagggccccgctaccccccatacactactcccccacgaatgagacggcagcgttctgcccctgacctcaaggagagtggggcagctgtgtgagtcccacatcctgggcagagggcctggtggggccccttgctaggagaagggaagacgcccgagacgctgcttccccagaagtgctggggcagggaggcccaggagatgagagagaaggtccgagtaggtgatagaagacaagggggagaccgagccggaggctgaggaaaggaagagggcacggagttgccaggagcaaaccaaagtgaagagagagataggaagctgcctcggggccaccccttgcaaagggggtgtgtcccacaaacgctgctatgggtggggtggggggctggggtgctgcgtagccagtgtttgactttcttttcaagtgggggaaagtgggagaggactgagagtgaggcaagttctccccagcccctgtccgtctgtctgtctgtctgtggtggtttctgtttcttgggaggcatggtaggatcataagtcattcccctccccttccaggcctcctgctatatttgggggacctgactggtttggctggagtcccatgaggatgtgggccctttaataaaggatagcaaacagggagcttgtggcctgtttgttttgggttttcatggaggtgtaggttatataaggcaatggcacaggtcttaagcatacttatcagtgaagtattgtatgtgtgctctgtgcaggcaccacccagatctggatataagaatgtttccatcttgtcttcctgaacttcaccctcctgtctcttccttcagggtgcgcagcccgatcttttccccgctttttttttttgggagacagggtcttgctttgttgcccaggctggaggtacagtcttggctcactgcagcctccgcctcctgagtagctgggattacaggcatgtgccaccacgcccggctca

SEQ ID NO: 2219 - DNA, 1357 bp, Homo sapiens
ggaggctgaggtaggagaatcgctagaaccccgggggtggaggttgcagtgagctgagatcatgtcactgcactccagcctgggtaacagagaaagactctgtcttaaaaaaaaaaaagaggaatgatttcttcttatgttacagggggcccttgcaagattccagctggtatgagccttctgcagagctagtgcagactaggatggctgtatcactaacagcagctgaaactctggcccttcagggtacacagggacaagagaagatgatgatgatgggaccaaaggaagaggaacagtcttgtgagtatgagaccaggctacctgggaaccactctaccagtcaagagatcttccgccaacgcttcaggcatctccgctaccaggagactcctggtccccgggaggccttgagccaactacgagtactctgctgtgagtggctgaggccagagaaacacacgaaggagcagatcctggagttcctggtgctggaacaattcttgaccatcctgcctgaggagctccaatcctgggtgcggggacatcaccctaagagtggagaggaggctgtgactgtgctggaggatttagagaaaggacttgaaccagagccgcaggtgggaagggggatttggtctgttatgggagccagattgatgaccttcaggctggaccgaggggcagctgtagggggaggtgccaagttcaaacctctcttgggccaggtagagcagttagtatgtgtttctgtgtctgtcttttctgccctcgagccctgaatgagaaagagactctagctcctcttcttcccttgtgctgactctgaggaggctctctaaagtctccttggaagctttggtccaaggagggtcacatctgcaagtgtccaggcaggggacagaaaccacactagtaatttgaagaaaatttaaactgagtggtgcctgatcacctccaggtcccaggccctgcacatggacctgcacaggaagagccatgggagaagaaggaatctctgggagcagcccaggaagcactgagcatccagctccagcctaaggagacccagcctttcccaaagagtggtgaggagcaggattctgtggggagggagaggagaaagagggactataaagggcacagtacctagtacctgtaaagggtaaatagtagtaggtgcttaaatgtttggtatcatcacagccttactattcttatctcttaggtgagagactttgcctgtttcatcactcataaaattaggagtaagaataaactacctcataagatagctctgaggattaagctcaacttgggtcttatctggatataaagcctggccagcatctcttaa

SEQ ID NO: 2220 - DNA, 1171 bp, Homo sapiens
cagcccctcaagtagctgggattacaggcgtgcaccactacacctggctcatttttttgtatatttagtagagacagggtttcaccatgttggccgggctggtcttgatctcctgttctcaatttatccaccctccttggcctcccaaagtgctgggattataggagtgagccactgtgcctggttgaagtgtggctttttaatttgcacttccaggataggaattatattaattatggcctctttgtttattggctggctggcttgcttccttcctttcatccatttttttctttctttcatttttttctttttttgcttgccctcccttcctccctccctttcttcttcttcttcctcttccttttctcttctactatgagttgctgtttcacatctttcttttgtggcttgtctgtttatatctgtttcccatttttccattgggttgtccttttctcagtaatttggaggagctctttgtaaattatattagccctttggtatgtgttgcaaattttggtctcacagtttgtcatttacctcgttttaaaaattttttgttatgcagaaagctttaatttttatgtagatctgaccttttttttttttttttaaatttatggtttctgggtttcttattttgctgaggaagacctccccaactctcatgtttatttaaagagaaaaaaccttatcattttcaacacttgtggttttttatattttgtagtccaatccatttgcaatttatttatttttaaattagagaagtttaatataaagaattattaactaaactggagatcacccactaagacaaaagaaaaccctaaagaatacaagactagtagacataaggaacagtctcgcttccagggctgaggcagagcaccctttatttttttttctgaatagatagatagttgtcttaacgtttattcaatagttcatgtttttgtttgtaaattataacttggtaaatctcccaacctttgaactagcagagatacttaatctgaaaaacaaaagccctgcacttatccactgtctttgtcactctgatatcccaacacacagtagcctggaattaggtaatggcctttaattttcatgtcttacctggctttctgtggagagaattgcttttgaatcttaagggctctaattt

SEQ ID NO: 2221 - DNA, 1187 bp, Homo sapiens
tggatgaagagtgattcgagttgtgctttaggtagattagcttggcagcagcaggtgggtgaatcggagtgaggagatggtgagatggtcaaagcgagagggaagggcctttcctttccgggccgtcctgatggaatttaggtgaggggtgggtcacccaacctgcctgtggtctggtggctaatgtgagcacctccctcccagccctaccttcacaggcggtagtttccctgtttctggtccgtgctcctccagctgggccttcttcccctgaccttgctgatccttggtgaccacctccgaatgtcagaatccacatcgttaggctcacaatgtgggctgcttttgccccagtgggtccagttgccccaacacgctgtgtagtgctgaccagtgtttacgtgtggggtcggctccattcctcgctttctcccgaaacagatgtcaatgccaatcgcatcatcccgaggagacgtggagagtgtccgccgctgcctggctcacagcctcttcatgagcaccgccgagcttcagccagatggcacctatgccaccacggacacccaccagccagtggccatccacccgtcgtctgtcctcttccactgcaagccggcctgcgtcgtgtacactgagctgctctacaccaacaagtgctacatgcgggacctctgcgtcatagatgcacagtggctgtacgaggctgcccctgagtactttaggaggaagctgagaaccgccagaaactgagccgccccaggatgccgccagaatcactggtccctgggagcttggactacagttgtccttacagcaggcttccaggttggcgcttagagaagccttggaatcagctgaaggtgcctgacttccaggagcgtgaaagcatctttgctcaactcctgggactgaaccatatagacatggacatatcatttgtacctggaaacctcaaaattatgcttttggttcttactgggtgactttgacttaatttaacacctgagcctcagttttctcatctgccaaatgggagtaataataataatccttataaaattgggttcataaagtttagagaaaaggaatggaaagtacccagaactatgcctggagcacgcacgacacacgtacagtgagttgggagccgttaggctgaatgttactgcttgccatatgatgtgaag

SEQ ID NO: 2222 - DNA, 1409 bp, Homo sapiens
ttcctctccattcggtgtcttggggccctagcctcttgaagcagtgatttcttcctctcttcccttgctttccagacctagtcaacctgtctctcaatgacaacgatggctccagtggggcttcagaccaggataccctggctcctctgcctggggccaccccctggcccctgctgcccactttctcctaccaataccctgccccacacccctacagcccgcagcctccaccctaccatgagctttcatcttacacctatggtgggggcagtgccagcagccagcatagtgagggtaagtcatccccacatacctgtacggccaggatctgagggtggatgagaggggagccagggaggagcctgggtgaggactcagttgcccctcccctccctccacaggcagccggagcagtgggtcgacacggagtgatgggggggcagggcgcacggggaggcccgaggagcgggcccccgagtccaagtccggcagtggcagtgagtctgagccctccagccgagggggcagccttcggcggggtggggaagcaagtgggactagcgatgggggccctcctccatccagaggctcaactgggggtgcccctaatctccgagcccacccagggctccatccctatggaccgccccctggcatggccctcccctacaaccccatgatggtggtcatgatgcccccacctccacctccagtccctccagcagtgcagcctccgggggcccctccagtcagagacctgggctctgtgcccccagaactgacagccagccgccaaagcttccacatggccatgggcaatcccagcgagttctttgtggatgttatgtagcccactgtggggccaggctgggccgggcgctcctggtgtgtgactgggtgtcctggccgtcatgtgcttgctcttacagtgcctgggctcagcctaccagctgctgccatacaggagattgtggccactgtgactctcaccagcagtgcctggttcctcccccttccctcaggggtagacaagggacctttgattatttttagctttgtttttttataagcctttttgggggttaaaatagagtttcttacatttttgggacttttttaataggcatttcctcttttatatgaagaattcccatccattgggccccttctaaccccagaatgtgacctcctcctccagttacccacagccctgccctttgcagggttgggggtggtcagcggtaccccggggttaggcatcctagacagcagcctgaggaagctgggagatttgggccatgtagctgcctttgttactctatttattttagtcacttgtataaaacaccaaataaagcaatagaggcaaactccccacgcctctggctcctttctttgggagggaggca

SEQ ID NO: 2223 - DNA, 1232 bp, Homo sapiens
tggcttgccttaaagtttcataatagccgtgggttgggggtttggacagaacagtaggagtagagagaaggaaagagaacagtgagctagagaaactatctgttcgggactcttcccagtccccctccccattccaaagcagcagaaaacagtttgaggcctttttgcccaggactgcagagattatactgctcgtgtggtaggccttggagtcagtgaaggagtcaggcaatggtttgtggttctagaagaacgtgtctgggtcgtggttggtttaagttactggagcccagttgctgaacagttttctgctttcatcccaggaacaccatgaagaagacttctttctctacattgcctacagtgacgaaagtgtctacggtctgtgaagctgctgcccctgagctggaggggggtctcattctacaaagagagaggtggcccccctttcttgacctcctcctccttcaagctcaaacaccacctcccttattcaggaccggcacttcttaatgtttgtggctttctctccagcctctcttaggaggggtaatggtggagttggcatcttgtaactctcctttctcctttcttcccctttctctgcccgcctttcccatcctgctgtagacttcttgattgtcagtctgtgtcacatccagtgattgttttggtttctgttccctttctgactgcccaaggggctcagaaccccagcaatcccttcctttcactaccttcttttttgggggtagttggaagggactgaaattgtggggggaaggtaggaggcacatcaataaagaggaaaccaccaagctgaactgaattttgccttgtgttgctcccctcgtcccgctgattttaagtctttccaaggtgtcagtgggtttcagtggtggggaaagaagagtactgggtacaagctggagggatagaagtatattttggtttattctgttcatgttgggcttttccctgtctgcaaaaagagggtgcttttgttgtgatggaatggaatactgaggattatttcttgaaactttagttttataacacgcatgtgaaactaaatgttaaaaatgctcatgtaaaaaaaaatttttttttactgtgggttcctgtggagaaagttccgaagtacctgctttaggtgaacatccacatttgctagaacattctaactaagatattttcatgtgtgcaagctagtaaaacggctgttctcagtt

SEQ ID NO: 2224 - DNA, 1099 bp, Homo sapiens
agcagaagtacgactgtggagaagagatcctggtatggtgcctccctccctgcttctgtgctcagctttgttctgtacgtttcttcctgagctcagacatctcttggctatccctcttgcttctccagatcacggtgctgtctgccatgacagaggaggcagctgttgcaatcaaggccatggcaaaataactggctcccaggtgagtgtgacaaatccctcactgtccccttcacattttgttgtcctcagcagagctgctgtagtcttaattgtttcaggcttactttctgcccctagcctggctctgtcctccctatccttcctgttgaaggtattatcctgtcttactaatttctctctcctacctagggtggcggtggtggcagcagtgatcctctgaacctgcagaggccccctccccgagcctggcctggctctggcccggtcctaagctggactcctcctacacaatttatttgacgttttattttggttttccccaccccctcaatctgtcggggagcccctgcccttcacctagctcccttggccaggagcgagcgaagctgtggccttggtgaagctgccctcctcttctcccctcacactacagccctggtgggggagaagggggtgggtgctgcttgtggtttagtcttttttttttttttttttttaattcaatctggaatcagaaagcggtggattctggcaaatggtccttgtgccctccccactcatccctggtctggtcccctgttgcctatagccctttaccctgagcaccaccccaacagactggggaccagccccctcgcctgcctgtgtctctccccaaacccctttagatggggagggaagaggaggagaggggaggggacctgccccctcctcaggcatctgggagggccctgcccccatgggctttacccttccctgcgggctctctccccgacacatttgttaaaatcaaacctgaataaaactacaagtttaatatgaagcccccaactcagctgcttatttgaattaaatgggtgtatttggaagccacaaaaagactgaactctgccactgagttcactggaacccgctg

(The sequence listing continues in the following parts.)
